United States Patent Application Publication US 2007/0015145 A1 - sequence listing, part 4

SEQ ID NO: 8917 - DNA, 2129 bp, Rattus norvegicus
  misc_feature (1)..(2129): n=a, c, g or t
  ref <308>: DATABASE ACCESSION NUMBER: EMBL / U76714
  ref <309>: DATABASE ENTRY DATE: 2000-03-04
gaggccgctcgagagcaggcttagggtctactgcggccggtggaccctccaacccgcttccataaggctttagctttccaacttcagctacagtgttagctaagtttggaaagaagacataaagaagaccccggtgggcagctttgctgttctttgccttagttgtcctttggggtctttcggcacaaggctgctgtgcttatagccgtgctatctccggttcctcacactcctgtgaagaagccctgggcaagagcagctaaagctactagcatccgaacaaacaaggggagagcgtctggtgccatgaccaagtcaagagatcagacccatcaggaaggatgctgtggatctttagcaaactacctgacctcagcaaaattcctcctctaccttggccactctctctccacttggggggatcggatgtggcactttgcagtgtctgtgtttctggtggaactctacggaaacagcctcctcttgacagctgtctacgggttggtggtggcaggctctgttctggtcctgggagccatcattggtgactgggtggataagaatgccagacttaaagtggcccagacgtccctggtggttcagaatgtatcagtcattctctgcgggatcatcctgatgatggttttcttacacaagaatgagcttctgaacatgtatcatggatgggtccttactgtctgctacatcctgatcatcaccattgcaaacattgcgaatttggccagtactgccactgcaattacaatccaaagggactggattgttgtcgtagcaggagaaaacaggagcagattagcagacatgaatgctaccattagaaggattgaccagctaaccaacatcctggcccccatggctgttggccagattatgacattcggttccccagtcattggctgtggtttcatttctggttggaatttggtgtccatgtgtgtggagtacttcttgctctggaaggtttaccagaagacccctgctctggctgtaaaagctgctctcaaggtagaggagtcagaactgaagcagctgacctcacctaaagatacggagccaaaacctttggagggaactcacctaatgggtgagaaagactctaacatccgtgaacttgaatgtgaacaagaacccacctgtgcctcccagatcgcagaacccttccgcacttttcgagatggatgggtctcctactataaccagcccgtatttttgggctggcatgggcctggctttcctctatatgacagtcctgggcttcgactgtatcgccacagtatatgcttacactcagggactgagtggttccatcctcagtgttttgatgggagcatcagcaataactggaataatgggaactgtggccttcacttggctacgtcgaaaatgtggccttgttcggactggtctgttctcaggactggctcagctttcttgtttgatcttgtgtgtgatctccgtgttcatgcctggaagccccttggacctgtctgtttctccatttgaagatatccgttctaggtttatacatgaggaggcagtgtcctcaactaccaaaatacctgaaacggaaatgcttatgtctaatgtgtctaatgttgtcaataccgtccatgagatgagtactaaatccgtccccataatctccgtcagcctgctgtttgcaggagtcattgctgctagaatcggtctttggtcctttgatttgactgtgacacagttgctgcaagaaaatgtaattgaatcagaaagaggcattatcaatggtgtgcagaactccatgaactaccttctcgaccttctgcatttcatcatggtcatcttggccccaaatcctgaagcttttggcttgctagtattgatttcagtcncctttgtggcaatgggacatcttatgtatttccgttttgcccngaagactctgggcaaccagatttttgtttgtgctcctgatgaaaaggaagttacagatgaaagtcagcctaatacatctgttgtgtaaaatagtttagctgtggcccctgttactagatttgtggagagcatgtgtgcttattttgtactacagaattccaataaatgcctgcacttttaaaaaaaaaaaaaaaaaa

SEQ ID NO: 8918 - protein, 405 aa, Rattus norvegicus
  ref <308>: DATABASE ACCESSION NUMBER: SWISS-Prot / AAD00260
  ref <309>: DATABASE ENTRY DATE: 1999-05-01
MTKSRDQTHQEGCCGSLANYLTSAKFLLYLGHSLSTWGDRMWHFAVSVFLVELYGNSLLLTAVYGLVVAGSVLVLGAIIGDWVDKNARLKVAQTSLVVQNVSVILCGIILMMVFLHKNELLNMYHGWVLTVCYILIITIANIANLASTATAITIQRDWIVVVAGENRSRLADMNATIRRIDQLTNILAPMAVGQIMTFGSPVIGCGFISGWNLVSMCVEYFLLWKVYQKTPALAVKAALKVEESELKQLTSPKDTEPKPLEGTHLMGEKDSNIRELECEQEPTCASQIAEPFRTFRDGWVSYYNQPVFLGWHGPGFPLYDSPGLRLYRHSICLHSGTEWFHPQCFDGSISNNWNNGNCGLHLATSKMWPCSDWSVLRTGSAFLFDLVCDLRVHAWKPLGPVCFSI

SEQ ID NO: 8919 - DNA, 2286 bp, Homo sapiens
  ref <308>: DATABASE ACCESSION NUMBER: EMBL / AK002038
  ref <309>: DATABASE ENTRY DATE: 2002-08-06
cttaaagaagaggaaactgaattgaaacagctgaatttacacaaagatactgagccaaaacccctggagggaactcatctaatgggtgtgaaagactctaacatccatgagcttgaacatgagcaagagcctacttgtgcctcccagatggctgagcccttccgtaccttccgagatggatgggtctcctactacaaccagcctgtgtttctggctggcatgggtcttgctttcctttatatgactgtcctgggctttgactgcatcaccacagggtacgcctacactcagggactgagtggttccatcctcagtattttgatgggagcatcagctataactggaataatgggaactgtagcttttacttggctacgtcgaaaatgtggtttggttcggacaggtctgatctcaggattggcacagctttcctgtttgatcttgtgtgtgatctctgtattcatgcctggaagccccctggacttgtccgtttctccttttgaagatatccgatcaaggttcattcaaggagagtcaattacacctaccaagatacctgaaattacaactgaaatacatgtctaatgggtctaattctgctaatattgtcccggagacaagtcctgaatctgtgcccataatctctgtcagtctgctgtttgcaggcgtcattgctgctagaatcggtctttggtcctttgatttaactgtgacacagttgctgcaagaaaatgtaattgaatctgaaagaggcattataaatggtgtacagaactccatgaactatcttcttgatcttctgcatttcatcatggtcatcctggctccaaatcctgaagcttttggcttgctcgtattgatttcagtctcctttgtggcaatgggccacattatgtatttccgatttgcccaaaatactctgggaaacaagctctttgcttgcggtcctgatgcaaaagaagttaggaaggaaaatcaagcaaatacatctgttgtttgagacagtttaactgttgctatcctgttactagattatatagagcacatgtgcttattttgtgctgcagaattccaataaatggctgggtgttttgctctgtttttaccacagctgtgccttgagaactaaaagctgtttaggaaacctaagtcagcagaaattaactgattaatttcccttatgttgaggcatggaaaaaaaattggaaaagaaaaactcagtttaaatacggagactataatgataacactgaattcccctatttctcatgagtagatacaatcttacgtaaaagagtggttagtcacgtgaattcagttatcatttgacagattcttatctgtactagaattcagatatgtcagttttctgcaaaactcactcttgttcaagactagctaatttatttttttgcatcttagttatttttaaaaacaaattcttcaagtatgaagactaaattttgataactaatattatccttattgatcctattgatcttaaggtatttacatgtatgtggaaaaacaaaacacttaactagaattctctaataaggtttatggtttagcttaaagagcacctttgtatttttattatcagatggggcaacatattgtatgaagcatatgtagcacttcacagcatggttatcatgtaagctgcaggtagaagcaaagctgtaaagtagatttatcacacaatgactgcatacagacttcaaatatgtcaatagtttggtcatagaacctagaagccaaaagccacacagaagggcaagaatcccaatttaactcatgttatcatcattagtgatctgtgttgtagaacatgagggtgtaagccttcagcctggcaagttacatgtagaaagcccacacttgtgaaggttttgttttacaaatcacttgatttaacacactcaggtagaatatttttatttttactgttttatacccagaagttatttctacattgttctacagcaagaatattcataaaagtatccctttcaaatgcctttgagaagaatagaagaaaaaaagtttgtatatattttaaaaaattgttttaaaagtcagtttgcaacatgtctgtaccaagatggtactttgccttaaccgtttatatgcactttcatggagactgcaatacgttgctatgagcactttctttatccttggagtttaatcctttgcttcatctttctacagtatgacataatgatttgctatgttgtaaaatctttgtaaaaaatttctatataaaaatattttgaaaatctt

SEQ ID NO: 8920 - protein, 571 aa, Homo sapiens
  ref <308>: DATABASE ACCESSION NUMBER: Refseq / NP_055400
  ref <309>: DATABASE ENTRY DATE: 2002-04-04
MTRAGDHNRQRGCCGSLADYLTSAKFLLYLGHSLSTWGDRMWHFAVSVFLVELYGNSLLLTAVYGLVVAGSVLVLGAIIGDWVDKNARLKVAQTSLVVQNVSVILCGIILMMVFLHKHELLTMYHGWVLTSCYILIITIANIANLASTATAITIQRDWIVVVAGEDRSKLANMNATIRRIDQLTNILAPMAVGQIMTFGSPVIGCGFISGWNLVSMCVEYVLLWKVYQKTPALAVKAGLKEEETELKQLNLHKDTEPKPLEGTHLMGVKDSNIHELEHEQEPTCASQMAEPFRTFRDGWVSYYNQPVFLAGMGLAFLYMTVLGFDCITTGYAYTQGLSGSILSILMGASAITGIMGTVAFTWLRRKCGLVRTGLISGLAQLSCLILCVISVFMPGSPLDLSVSPFEDIRSRFIQGESITPTKIPEITTEIYMSNGSNSANIVPETSPESVPIISVSLLFAGVIAARIGLWSFDLTVTQLLQENVIESERGIINGVQNSMNYLLDLLHFIMVILAPNPEAFGLLVLISVSFVAMGHIMYFRFAQNTLGNKLFACGPDAKEVRKENQANTSVV

SEQ ID NO: 8921 - DNA, 2129 bp, Rattus norvegicus; identical to SEQ ID NO: 8917
  misc_feature (1)..(2129): n=a, c, g or t
  ref <308>: DATABASE ACCESSION NUMBER: EMBL / U76714
  ref <309>: DATABASE ENTRY DATE: 2000-03-04

SEQ ID NO: 8922 - protein, 405 aa, Rattus norvegicus; identical to SEQ ID NO: 8918
  ref <308>: DATABASE ACCESSION NUMBER: SWISS-Prot / AAD00260
  ref <309>: DATABASE ENTRY DATE: 1999-05-01

SEQ ID NO: 8923 - DNA, 2286 bp, Homo sapiens; identical to SEQ ID NO: 8919
  ref <308>: DATABASE ACCESSION NUMBER: EMBL / AK002038
  ref <309>: DATABASE ENTRY DATE: 2002-08-06

SEQ ID NO: 8924 - protein, 571 aa, Homo sapiens; identical to SEQ ID NO: 8920
  ref <308>: DATABASE ACCESSION NUMBER: Refseq / NP_055400
  ref <309>: DATABASE ENTRY DATE: 2002-04-04

SEQ ID NO: 8925 - DNA, 1792 bp, Rattus norvegicus
  ref <308>: DATABASE ACCESSION NUMBER: EMBL / U77483
  ref <309>: DATABASE ENTRY DATE: 1999-01-29
cccctccacgaacgccccagccccctcctccttcgcctctaagagggtgctctcctacccacccacccactcccacttcacccttccagagtattctgaaaggatgagggctatattctagaagtatgcaagatgcagaggccaccagtaaaagaccataggagacaaaaatcccctcacttcgtggtgtagtttctagtgtcaggtccagcagacagcaaccagacctgctagaccgtcaagggtctagcctctgcaccctcacctggaatattgtaaactccattgtaaattcaattgtaaaacgtaattcctatattggctttaccctctgcaaagagctgaactctgacccctgagcctgctgaggaaactgcccggctcagccttaatcacttactaaggtgtatttcctacatacattaaccctctgaggagtcgatagcacactctttgacagattaggaaactgactgtcagtcaggtcccagagacagactggctgcacagccagatacgttggtagacatgttcttcagccattagcaaaattccttcggtgctcattggtcacttgtagggagcaccatagcatgccaggtgtctaggttggcctcagtagtacccatatccagtacctgtcccatcccagcactttcacaggtggcctgtctccttggggtatgcaacacaacggtccccacttcccaacagaggaaaacggtgggatgtagtcctgcctctgaagcagccaactggtgagcaccaacacatggtcatgggtcatcctgggctctaagacatataacatgcttacagttacaagaatggagaagacagagaaacactactgtagtgcccctgggctgagtctttcttgtgctggagtaaggtgcaaccagccaagacccacacacggggctcctcctgatgagaggctcgtttgtcaaggagctgatgtctcctggggagtctccagtgatctccaagggcttcagtgatctgggtcccttctgctgctctctgttgcgggggtcgactcccagaagtacccctacatgctaaaaaggaaagcgaaccattcgctcgaaatctcgccggcttaaccaattagggttttctcgcgccctaaaggattattgacacgatccaaagaagccagggcgacagcgcattgcaaagagaccgggtagggaattggttgccagggctgaattcgaaccctacttgaggtagggcagggcaaccagggtgcaaggaaccagggctacactgctctcagggtgggtttcccaagatgctagaagtagcttcggtgtggatcggcgcagtgcagtgccacggtcgctggagccagcagcgcgtgcggtaaggcggcgcgcgcacagccgcgccccgcccctgtctgtcgttattggattactcgcacgtccgtcggctgttatcggccaatggaaaacgagccggagctagtggtcgggcggcagagcgaggtgcggggcagacgagcgacagaccccgcccgcggttggcctggcaacggactgcgctcgcgactccgccccctgctggcggcggcgcggtgcggggcgggtggacccgcttgcaggcccgcgggagggcggaggaggggagccggggcggcggagcgtgtgtgccacccgcggaccggtcacgtcctcgcgcggccgccggcacccgcttcgtgcagaaccagagcgccacagccctacgctcgcggccccgccccgccgggtgcagctcgaccgacgcacgaagccgcgcccgggag

SEQ ID NO: 8926 - DNA, 1062 bp, Rattus norvegicus
  ref <308>: DATABASE ACCESSION NUMBER: EMBL / U77583
  ref <309>: DATABASE ENTRY DATE: 2001-11-16
atggcgagcagcagcggctccaaggccgaatttatcgtcggtgggaaatacaaactggtgcggaagatcggatctggttccttcggggacatttatctagcgatcaacatcaccaatggcgaggaagtggcagtgaaactagaatcccagaaggccaggcatccccagttgctgtacgagagcaaactgtataagattcttcaaggtggggttggcatccctcacatacggtggtatgggcaaggaaaagactataatgtgctagtcatggatcttctgggacccagcctcgaagacctcttcaatttctgttcaagaaggttcactatgaagactgtacttatgttagctgaccagatgatcagtagaattgaatatgtgcatacaaagaattttatacacagagacattaaaccagataacttcctaatgggtattgggcgtcactgtaataagtgtttagaatctccagtggggaagaggaaaagaagcatgactgttagtccttctcaggacccatctttctcaggattaaaccagttattccttattgattttggtttggccaaaaagtacagagacaacaggacaaggcaacacataccatacagggaagataaaaacctcactggcactgcccggtatgccagcatcaatgcacatcttggcattgagcagagtcgccgagatgacatggaatctttaggatatgttttgatgtattttaatagaaccagtctgccatggcaagggctaaaggctgcaacaaagaaacaaaaatatgaaaagattagtgaaaagaagatgtccactcctgttgaagttttgtgtaaggggtttcctgcagaatttgccatgtacttaaattactgtcgtgggctgcgctttgaggaagctccggattacatgtatctgaggcagctgttccgcatcctcttcaggaccctgaaccaccagtatgactacacgtttgattggacgatgttaaagcagaaagcagcccagcaggcagcctcttccagtgggcagggtcagcaggcccaaacccccacaggtttctaa

SEQ ID NO: 8927 - protein, 325 aa, Rattus norvegicus
  ref <308>: DATABASE ACCESSION NUMBER: SWISS-Prot / AAB19228
  ref <309>: DATABASE ENTRY DATE: 2002-06-15
MASSSGSKAEFIVGGKYKLVRKIGSGSFGDIYLAINITNGEEVAVKLESQKARHPQLLYESKLYKILQGGVGIPHIRWYGQGKDYNVLVMDLLGPSLEDLFNFCSRRFTMKTVLMLADQMISRIEYVHTKNFIHRDIKPDNFLMGIGRHCNKLFLIDFGLAKKYRDNRTRQHIPYREDKNLTGTARYASINAHLGIEQSRRDDMESLGYVLMYFNRTSLPWQGLKAATKKQKYEKISEKKMSTPVEVLCKGFPAEFAMYLNYCRGLRFEEAPDYMYLRQLFRILFRTLNHQYDYTFDWTMLKQKAAQQAASSSGQGQQAQTPTGF

SEQ ID NO: 8928 - DNA, 222 bp, Rattus norvegicus
  ref <308>: DATABASE ACCESSION NUMBER: EMBL / U77626
  ref <309>: DATABASE ENTRY DATE: 2000-07-30
gaactgaaatagatttcattgtccacttagatgtttcccattttctggttacatttcttaaatagaaatttcatattctatttgaagtatttccctttattacttttgaatatttttaatcatatttttcataagttatatgtaacttttggtagcgaatgtctttttacaattgttagtgtacttgtaagaatagcttattaaaaaccataaagtaaatta

SEQ ID NO: 8929 - DNA, 429 bp, Rattus norvegicus
  ref <308>: DATABASE ACCESSION NUMBER: EMBL / U77829
  ref <309>: DATABASE ENTRY DATE: 2000-03-04
gtgaggcgaagctgagcaggaatggccctgtggacctctgtgatgggacatctggtggaatctcacaggcagttctgtggcaaagatggatgaaagctaaggactcatgaggaagctggataactgaacaaagccatgtacaagaatgggaagccagaaaatgggatggtggagtttgaatcaggtggacagttctaaaagtacaaatgatttcgtataaaggtaccacatgtgggtccctttaactgaaggcatggcaagctccacacaaggtccttcatttctgaatttcaagggctcctctgacaagtggacagtgcagtgggtgcaccttttccagaggtgactggatggatgcttgaacagaagatttgccaaatagacattgtgctgtcaagaattttaccattaaaagtgcattattgtagc

SEQ ID NO: 8930 - DNA, 429 bp, Rattus norvegicus; identical to SEQ ID NO: 8929
  ref <308>: DATABASE ACCESSION NUMBER: EMBL / U77829
  ref <309>: DATABASE ENTRY DATE: 2000-03-04

SEQ ID NO: 8931 - DNA, 1038 bp, Rattus norvegicus
  ref <308>: DATABASE ACCESSION NUMBER: EMBL / U77931
  ref <309>: DATABASE ENTRY DATE: 2001-12-10
ggctgctaggcgccggccgaggcgaggcgccgcgcggaaaaccgcggcccggggggcggacccggcgggggaacaccgacgcggaggttccccccacacgcgcgggacacgcccgcccgcccccgccacgcacctcgggagaggcgatgggggggtggagcgaggccccgcggggaggggacccgcgccggcacccgccgggctccccgggagcggccgcgacgcccgccgcagctgaggcgatccacgggaagggcccggctcgcgtccagagtcgccgccgccgccggcccccccgagtgtccgggccccccgccccaccgggggcccgctggttcctcccgctccggaacccccgcggggttggacccgccgccccggagcccgcgccgcgcgccgacccccgacccgccccccgacgggaagaaggaggggggaagagaggtggcgacgacgcgggggacgacggggccccgcggggaagaggggagggcgggcccgggcggaaaggacggggggtctccccggacgtgggagagggcggcggcgcctcgtccagccgcggcgcgcgcccagccccgcttcgcgccccagcccgaccgacccagcccttagagccaatccttatcccgaagttacggatccggcttgccgacttcccttacctacattgttccaacatgccagaggctgttcaccttggagacctgctgcggatatgggtacggcccggcgcgagatttacaccctctcccccggattttcaagggccagcgagagctcaccggacgccgccggaaccgcgacgctttccaaggcacgggcccctctctcggggcgaacccattccagggcgccctgcccttcacaaagaaaagagaactctccccggggctcccgccggcttctccgggatcggtcgcgttaccgcactggacgcctcgcggcgcccatctccgccactccggattcggagatctgaacccgactccctttcgatcggccgagcctctgtcaagtcttggaccaagtaaaaat

SEQ ID NO: 8932 - protein, 295 aa, Rattus norvegicus
  ref <308>: DATABASE ACCESSION NUMBER: SWISS-Prot / AAK21974
  ref <309>: DATABASE ENTRY DATE: 2002-10-01
MGGWSEAPRGGDPRRHPPGSPGAAATPAAAEAIHGKGPARVQSRRRRRPPRVSGPPAPPGARWFLPLRNPRGVGPAAPEPAPRADPRPAPRREEGGGKRGGDDAGDDGAPRGRGEGGPGRKGRGVSPDVGEGGGASSSRGARPAPLRAPARPTQPLEPILIPKLRIRLADFPYLHCSNMPEAVHLGDLLRIWVRPGARFTPSPPDFQGPARAHRTPPEPRRFPRHGPLSRGEPIPGRPALHKEKRTLPGAPAGFSGIGRVTALDASRRPSPPLRIRRSEPDSLSIGRASVKSWTK

SEQ ID NO: 8933 - DNA, 3365 bp, Rattus norvegicus
  ref <308>: DATABASE ACCESSION NUMBER: EMBL / U77933
  ref <309>: DATABASE ENTRY DATE: 1998-01-17
ctggaaatggcggcgtcgagcgggaggtctcagtcttccctgcacaggaaggggctgatggcggctgacaggaggagcaggattttggcagtgtgtggaatgcatcctgaccatcaggaaactctgaaaaagaatcgagtggtgctggccaaacagctgctgctgagcgaactgttagaacatctcctagaaaaggacattatcactttggaaatgagggagctaatccaggccaaagggggcagtttcagccagaatgtggaactcctcaacctgctgccaaagagaggaccccaggcttttgatgccttctgtgaagccctgcgggagaccaggcagggtcacttggaagacttactgctcacaaccctctctgatatccagcacatactcccaccgttgagctgtgactatgactcaagtctccccttctcggtgtgtgagtcctgccctcctcacaagcagtcccgcctatccacagatactatggaacactccttagataatggtgatggtcctccctgtcttcaggtgaagccatgcactcctgagttttaccaggcacactaccagctggcctataggttgcagtctcagcctcgtggcttggcactggtgatgagtaatgtgcacttcactggagagaaagacctggaatttcgctccggaggggatgtggaccacactactctagtcaccctcttcaagcttttgggctacaatgtccatgtgctgtatgaccagactgcacaggaaatgcaagagaaacttcagaattttgcacagttacctgcacaccgggtcacagactcctgcatagtagcactcctctcacatggtgtggaaggtggcatctacggggtggatggcaaactgcttcagctccaagaggtttttcgactttttgacaatgctaactgtccaagtctacagaacaaaccaaaaatgttcttcatccaagcatgtcgtggagatgagacagatagaggggttgaccagcaagatggaaagaaccatgcacaatcccctggatgtgaggagagtgatgctggcaaggaggaattaatgaagatgagacttcctactcgctcagacatgatatgtggctatgcttgccttaaaggcaatgctgccatgcggaataccaaacggggttcctggtacattgaggccctcactcaggtgttctctgagagagcttgtgacatgcacgtggccgacatgcttgttaaggtgaatgcccttatcaaggagcgtgaaggctatgcccctggtacagaattccaccgatgcaaggagatgtctgagtactgtagtactctgtgccagcagctctacctgttcccaggctacccacccacgtgatgccacctgctagtcatgctgttggaggccactggaccacggggcacaatggagacttctcttcaagatgtttttgttctgtctactccctcagggatatgagattctcccaagcttgtttcctgtcagccatctccgtctttgggggtgaaacttgaggacagctcctctggtgtggtgttctcttcctgtagagccagctatgaatggatctgttgccagaagcattttggctatagccaatgagactagaaaatgacattgtgaacacagtattattgtggggagagggcatacggatttctcaatgtttgtgatatttttgttcccagggctcttagggatactttgattattgcttttttatatcagttaaggactttcagatatcatctcctactttttttttcatatctgcaacctcattttttccatagtgaagatttggaaaatgtcccaatttaatgcagttgttgtcatctgtcatgaagcggcaggtgagaccctgctacttgagcagaagtttcagacctttgagttcaggccttaggtgaaggacagtccctcagcttttccattggtttctttgtgttcattgtacccagcttttgagcagagcctggggtctgcttgctgtgacactggaagttatatacgtttccctggttatgaattgtcactgaaatgaaccttattgggcatatcaacataaaaatgcagtgacaggtgagtgtgctgtgtctcatactgtcacttgtcaccaggatatctctccttccttactgtggtttctgctgtgcagttaaactacttgatggctgacctccaagaaccctcttgctttgcattggttcccctccttgacccattcactgcttctgccacgtctgtgaaatcttcccttgtagaatgtttctggccacttaagcagtactgcttcagcataaggtttcttcggttttctgcggcagtgtctccattctcactgtttctctgttttagtgaggatagtactataggtgatataacctagaagcacttatctctgctcttatgaaactttcttattcttaaaaaccttttgcatttccatttttttcctcttttccagtttattctccacatgacagagtagttttgtttttttttaatatctggtgatgtcactcccttgttaagaacattagcttcctgttacacctcatctaaaattcaaattcttacccagtttatgagatccggcttttacgttccctttggatctcattagatggtgatttctctctgtgttcagcccctcagttcctcagctcagtgttgcaagtgttctgagctcttctttaagatagtctctgattcttgagtctggcggaggcctcttgaccgtgatgttgatgaagtaagtcttctgtacctccttaggatggcatcatgttggtccttgtgcttactgcaggttgtaatggcacgtttcacttgctccctccaaagctgaaggctccaagagagcaggactgtactccttacttattggctattcagtacggcacttactaggtcttcaatgaatgtttcctgagtaaaggaaggagacaagcagctaactttagttagagcctatcttttgcgatttctaaattgctattatagtactcagtttaattagtatttgtactcttgtgggggtttttttccaggtgttttatttttatccactgttttgttgtttttttacattgtttgaagatgtatcacgtgtgagacaacttctttcacatctccatggtgccccgcaaatttgaggcctatggtagttgaggtgctcaattaatgtttgtcgtatgaaccaggtggtttgaagacttgctgccaaattctgcctttgggtcagtataggatgcatgagtggtagactcttcacacttcccactgccaagattttgtattgccatcaggtgccaaataaatgtcgatacttactactgacaaaaaaaaaaaaa

SEQ ID NO: 8934 - protein, 452 aa, Rattus norvegicus
  ref <308>: DATABASE ACCESSION NUMBER: SWISS-Prot / AAB96379
  ref <309>: DATABASE ENTRY DATE: 2002-03-01
MAASSGRSQSSLHRKGLMAADRRSRILAVCGMHPDHQETLKKNRVVLAKQLLLSELLEHLLEKDIITLEMRELIQAKGGSFSQNVELLNLLPKRGPQAFDAFCEALRETRQGHLEDLLLTTLSDIQHILPPLSCDYDSSLPFSVCESCPPHKQSRLSTDTMEHSLDNGDGPPCLQVKPCTPEFYQAHYQLAYRLQSQPRGLALVMSNVHFTGEKDLEFRSGGDVDHTTLVTLFKLLGYNVHVLYDQTAQEMQEKLQNFAQLPAHRVTDSCIVALLSHGVEGGIYGVDGKLLQLQEVFRLFDNANCPSLQNKPKMFFIQACRGDETDRGVDQQDGKNHAQSPGCEESDAGKEELMKMRLPTRSDMICGYACLKGNAAMRNTKRGSWYIEALTQVFSERACDMHVADMLVKVNALIKEREGYAPGTEFHRCKEMSEYCSTLCQQLYLFPGYPPT

SEQ ID NO: 8935 - DNA, 1048 bp, Homo sapiens
  ref <308>: DATABASE ACCESSION NUMBER: EMBL / AF314175
  ref <309>: DATABASE ENTRY DATE: 2001-02-03
atgcatcctcatcatcaggaaactctaaaaaagaaccgagtggtgctagccaaacagctgttgttgagcgaattgttagaacatcttctggagaaggacatcatcaccttggaaatgagggagctcatccaggccaaagtgggcagtttcagccagaatgtggaactcctcaacttgctgcctaagaggggtccccaagcttttgatgccttctgtgaagccttgcactcctgaattttatcaaacacacttccagctggcatataggttgcagtctcggcctcgtggcctagcactggtgttgagcaatgtgcacttcactggagagaaagaactggaatttcgctctggaggggatgtggaccacagtactctagtcaccctcttcaagcttttgggctatgacgtccatgttctatgtgaccagactgcacaggaaatgcaagagaaactgcagaattttgcacagttacctgcacaccgagtcacggactgctgcatcgtggcactcctctcgcatggtgtggagggcgccatctatggtgtggatgggaaactgctccagctccaagaggtttttcagctctttgacaacgccaaccgcccaagcctacagaacaaaccaaaaatgttcttcatccaggcctgccgtggagatgagactaatcgtggggttgaccaacaagatggaaagaaccacgcaggatcccctgggtgcgaggagagtgatgccggtaaagaaaagttgccgaagatgagactgcccacgcgctcagacatgatatgcggctatgcctgcctcaaagggactgccgccatgcggaacaccaaacgaggttcctggtacatcgaggctcttgctcaagtgttttctgagcgggcttgtgatatgcacgtggccgacatgctggttaaggtgaacgcacttatcaaggatcgggaaggttatgctcctggcacagaattccaccggtgcaaggagatgtctgaatactgcagcactctgtgccgccacctctacctgttcccaggacaccctcccacatga

SEQ ID NO: 8936 - protein, 435 aa, Homo sapiens
  ref <308>: DATABASE ACCESSION NUMBER: SWISS-Prot / P42575
  ref <309>: DATABASE ENTRY DATE: 2002-06-15
MAADRGRRILGVCGMHPHHQETLKKNRVVLAKQLLLSELLEHLLEKDIITLEMRELIQAKVGSFSQNVELLNLLPKRGPQAFDAFCEALRETKQGHLEDMLLTTLSGLQHVLPPLSCDYDLSLPFPVCESCPLYKKLRLSTDTVEHSLDNKDGPVCLQVKPCTPEFYQTHFQLAYRLQSRPRGLALVLSNVHFTGEKELEFRSGGDVDHSTLVTLFKLLGYDVHVLCDQTAQEMQEKLQNFAQLPAHRVTDSCIVALLSHGVEGAIYGVDGKLLQLQEVFQLFDNANCPSLQNKPKMFFIQACRGDETDRGVDQQDGKNHAGSPGCEESDAGKEKLPKMRLPTRSDMICGYACLKGTAAMRNTKRGSWYIEALAQVFSERACDMHVADMLVKVNALIKDREGYAPGTEFHRCKEMSEYCSTLCRHLYLFPGHPPT

SEQ ID NO: 8937 - DNA, 7628 bp, Rattus norvegicus
  ref <308>: DATABASE ACCESSION NUMBER: EMBL / U78090
  ref <309>: DATABASE ENTRY DATE: 2000-03-04
cccgctgtacttcaccaggcagtactaggccatagatcccgtgttccgggctcggcgctccgggcttcccagggctgggcccgggacgcggcctcccgccatggcgcagctggagggttattacttctcggccgccttgagctgcaccttcctggtgtcctgcctgctcttctccgccttcagccgcgctctgcgtgagccttacatggacgagatcttccacctgccgcaggcgcagcgctactgcgagggccgcttctcactgtcacagtgggatcctatgattactacattacctggcctgtacctggtgtcggtcggagtggtcaaacctgccagctggatccttggctggtctgagcatgtcgtctgctccatcggaatgctcagatttgtcaatcttctcttcagtgttggcaacttctatttgctgtatttgctcttcaggaagatacagcccagaaacaaggcttcttcaagtatccagagaatcttgtcaacattaaccctagcagtatttccaaccctctatttttttaactttctttactatacagaagccggctctgtattctttactctttttgcttatttgatgtgtctttacggcaaccataggacttcggccttgcttgggttttgtggcttcatgtttcgtcagaccaatatcatctgggctgccttctgtgcaggacacatcattgcacagaagtgcagtgaagcctggaagactgaactacagaagaagaaggaagagaggcttcccccggctaaaggaccgctctcggaactcagaagagttcttcagtttctgctgatgtactccatgtcccttaagaacctgagtatgcttttccttttgacctggccctacatgcttctgctgttggcatttttcgtttttgtggtggttaatggtgggattgtcgtgggtgatcggagtagtcatgaggcctgcctccattttcctcagttgttctacttcttctcctttactgcctttttttcctttcctcacctactttctccgaccaaagtcaagacttttcttagcttagtttggaaacgtagagttcagttctctgtgattactttagtctcggtatttttggtttggaaattcacttacgtccataagtatttactggcagacaataggcattacacgttttatgtgtggaaaagagtatttcagagacatgaaattgtcaagtatttattagttccagcctacatgtttgctggttgggctgtagctgactctttaaaatcaaagtcaattttctggaatttaatgttttttgtatgcttggttgcttctacggttcctcagaaactactagaattccgttacttcattttaccatacattatttataggctcaacatgcctctgccacccatatctagacttgtttgtgaactgggttgctatgcagttgtcaattttctaactttttacatctttctgaacaagacttttcagtggtcggatagtcatgacatccaaaggtttatgtggtagtggcagggctattttgaactctaagagcctatttctacaacagatgactgggtaaaggagtgtggatttcttttaagtaaattcagggagacgaaaagaattacatttgaggctagcctaaaagcttagataatgctaataaatttgcttgcagttgtcttgagaatcttttcagaagtttggggattttccgtgtatgtaggggactgggtgagctccgtagcaccagaacctgtcaaccaacttcctttgtaaagaacagtgaagaatgtgaaaactgtttacaaataaatgacctagtggtatttctgagcaaaattgccagatattgcagtaaatatagctctggtcttagtaacttatgaacgagattctgggatgtctatctaggaattgggtattttaactaagaatatagaagtgatgaagccatttgaactaactccttatttgaaggttttgcaggccgaaggtaagctgtgctgattatgacaccttttatagataatctttctgaaatactgctctgttagttgtccagggctcctgcacaaaactgaccataaaccttgtggcttcagagttttttctcacatacgaataagcagcacctaaactcgagtgctggcagagctcctaaactcgagtgctggcagagctcgctccttcaggagacaagagttcattgttcctgttcagctcactccttagaggggccttacttttagacaggtccctccagtctgtctgtgtctgcacaggactgtctccaccggcttcttgtgcagttaatgccattggctttagggatcctctgattcagggtaacggtacctggagaccctggattatatctatcacatttttaaagtaagttccctttcagaggtcccacatcattttggtgtgtgtgtgtgtgtgtgtgtgtgtgtgtgtgtgtgtgtgtgtgtgtgtgtgtaagtaagatgaccttgatgagagcttttaagtaaaagttagtttttaaaagagaggccaaaaaacaacaacaacaaaacccagatggccaaggtcatgtaatttacatttgtccctattatccaaacaaaccagaactcagaaggtgagaggtcattggtttagtttcattttataatttaggaagcactactaggctctggggtttgctttgtctgggttccggttctgtgctgctgtttaaagtttgtttattgattgtcaccattgttacagacactgttgcttagtcctgtgctgagagtgtaaacacggaagtgtgacttgggcttacttagcccacttcctgagctttacacacacacacacacacacacacacacacacacacactcactccccaaaggaacagaaccttttattttattggataatgttttctttgagttttaaatatgtagtaaactttatacaactttaaaaactacttggataaaagttacaagcatagccctgggtggtcagcccgcacagaccactctgatgcttcggaggtttgctcaagtgtaacagtgactggtgtgttagcacatcagaaagcttcatgacactttattatgatagaagctaagtccaggaagcaaacacttgcaattgaataaagcaagtgctgtctgatgcttagtccctggcttttgtgtctgggaacacagagggatggagtgcttcatcccagtagtctgctgtaaggagggaagcactttgtcccatgtaatggaaggaggctgctttcagatatgttgagtcccttcagaattaggagacatcgtaggggtctacagagagagagagagagagagagagagaaagagagagagagagagagagagagagagagagaaaataagtactggtattctacaccacttcccattatgtattggaagtaggacttggcatttcagactgcagtgccatggactaaaaggtgctatttagttgttactgtgatcttaaaaatggatgcatgttgatacatttgaggtaggggtttggttaatgttgcttgggcagttgacaagttaatggtcatttgctgataaatttctcagtcttttaactcagtatgtgagagaaaaaggcttcacccggcggttcacttttggttgttcaaattaacagccccatctctgaagtcatttcacttgggaaaaaaatccttgcttttgcaaatgtagattgtatttctactttaatttttaaaaagaattatcaagtagttttcattagacttaattgatttattgatcataagaggctcagtggttaaaagcttgagcccccattgcagggacccccgtgtggttccttgcccctagggcagcctctagggcactgactgcaggcttccagctctgcagcctcctgaactcatctgctgtaaacacactgcccaccgcctacttcagttaaaaactctaaatggtcagtgtagaaaatgtcagctgctgaaggggtgtggagtgcgagttctccatcactcttccagtggacattttagagcctttatgaagaggcccaggcttgcctgagctgctctaggctcagtggtcagttttagcagctctgctttctgtgacaatccacaggcatagactcacttcccagacacattagaacgagtgtgtgcactgtacctgcttatatttacacttccttggacagccttcccacggctgcgtctcaccaaaccttgtggacatagtgtgttgtactttacacatagtacataatcttgtacgaggaatttctgtgctcatggaccatctgtgtttgtcgttgtaaaacacccactgtaaacagtgtgatttacttacagggaatagcttaggatatccgtgatgtatttctggtgtgaacttacctgacttggacattgtgctcatctcctttgtctggagaggagagaagggagtcccagctttcatttataactcctagagagtagacatatattttaggtcaagttcaaactgtattcaggtaaaatcatatcttagagcagttagaaagcctttaaatgttaagacaagtgtaattttaatgtatacaatattttgcatagatgaacttaagatgtagaaaagaatgcccttgattttggttccacataaaaaagacagattgttgaaagacaggtgcttgttcctgatctcagatgagaatgttatgtttgaactcttgttagtacctggggtgagtcctaccgcatttcaacaggattcatgctgtagtacatatctgtatgctcataaacatgctgtttgatgtatatcgagtaaatttgtattgaatggagttttcaatatagaaggaagcagatattctagaaaagtatcatataaccaacttaatcttaggaagcaaatgtgttttatactaagccatcctgacccatcctctgcctgttttctgaatgttattttctatagtaatgaatttagtcatgcccgtttagtatgcgccgtgtgcaataggcttgattctaacaatgccatttaaatatgaagtcattcagtaattacagtaagtttgatgacttgtcttttacatttcaatcagttagaaacatcttctgtttggttttagctctctgatttacttttctttgggtgcattttaggtatttgaagtcaatggcaaaatgttgctgagaaatataaacaacttagttaatgatgacataattttaatatatcgaaatgattccagcactaaattccataatgtttggaagttatttctaaagtaaatttggtgataataggtatctaataatctctttttattatttaaaatgagatattgattagtggcattctccataccttagacactgttaaagcaaaagtaggtagggtatatttttctttcaaaaaagtaaatatatggaatttgcattcagaaatttgatcagttcaatttatttgagccctgtactttcactgtcttgctcaagatgaataagaatgaaaagaattacagtagttgtctttctcaatagtgttttgctggttcacacacacacacgcactcacactcacactcacacacatcataaagctgaccttttgctattttgtttcgctatcaaagctgtactggtctgacctctcatgttattgtgtgagttacaggtttttaaaatccttaggagccttttagaggaacatgtataaaatgataaacgcttaggttttattacaagatgagttgttgaacaaattgttgatgtttaattggaaaaacatagctcccataacaacaagttcttacggttatttgaaagcataatacattgctttaaatgtagatcagtggtcaacaaataggttttaactcacaaaaacaccctttcttaattatgttgtctctttaggggcatagagctcccctaaataagttttgtatttactgaaaacatttcactgggaaagcgtcagtggcttgagagagtagatatgggatagtgtcttttcaagggtctcaaaacctgccattttaaacgtgagtttattgtagttcatgttctttatattcttcggtaagtcaggttcaagaatctcttgaagtattctgcctttcatatattttgtttctgaaataaagtggatgtttagctttcgttaagctggtttttaaattgtgtcatacacccagccacaggtggtgtaaagtctcagcgcaccagtaatgcagtgtttacccacatacgtttgtgttcctttgtcaggagagaagtgtatttgggtttcccctgtagtgaggaataggaaagtactgtgtaatcaaatttgtactgaaatgtttactaggtgatgacagtgggctacattttaacgtattcttgtaatttaactttttctactagtctggattaaactttttatagttttgtattgttttgaaccacaaagatttagaattctccaccttcattaatgattatttgttgttcaggaagggtctcataatccaggctagcctggaatttacaatgtagccaagaaagaccttgaactcctgattcttttgcctctacctctggactgctgggttcccggcatgccgcaccatgcccagtgtatgcagtgctggggagcaaacacagaacttagggcagccggcaagcagtctgccagctgggctgtttcctccagccctgctgcttctactgtggccgaaaatgttccctgggttccatgaagtggaaggtaaatgtgaaaccaaaagtcatttgttccatgattaaattgtgtctcagatgacggaacctaatgcacccggccatgaaactgtttacctcacagactgggggatgtttctgatagtgataataggtttggaaacaacctgaactgtctacttctgtctcgctggttctcaggcctcttgtgttaactgtaccacatacacggagagactgaggagagggtgggtttttgtctcatattagaataagcagaatgagtatttgtctaatgttacaaagtagctgtgtgagctgcctttatgagtgggcagcctgacgagaatcgggctcttagctgcagctgagatggagtagtaggaaggacactgagtctaccttcctttttgtaacattttggaaaacaaattccatgggaaatagaactccactacttttctagatcagacagttgaggcgcatacagactgtctcttccagagcaggcagtctctcccattgtgtcatcacggcctcagcttgttgtgtgaacacaaaatctacagcacgggctgaagttgtcagcccgattaacaaggaagtaaagatctttgatatccaatagagatgtagttgcctaagaattaatttctcaaaagaactttggaaataaatggttgttttaaactgatctgtgatttttaaataatcttttctgaaagaatttgatgtttattttaaatacgtgaatatatgttttaaccgttttttaaggttttacattttgttacattcaaaacttaagatgtttgactctaaaattgtgattcatgtcatttaaactcttgaataaacctatttataagaataaaagcgttttaaatagttaaaaaaaaa

SEQ ID NO: 8938 - protein, 474 aa, Rattus norvegicus
  ref <308>: DATABASE ACCESSION NUMBER: SWISS-Prot / AAC34249
  ref <309>: DATABASE ENTRY DATE: 2003-02-01
MAQLEGYYFSAALSCTFLVSCLLFSAFSRALREPYMDEIFHLPQAQRYCEGRFSLSQWDPMITTLPGLYLVSVGVVKPASWILGWSEHVVCSIGMLRFVNLLFSVGNFYLLYLLFRKIQPRNKASSSIQRILSTLTLAVFPTLYFFNFLYYTEAGSVFFTLFAYLMCLYGNHRTSALLGFCGFMFRQTNIIWAAFCAGHIIAQKCSEAWKTELQKKKEERLPPAKGPLSELRRVLQFLLMYSMSLKNLSMLFLLTWPYMLLLLAFFVFVVVNGGIVVGDRSSHEACLHFPQLFYFFSFTAFFSFPHLLSPTKVKTFLSLVWKRRVQFSVITLVSVFLVWKFTYVHKYLLADNRHYTFYVWKRVFQRHEIVKYLLVPAYMFAGWAVADSLKSKSIFWNLMFFVCLVASTVPQKLLEFRYFILPYIIYRLNMPLPPISRLVCELGCYAVVNFLTFYIFLNKTFQWSDSHDIQRFMW

SEQ ID NO: 8939 - DNA, 2245 bp, Homo sapiens
  ref <308>: DATABASE ACCESSION NUMBER: EMBL / AK023061
  ref <309>: DATABASE ENTRY DATE: 2002-08-06
gaccctgtttctctagccgtgcagctgcaaggtcactagacagaaaaactcaagtcataaacatgttttttcttgaaagggcagtagtcagaaaagaaaggaactgatcttggacttgaagaaacagccccagaggtgaaagagatagtcgttaacctgcacagcctctttccagcctcttcacagataacaagggctttcggaacaagaaacttgtatattctgtgcagctcaaataaaattaagaagctgaacatcagttgacaaagagtaaaaaataactgggagttgacgggaaaataaactgtcgtttatgaaaatgtagcttattccagaacaccagatttcaaaagatacagaatcctgttgctccacaattcaatttgtcctacaaaaagcaaatatagtaaatagaagttgccaacactgaagagaagattaacaaatctgagcatcccaatggagcagacaacatgttcagaccatccaaagatccaaatggcaggtttgatcactccaattgacaccaggtacaagccaggtaatgtagtaatcatgggatcccactttaaaatgaaagaaaatgaagtaaaagcaagaggtaataggaacaagacaggcacaaatatgtcaagcccaagtctcatctccagcaacaatcagaaattttgagaagttattctatgacaagattaagtaagtccttggcagaacaggattcgtttttcctattttttgcccccggaccagcttagtgatggttcaggtagcagcaaccaataaacaacaacaacttaaaatctatttctattttccaagaaatgttctttaaaagcctttattttgataaataaactgcaaatgttccagtttttaaaagcatggaaacattgtttgggactcttaagtttaggaaaacatttggaccacaggctccatgatgacagctaacataaactgagacagaaattgttgccaaaccctctgtattaacgttacaatatgccctatagtaaagattattgtcattttgcagatgagtaacctgaatttctgaaactcagaacatctccaagatcacaaaactagtaaatcacagcaccaagatttaagatcagatctttctctaaaacagactttatatttctagccagtaccctatattgtgtcaccagagaagcaggggatgcttattttgatatttatatgtacatacttgcacagtcaaatatatactcaaaaatgatgtgacttgactggttgccagtttatccagttaacagttcactaaaaatacccagggaaggaatttgtgattataaattgtcactttttggtagctgaagatccctccagtccaccctatcccacccctaaaatgcacagtgaggtgcttgacaggtgagctaaaggaaagttttctggtatttccaaggagcacccgaatgcctttaatcctaaaacaaggaaagacaaagtgggatcgatatcgtcagctgccaagaggagggctcagttccccgttgagtattctcccagatcactccttcctggaggacagatctgctgtttattcattcatttaataaatatttcacagatctcagagacaggaacaaaagactatacccagtttctttcatgttctgaggcttgagggggtggaacaggacgagtgaagtctaaggatgggaggacgtggggacgctgggacctctcaggcctctcctggggtggggacaggttggggaccccacctgggaaagggagaaatggccctcacagtagcgctgcgcctgaggcaggtggaagatctcgtccatgtagggctctcgcaacgcccggctgaaggcggagaagaggaggcaggatactaaaaaggtagctcaaggcggccgagaaatagtaaccttccagctgcgccattccagctcccacagccactgcccaagaacctactcctggaaaattctgagcctggaaacccgagctggaaacttgggctcgaaatgggcgcgctaggcgggactagccagacggggccacataccggaaggcaaaggatgctgggagagcgcggatccggaaagatcgggtcgctgtttcccggagtgacgggtttagataacggaccggatgattaccctctcaatcgcattgcccggggcgcacaaagtgtcaaaacttccggaaggggcgggtctcggatttcgccagcgcgggaggtgcgtggcttgctgcttag

SEQ ID NO: 8940 - DNA, 2399 bp, Rattus norvegicus
  ref <308>: DATABASE ACCESSION NUMBER: EMBL / U78517
  ref <309>: DATABASE ENTRY DATE: 2000-03-04
cgggtcatccgcctggttctgcaatgggcagccatgtatggtgatcttctccaagaagacgacgtggccatggctttcctggaggagttctatgtgtctgtatcagatgatgcacggatgatggtcgccttcaaggagcagctggctgagctggagaagactgtcaaacagatctcagaagacgcaaaagctccacagaagaagcacaaggtgcttttgcagcagtttaatacaggtgacgagagggcccagaagcgtcagccgattcgtggctctgatgaagttttgttcaaggtctactgcattgaccacaccgataccaccatccgagtgcctgtagccgcctcggtgaaagaagtcatcagtgcagtagcagacaaacttggctctggggaaggcctgatcattgtcaagatgaactctggaggagaaaaggtggtgctcaaacctaatgatgtttcagtatttacgacgctcaccattaatggacgcctgtttgcctgcccgcgagagcaattcgactcactgactcccttgccagaacaggagggcccgaccactgggacagtggggacgtttgaactgatgagctcgaaagacttggcgtaccagatgacaacgtatgactgggaactcttcaactgtgtgctcgagctggagctaatctaccacacatttggaaggcataattttaaaaagaccacagcaaacttggatttgttcctgaggagatttaatgaaattcagttttgggttgtcactgagatctgcctttgttcccagctcagcaagcgtgttcagcttttgaaaaaatgtatcaagatagcggctcactgcaaggagtacaaaaacttgaattccttcttcggcatcgtcatggggctcagtaacgtggctgagagccgcctggcattaacatgggagaaactgccgagcaagtttaagaagttctatgcggagtttgagagcttaatggatccttccagaaatcacaaggcgtacaggctgacagcagctaaactggagccccccctcatccctttcatgcccttgcttattaaagatatgacatttactcatgaggggaacaagacattcattgacaatctagtaaactttgaaaaaatgcgcatgattgcaaatactgccagaacggtgcgctactacaggagccagccattcaatccggatgctgctcaagctaataagaaccatcaggatgtccggagttatgtacggcaattaaatgtgattgacaaccagagaactttatcacagatgtcacacagattagagcctcgcaggccatagacatctgcagtgcccagagtgatgctccgtctccagtccacaatctttcaaaagatgctgtgtatgctactactgactgtgttgctactagagaattccccagaatgagcaagagacacctcctgagagcccctcggggccacatcctgctttccgaccacacaggagaaggatctgtcttgtctaacgcggacatgccgtagcttaggaaccatcagctgtagtcatcttcttcacggttggcacaccaccgcaggctcacgtgaaggcataacctggcgaggctacaccaggcccctgacatcccttcccaggctgttgcagcatgagactgtcccgtggataggtttgacttggaatcgctgcaatgatataattgaatgatttgtttacttagcaccttatttggggtctgggttctggggagggtgttgaccataaaagtccaaattatccatcatgttcctccatcgtcataatcttacctctgaaggaatggaacctcatcacaacactatgaaacattatgactgttcagtctgtaatttcggaatgatctatagaataatatgtttacattgtaacttttaaaaacttacaaatcaggattacacacatgagaattccactaagaaacaccaaggttcttaatatcgccagcgttaagatagaaagtaacatttcagaagagcacaatatacacaaaacattttttcaaattgaaatattttcctgggcattaaaaaacctttccactacaaatttattgttactgatgaaaaaaaaagcatattttctggacttaaatgttattacaaaaatcttaattttcagcaattgttttgcactttcagatagattgtaaataggttatgcagtcaatggtatagaattatttatttgctacataatagacattgtgccaaataattcctttttatttattttattcagtatgaaattttggagtacattttttctgttttcttaattagactacatttaatgtataggaattgtatgtacatatctcttctgtaaataacagccagtatcttcattaaatatacttgacaagaaaaaaaaaa

SEQ ID NO: 8941 - protein, 436 aa, Rattus norvegicus
  ref <308>: DATABASE ACCESSION NUMBER: SWISS-Prot / AAD03423
  ref <309>: DATABASE ENTRY DATE: 2001-06-01
RVIRLVLQWAAMYGDLLQEDDVAMAFLEEFYVSVSDDARMMVAFKEQLAELEKTVKQISEDAKAPQKKHKVLLQQFNTGDERAQKRQPIRGSDEVLFKVYCIDHTDTTIRVPVAASVKEVISAVADKLGSGEGLIIVKMNSGGEKVVLKPNDVSVFTTLTINGRLFACPREQFDSLTPLPEQEGPTTGTVGTFELMSSKDLAYQMTTYDWELFNCVLELELIYHTFGRHNFKKTTANLDLFLRRFNEIQFWVVTEICLCSQLSKRVQLLKKCIKIAAHCKEYKNLNSFFGIVMGLSNVAESRLALTWEKLPSKFKKFYAEFESLMDPSRNHKAYRLTAAKLEPPLIPFMPLLIKDMTFTHEGNKTFIDNLVNFEKMRMIANTARTVRYYRSQPFNPDAAQANKNHQDVRSYVRQLNVIDNQRTLSQMSHRLEPRRP

SEQ ID NO: 8942 - DNA, 4261 bp, Homo sapiens
cgggaggagcggggtccgcgcggcggacgaggcgggggcggaggcgcaggcagagcgagcgcgggaggtcgccgcagccagggacaccgcgcgccgccgctcaacatggtcgctgcgcacgctgcccattcttcctcctctgccgagtggatcgcctgcctggataaaagaccactggagcgatccagcgaagatgtggatataatcttcactcgactgaaagaagttaaagcttttgagaaatttcacccaaatctccttcatcagatttgcttatgtggttattatgagaatctggaaaagggaataacattatttcgccagggtgatattggaacaaactggtatgctgtcctggcagggtctttggatgttaaagtatctgagaccagcagtcaccaggatgctgtgaccatctgtaccctgggaattgggacggcctttggagagtccattctggacaacacaccccgccatgcaaccatcgttaccagggagagcagtgaactgctccgcatcgagcagaaggacttcaaggcactatgggagaaatatcgacagtatatggcaggacttctggctcctccttatggtgttatggaaacgggctctaacaatgacaggattcctgacaaggagaacacacctctcattgaacctcacgttcctcttcgtcctgctaacaccattaccaaggtcccttcagagaagatcctcagagctggaaaaattttacgaaatgccattctctctcgagcacctcacatgataagagatagaaaataccacctaaagacatacagacaatgctgtgtgggaactgaactggtggactggatgatgcagcagacaccatgtgttcactcccggactcaagctgttggcatgtggcaagtcctgttagaagatggtgttctcaaccacgtggaccaggagcaccatttccaagacaaatatttattctatcgatttctggatgatgagcacgaggatgcccctttgcctactgaggaggagaagaaggagtgtgatgaggagctccaggacaccatgctgctgctgtcacagatgggccccgacgcccacatgaggatgatccttcgcaaaccacctggccagaggactgtggatgacctagagattatctatgaggagcttcttcatattaaagccttatcccatctttctaccacagtgaaacgagagttagcaggtgttctcatttttgagtctcacgccaaaggagggactgtgttgtttaaccagggggaagaaggtacctcctggtacattattctaaaaggatcagtgaatgtagtcatttacggcaagggtgtggtctgcaccctgcatgaaggagatgacttcggcaagttagcactagtgaatgatgccccacgagctgcctctatcgtcttacgagaagataactgccatttcttaagagtagacaaggaggatttcaaccggatcctaagggacgtggaggcgaatacagtcagacttaaagaacatgaccaagatgtcttggtgctggagaaggtcccagcagggaacagagcttctaatcaaggaaactcacagcctcagcaaaagtatactgtgatgtcaggaacacctgaaaaaattttagagcattttctagaaacaatacgccttgaggcaactttaaatgaagcaacagattctgttttaaatgactttattatgatgcactgtgtttttatgccaaatacccagctttgcccggcactggtggcccactaccacgcacagccttcacaaggtacagaacaggagaaaatggattatgccctcaacaataagaggcgagtcatccgcctggttctacagtgggctgccatgtatggagacctcctgcaagaggatgacgtgtctatggccttcctggaggagttttatgtatctgtatcagatgatgcccggatgattgctgccctcaaggagcaactgccagagttggagaagattgtcaagcaaatctcagaagatgcaaaggcaccacaaaagaagcacaaggttcttttgcaacagttcaatacgggcgatgagagagcccagaagcgccagcctatccgcggctctgatgaagttctgtttaaggtctattgcatggaccacacctacacaaccattcgggtgccagtggccacttcggtgaaggaagtcatcagtgcagttgccgacaagctgggctccggggagggcctgatcatagtcaagatgagttccggaggagaaaaggtggtgctcaaacctaatgatgtttcagtatttacgacgctcaccattaatggacgcctgtttgcttgcccgcgagagcaattcgattcactgactcccttaccagaacaggaaggcccaactgttggaacagtgggaacttttgaactgatgagctccaaagatttagcataccagatgacaatttatgattgggaactcttcaactgcgtgcatgagctggagctaatctatcacacatttggaaggcataattttaaaaagaccacagcaaacttggatttgttcctgaggagatttaatgaaattcagttttgggtcgtcactgagatctgcctttgttctcagctcagcaagcgtgttcagctattaaaaaaatttattaagatagcagcccactgtaaggagtataaaaatctgaattccttttttgccatcgtcatgggactaagtaacgttgctgtgagccgcttggcactaacgtgggagaaactgccaagcaagttcaagaagttctatgcggagtttgaaagtttaatggacccttcaaggaaccacagggcctacaggctgacagtagctaagctggaacctcctctcatccccttcatgcctttgctcattaaagatatgacatttactcatgaggggaacaagacgttcattgacaatctagtaaactttgaaaaaatgcgcatgattgcaaatacggccagaacagtgagatactacaggagccaacccttcaatcctgatgcagctcaagctaataagaaccatcaggatgtccggagttatgtacggcaattaaatgtgattgacaaccagagaactttatcacagatgtcacacagattagagcctcgtcgaccatagacatttcaaatgcccaaagcaacagtttgtctccagtccacaatctttcaaaaatgccatttatgctactactgactgtattgccactagagaattctacaaaacaagcaaaaacacatcctgagacacctcagggctgcattcagcttaccagctacctagcaagagaaggaattatttgacatgcctaaagcttacacactctagcttaggaatccccagtttgtggctaccctgtttcatttccacttgtgccatcttctttgctgaagtgttgaataaggcccacgtgaagagtttggtagaaatagccttgtcaagagaactagcaagcccctgacatttttttctaagagtgtttatgggatgagatgtgctacaaatgggatagatttggataaaattttaactcaacatcttgatttggagcctggggtttcgggaaggtgttgaggaatctatagaagtccaaattataggttgtattcttccatcttcattgtcttacctctgaaggaatagaacctgaccacattattatgaaacattatggctgtttatgtaatttagggaggactggtctgtaatttctgaatgtatatagaataatatttatgtttacaatgtaacttttcaaaatttacaaatcaggattatatacataagaattccactaagaaatgccaagattcttaaatttgccagcgttaaagtagaaaataacatttcagaagagcacaatatgcataaaacatttttcaaaattgaaatattttcctgggcattaaaaacctttactattggctacaaatttattgtacctgatgaaaacatattttctggacttaaatgttattacaaatatcttaattttcagtaattgttttgcactttcaaagattgtaaatagttcattcaatcaatggtatggagttatttatttgctacataatagatactgtgccaaataattactttttatttattttatttagtacgtaattttgaagtacattttttcctgttttcacaattagactacatttaatgtgtaggaattgtatgtatgtatatcttctgtaaataacatctagtatcttcactaaatataattgtcgac

SEQ ID NO: 8943 - protein, 1011 aa, Homo sapiens
MVAAHAAHSSSSAEWIACLDKRPLERSSEDVDIIFTRLKEVKAFEKFHPNLLHQICLCGYYENLEKGITLFRQGDIGTNWYAVLAGSLDVKVSETSSHQDAVTICTLGIGTAFGESILDNTPRHATIVTRESSELLRIEQKDFKALWEKYRQYMAGLLAPPYGVMETGSNNDRIPDKENTPLIEPHVPLRPANTITKVPSEKILRAGKILRNAILSRAPHMIRDRKYHLKTYRQCCVGTELVDWMMQQTPCVHSRTQAVGMWQVLLEDGVLNHVDQEHHFQDKYLFYRFLDDEHEDAPLPTEEEKKECDEELQDTMLLLSQMGPDAHMRMILRKPPGQRTVDDLEIIYEELLHIKALSHLSTTVKRELAGVLIFESHAKGGTVLFNQGEEGTSWYIILKGSVNVVIYGKGVVCTLHEGDDFGKLALVNDAPRAASIVLREDNCHFLRVDKEDFNRILRDVEANTVRLKEHDQDVLVLEKVPAGNRASNQGNSQPQQKYTVMSGTPEKILEHFLETIRLEATLNEATDSVLNDFIMMHCVFMPNTQLCPALVAHYHAQPSQGTEQEKMDYALNNKRRVIRLVLQWAAMYGDLLQEDDVSMAFLEEFYVSVSDDARMIAALKEQLPELEKIVKQISEDAKAPQKKHKVLLQQFNTGDERAQKRQPIRGSDEVLFKVYCMDHTYTTIRVPVATSVKEVISAVADKLGSGEGLIIVKMSSGGEKVVLKPNDVSVFTTLTINGRLFACPREQFDSLTPLPEQEGPTVGTVGTFELMSSKDLAYQMTIYDWELFNCVHELELIYHTFGRHNFKKTTANLDLFLRRFNEIQFWVVTEICLCSQLSKRVQLLKKFIKIAAHCKEYKNLNSFFAIVMGLSNVAVSRLALTWEKLPSKFKKFYAEFESLMDPSRNHRAYRLTVAKLEPPLIPFMPLLIKDMTFTHEGNKTFIDNLVNFEKMRMIANTARTVRYYRSQPFNPDAAQANKNHQDVRSYVRQLNVIDNQRTLSQMSHRLEPRRP

SEQ ID NO: 8944 - DNA, 2399 bp, Rattus norvegicus; identical to SEQ ID NO: 8940
  ref <308>: DATABASE ACCESSION NUMBER: EMBL / U78517
  ref <309>: DATABASE ENTRY DATE: 2000-03-04

SEQ ID NO: 8945 - protein, 436 aa, Rattus norvegicus; identical to SEQ ID NO: 8941
  ref <308>: DATABASE ACCESSION NUMBER: SWISS-Prot / AAD03423
  ref <309>: DATABASE ENTRY DATE: 2001-06-01

SEQ ID NO: 8946 - DNA, 4261 bp, Homo sapiens; identical to SEQ ID NO: 8942

SEQ ID NO: 8947 - protein, 1011 aa, Homo sapiens; identical to SEQ ID NO: 8943

SEQ ID NO: 8948 - DNA, 936 bp, Rattus norvegicus
  ref <308>: DATABASE ACCESSION NUMBER: EMBL / U78977
  ref <309>: DATABASE ENTRY DATE: 2001-03-26
caggaacgcaccggaaagctcacctgtgcagtaggggacggaggcaatgacgtcagcatgatccaggaatcagactgcggcgtgggcgtggagggcaaggaaggaaagcaggcttcgctggccgcggacttctccatcacccagttcaagcatctcggccggctactcatggtgcacggccggaacagctacaagcgctcggcggctctcagccagttcgtcatccacaggagcctctgcatcagtaccatgcaggccgtcttctcttccgtgttctactttgcatccgttcctctctaccaaggcttcctgatcatcgggtattctaccatctacaccatgtttcccgtgttttccctggtcttggacaaagacgtgaagtcagaagttgccatgttgtatcctgagctctacaaggacctcctcaaggggcggccactgtcctacaagacgttcttaatttgggtgttaatcagcatctatcaagggagcaccatcatgtacggggcgctgctgctgttcgagtccgaatttgtacacatcgtggctatctctttcacgtcactcatcctcaccgagctactgatggtggcgctcactatccagacgtggcactggctcatgacagtggccgagctgctcagcctggcctgctacatcgcctccctggtgttcctccacgagttcatcgatgtctacttcattgctaccctgtcgttcctctggaaggtgtccgtcatcaccctggtcagctgtctccccctctacgtcctcaagtacctgcggagacggttctccccccccagctactccaagctcacttcataagctgcaaggcggcagcagggcctccggtctctgcgctctccctggaggaggtcaagttcaggcgcatgaccacctcaggtggatggcgcagtcacagctggcacatga

SEQ ID NO: 8949 - protein, 275 aa, Rattus norvegicus
  ref <308>: DATABASE ACCESSION NUMBER: SWISS-Prot / AAC05244
  ref <309>: DATABASE ENTRY DATE: 2003-02-01
QERTGKLTCAVGDGGNDVSMIQESDCGVGVEGKEGKQASLAADFSITQFKHLGRLLMVHGRNSYKRSAALSQFVIHRSLCISTMQAVFSSVFYFASVPLYQGFLIIGYSTIYTMFPVFSLVLDKDVKSEVAMLYPELYKDLLKGRPLSYKTFLIWVLISIYQGSTIMYGALLLFESEFVHIVAISFTSLILTELLMVALTIQTWHWLMTVAELLSLACYIASLVFLHEFIDVYFIATLSFLWKVSVITLVSCLPLYVLKYLRRRFSPPSYSKLTS

SEQ ID NO: 8950 - DNA, 7176 bp, Homo sapiens
  ref <308>: DATABASE ACCESSION NUMBER: EMBL / AB014511
  ref <309>: DATABASE ENTRY DATE: 1998-07-15
gcggatggacagcaggccccgcgccgggtgctgcgagtggctgagatgctgcggtggaggggaggccaggccccgcactgtctggctggggcaccccgagaagagagaccagaggtatcctcggaatgtcatcaacaatcagaagtacaatttcttcacctttcttcctggggtgctgttcaaccagttcaaatactttttcaacctctatttcttacttcttgcctgctctcagtttgttcccgaaatgagacttggtgcactctatacctactgggttcccctgggcttcgtgctggccgtcactgtcatccgtgaggcggtggaggagatccgatgctacgtgcgggacaaggaagtcaactcccaggtctacagccggctcacagcacgaggtactgttgtgggtgttgttctttacactggcagagaactccggagtgtcatgaatacctcaaatccccgaagtaagatcggcctgttcgacttggaagtgaactgcctcaccaagatcctctttggtgccctggtggtggtctcgctggtcatggttgcccttcagcactttgcaggccgttggtacctgcagatcatccgcttcctcctcttgttttccaacatcatccccattagtttgcgcgtgaacctggacatgggcaagatcgtgtacagctgggtgattcgaagggactcaaaaatccccgggaccgtggttcgctccagcacgattcctgagcagctgggcaggatttcgtacttactcacagacaagacaggcactcttacccagaacgagatgattttcaaacggctccatctcggaacagtagcctacggcctcgactcaatggacgaagtacaaagccacattttcagcatttacacccagcaatcccaggacccaccggctcagaagggcccaacgctcaccactaaggtccggcggaccatgagcagccgcgtgcacgaagccgtgaaggccatcgcgctctgccacaacgtgactcccgtgtatgagtccaacggtgtgactgatcaggctgaggccgagaagcagtacgaagactcctgccgcgtataccaggcatccagccccgatgaggtggccctggtacagtggacggaaagtgtgggcttaaccctggtgggccgagaccagtcttccatgcagctgaggacccctggcgaccagatcctgaacttcaccatcctacagatcttccctttcacctatgaaagcaaacgtatgggcatcatcgtgcgggatgaatcaactggagaaattacgttttacatgaagggagcagatgtggtcatggctggcattgtgcagtacaatgactggttggaggaagagtgtggcaacatggcccgagaagggctgcgggtgctcgtggtggcaaagaagtctcttgcagaggagcagtatcaggactttgaagcccgctacgtccaggccaagctgagtgtgcacgaccgctccctcaaagtggccacggtgatcgagagcctggagatggagatggaactgctgtgcctgacgggcgtggaggaccagctgcaggcagatgtgcggcccacgctggagaccctgaggaatgctggcatcaaggtttggatgctgacaggggacaagctggagacagctacgtgcacagcgaagaatgcacatctggtgaccagaaaccaagacatccacgtttttcggctggtgaccaaccgcggggaggctcacctcgagctgaacgccttccgcaggaagcatgattgtgccctggtcatctcgggagactccctggaggtttgcctcaagtactatgagtacgagttcatggagctggcctgccagtgcccggccgtagtctgctgccgatgtgcccccacccagaaggcccagatcgtgcgcctgcttcaggagcgcacgggcaagctcacctgtgcagtaggggacggaggcaatgacgtcagcatgattcaggaatctgactgcggcgtgggagtggaaggaaaggaaggaaaacaggcttcgttggctgcagacttctccatcactcaatttaagcatcttggccggttgcttatggtgcatggccggaacagctacaagcggtcagccgccctcagccagttcgtgattcacaggagcctctgtatcagcaccatgcaggctgtcttttcctccgtgttttactttgcctccgtccctctctatcaaggattcctcatcattgggtactccacaatttacaccatgtttcctgtgttttctctggtcctggacaaagatgtcaaatcggaagttgccatgctgtatcctgagctctacaaggatcttctcaagggacggccgttgtcctacaagacattcttaatatgggttttgattagcatctatcaagggagcaccatcatgtacggggcgctgctgctgtttgagtcggagttcgtgcacatcgtggccatctccttcacctcgctgatcctcaccgagctgctcatggtggcgctgaccatccagacctggcactggctcatgacagtggcggagctgctcagcctggcctgctacatcgcctccctggtgttcttacacgagttcatcgatgtgtacttcatcgccaccttgtcattcttgtggaaagtctccgtcatcactctggtcagctgcctccccctctatgtcctcaagtacctgcgaagacggttctctccccccagctactcaaagctcacatcataggccgtgcgttcgctggagggggccctggtcttggcgcttccctgatggacagagctcaagttccatttatattaaccgccacctgtggattttgcagtaattgctaacacatgcagttttaatgggaagcggctctgcgcctaaacggagtcctaacgctgcatcaacgggagggagggtcctgaaagagacccatctgggcctgtctgaacccctcgttcttcatgtttaggtgaatatgaatatgttaaagctggtggctcagctgggagatttatatgggtcactgtgcgagcttccttatgacttgaattttgttgtcacatgataaaagtttctgtgtagctgaaggttgtagaaggcttgtgtgtgtgtgtgtgtgtgtgtgtgtgtgtgtgtgtgtgtttttaaagagtcctaatgtgtatgtactctttatgtctttcttgctcttacaaagaggtgtcagaaaaatagaaagctcttggtgtcggtttgggaggaaaagacagtgacatttggtaaaaagttatccacacaataatctccattcggaaatgctcagtatcgtctccagccagccctgcttatccaggttacactggattcctgggatcgtaaccagtaaatgagaggagagggagagagagtgtcctaagtccaatctgttatccttgatctgattcagcatccatagtgtgtgagttaacttcacctgccacctcgtaaaagaatttcagaggtgtgatcccgctttattgggacctggtaacaatcacaaagccagtggctgtttgagaaggacctcagacattttcagcagagttgttttagcaggaaacgtgccactgaatggcccctaaatgtgtcgacagtgtgataagagactcaactaattctttaggcaacatggcagatgtgactcagatcctccaagaccaaagcggaaaggtcagggggctgggactcttctcttccatagaagcctgtttcctgttaggaggcataatggaagatgaccccacaaaggcagaggcatctttcggaacaacactggtggcagctttcagaacaaggaacccctggtgggaggacgcccaagctacagcgttgggatctgggatctgttccactgccggcagatttcaaggggaacttgctgaaaggcagccagtggtgaagatttctcccctcccaggatggactacatgccggcatgtttcttataaagctgtggctgcttgtttcagaggaagggagtttgcagtcgcgggacgtggtagagcaaggcattcttgggttttcaagttgcttcttgcagaagccacatatgcatgccataagggttaagttggtggatctttaagagccaagtgtggttgagatcttggatttgcgtttacttcttgatgaatacatatccttcaaaccctctgcctggcgctacttctgtgtgcttcagagaggtacatcacagcctggtttctgatgcctactaactcctgctcttggagagctggagacacgaggatcagatagtcccttgcctttggagcactcttgataagcttttgtattttgtgttgtccttttaaaatgttctagaatgactttacgttgcaggtactggttaattggctgttgacaccacatctattttgtcttatgattctgcagttttgcagtacttttctctatctgattcagccatttctgccagagggaaaaggtcggcagaaaagatgtattgagtgaatagttaaggataggatctttgtccaaaaatttcagaaagattgagcaaatctgacgtattcattgagtgagtttctgtgttttcaaaggtggaggagaaatttgtgctggaagtttttaagcctccgttttcttggaaatcagtctgtaacactggcaagtcttaagatagtcccgtttagactttgcagatgctgaacctggctctgtaacgctgggaagtcttaagatagtcctgtttagactttgcaaaccctgtacctggctttgctcggagattcgggatgctggctcctgcaggcagggcgtgtgggagcctcgtcagaaagttttagaggtttccagcagaagcagaatgaagatggtctccctggccttttccttaattctcaattttgattgaggtgcacaagttgacttttaaagccaacgcttaagatactgattgacatcttcaagggagaatgctcccaggaggggctgaagaagccatagttggaagtggaaggtactcgtcagtgttctccacaaacctttttactctgttgtctcagccgcactggggcggaggcggtcaagggtgagaagtaccgacactcaagtgcaaactgccacgtcgttggcccatcccatcagtgggcagctggctgacgccattcactggacggtccctgaacacctaggaatgcacacaccgtgcttctcagacactggagacgcaaaggcaggaggatgcagtccggtgagaggacacgatctttacctgcacaatcagactgtaagcccagcagagaaccccaggggcgcctgggtacttctcggaggtcatcttagttgtggtggggaagacaaagaaataagcaaacaagaaactagagttactatacaagaaactctcctgagtttgtaaaccttaagcataaggattcagttgacctttttcttggttcatcaatctggaaagaacttacataaagcgccattgacactgtcacctgggagctccatgggccgtaagtctttgacagccaatttaatttgaggtcagagggccttgaggtacacagtcagcactgtttgaacacttttcctgaaagcaaaactcacagctccctgcgccctctgacaacactagctatttctgccagagtaagaacttctattactattttattattgttcatatgtcttttgatgatggttgtgtgacagggggaagcaggatctatttggtttcttccccctccccccaccccttcctttttgtctctctttttttttctctaagaaaatcaccagactagtttttccatcttgagtaatttcttatgtgggacagttttgatcctcattttgaaagcatgcgtgcgcacatgtgtgttgcctgtggtgccaggtgagacaggtggcactaactccagctgcttggaaggcatcccaagggcgcatcttaaagttggagcagacctcccttttccagcccctggggccattagaccacgtgctggaactagcattgtaaaattcccatcccagttccactcccctgaagtgaaacccttttttttttgtgacagtaaatcttaaaaatcattgtctctttatgaacatttcctcagtttcttctctgctgaaaatgtaagccatgctactttttaatgtattttgaattttgtgctcattggaaattgatatgctaatgcctcccccaccccccgccagacttttctttttatactttgtcttgtttttactggggtaggctgggcatgcgtgcgtgcctttagggcagcattttaaacctttgccaaaattgcaaatgggacatgtacattcttctgctccatcctacttaaacacctatcagctatttttatctttaaccttttctgtatgtttgaagtgtgtggggggtgtgtgtgtgtgtgaaagagcgagagaatgatgtcatctaaagttttttgaagaattatttggttttcattgcattaaaattctatcactcccagctttgttttcatttaaaaaaatatacaaagagctttgtaaatacaacacattttatttctcccccttcttttaatgtacagcttttttgccacttatatatacttaaaatattcccatgaattatgtccagttcttcttggaaaaaaatttggttttgaatgaacctgcaaagcatcctgcagcgtgagcagctcctccacctggagctccgaagcatcttctcaggccaaagcggcattacccgtgaatctgtcttctccgccacagcatggtttgaggcgcagtctgttaatatagctgggccatgtcagtgactgttgtgtttgtggggtcaggtggggggcatggtatttgcaaaaaaaacaaattatggctaatttattattttgttgcagtggggttaactgtaaactcatgtaagagtctgtgatttcctcattggttgatctctctctctgtaatcctcattgcaaattttcaccaggacagcgttttttgattagaggggagctctggcacagtatgctttaatttagcaggaacttccagatgatttaaattctcgatgctgtgatgacacacatatgatctttcgtgtttctgagcgactctactttcattgtttgccagcgtggctcgttgctgttgcccaataaagcttgtgtacgttc

SEQ ID NO: 8951 - protein, 1047 aa, Homo sapiens
  ref <308>: DATABASE ACCESSION NUMBER: SWISS-Prot / O75110
  ref <309>: DATABASE ENTRY DATE: 2002-06-15
MTDNIPLQPVRQKKRMDSRPRAGCCEWLRCCGGGEARPRTVWLGHPEKRDQRYPRNVINNQKYNFFTFLPGVLFNQFKYFFNLYFLLLACSQFVPEMRLGALYTYWVPLGFVLAVTVIREAVEEIRCYVRDKEVNSQVYSRLTARGTVKVKSSNIQVGDLIIVEKNQRVPADMIFLRTSEKNGSCFLRTDQLDGETDWKLRLPVACTQRLPTAADLLQIRSYVYAEEPNIDIHNFVGTFTREDSDPPISESLSIENTLWAGTVVASGTVVGVVLYTGRELRSVMNTSNPRSKIGLFDLEVNCLTKILFGALVVVSLVMVALQHFAGRWYLQIIRFLLLFSNIIPISLRVNLDMGKIVYSWVIRRDSKIPGTVVRSSTIPEQLGRISYLLTDKTGTLTQNEMIFKRLHLGTVAYGLDSMDEVQSHIFSIYTQQSQDPPAQKGPTLTTKVRRTMSSRVHEAVKAIALCHNVTPVYESNGVTDQAEAEKQYEDSCRVYQASSPDEVALVQWTESVGLTLVGRDQSSMQLRTPGDQILNFTILQIFPFTYESKRMGIIVRDESTGEITFYMKGADVVMAGIVQYNDWLEEECGNMAREGLRVLVVAKKSLAEEQYQDFEARYVQAKLSVHDRSLKVATVIESLEMEMELLCLTGVEDQLQADVRPTLETLRNAGIKVWMLTGDKLETATCTAKNAHLVTRNQDIHVFRLVTNRGEAHLELNAFRRKHDCALVISGDSLEVCLKYYEYEFMELACQCPAVVCCRCAPTQKAQIVRLLQERTGKLTCAVGDGGNDVSMIQESDCGVGVEGKEGKQASLAADFSITQFKHLGRLLMVHGRNSYKRSAALSQFVIHRSLCISTMQAVFSSVFYFASVPLYQGFLIIGYSTIYTMFPVFSLVLDKDVKSEVAMLYPELYKDLLKGRPLSYKTFLIWVLISIYQGSTIMYGALLLFESEFVHIVAISFTSLILTELLMVALTIQTWHWLMTVAELLSLACYIASLVFLHEFIDVYFIATLSFLWKVSVITLVSCLPLYVLKYLRRRFSPPSYSKLTS

SEQ ID NO: 8952 - DNA, 936 bp, Rattus norvegicus; identical to SEQ ID NO: 8948
  ref <308>: DATABASE ACCESSION NUMBER: EMBL / U78977
  ref <309>: DATABASE ENTRY DATE: 2001-03-26

SEQ ID NO: 8953 - protein, 275 aa, Rattus norvegicus; identical to SEQ ID NO: 8949
  ref <308>: DATABASE ACCESSION NUMBER: SWISS-Prot / AAC05244
  ref <309>: DATABASE ENTRY DATE: 2003-02-01

SEQ ID NO: 8954 - DNA, 7176 bp, Homo sapiens; identical to SEQ ID NO: 8950
  ref <308>: DATABASE ACCESSION NUMBER: EMBL / AB014511
  ref <309>: DATABASE ENTRY DATE: 1998-07-15

SEQ ID NO: 8955 - protein, 1047 aa, Homo sapiens; identical to SEQ ID NO: 8951
  ref <308>: DATABASE ACCESSION NUMBER: SWISS-Prot / O75110
  ref <309>: DATABASE ENTRY DATE: 2002-06-15

SEQ ID NO: 8956 - DNA, 2127 bp, Rattus norvegicus
  ref <308>: DATABASE ACCESSION NUMBER: EMBL / U79417
  ref <309>: DATABASE ENTRY DATE: 2000-03-04
atggccacgacggccgagctcttcgaggagccttttgtggccgatgaatacattgaacgtctcgtgtggagaaccccgggaggtggttctaggggtggacctgaagcttttgatcctaaaaggttattagaagaatttgtgaatcatattcaagaactacagataatggatgaaaggattcaaaggaaagtagagaagttagaacagcagtgtcagaaggaggcaaaggagtttgctaagaaggtacaagagctgcagaaaagcaaccaggttgctttccaacatttccaagaactagatgaacacattagctatgtagctaccaaagtgtgtcaccttggagaccagttggaaggggtaaacacacctagacagcgtgcagtggaggcgcagaaattgatgaaatactttaatgagtttctagatggagaattgaaatctgatgtttttacaaatcctgaaaagatcaaggaagcagcagacgtcattcagaaactgcatctgatcgcccaggagttacctttcgataggttttcagaagtaaaatccaaaattgcaagtaaataccacgacttagaatgccagctgattcaggagtttaccagtgcacaacgaagaggtgaggtctcccggatgagggaggtggcagctgtcctgcttcattttaagggttattcccactgtattgatgtttatataaagcagtgccaggagggtgcttacttgagaaatgatatattcgaagacgcagcaattctctgtcagcgagtgaacaagcaagttggagatatctttagtaatccagaagcagtactggctaagcttattcagaatgtgtttgaagtcaaactacagagttttgtgaaagatcagttagaagaatgtaggaaatcggatgctgagcagtatcttaaaagtctgtatgatctgtacacaagaaccaccagtctttccagcaaattgatggagtttaacttaggtactgataaacagactttcttgtctaagcttatcaaatccattttcgtttcctatctggagaactatattgaagtggagattggatatttgaaaagcagaagtgctatgatcctacagcgctattatgattcaaaaaaccaccaaaagagatccattggcacaggaggtattcaagatttgaaagaaaggattagacaacgtaccaacttaccactggggccaagtattgacacacatggggagactttcctatctcaagaagtggtagttaatcttttacaagaaaccaaacaagcctttgaaagatgtcataggctttctgatccttctgatttaccaaggaatgcctttagaatttttaccattcttgtggaatttttatgtattgagcatattgattatgctttagaaacggggcttgctggaattccatcatcagattctaggaacgcaaatctctattttttggatgttgtacaacaggccaatactatttttcatctttttgacaaacagtttaatgatcacctaatgccactaataagctcttctcctaagttgtctgaatgcctccagaagaagaaggagataattgagcagatggagatgaagttggacactggcatcgataggacgttaaattgtatgattggacagatgaagcacatcttggctgcagaacaaaagaaaacagattttaagccagaagatgaaaacaatgttttgattcagtatactaatgcatgtgtaaaggtttgtgcttatgtaagaaaacaagttgagaagattaagaattccatggatgggaagaatgtggacacggttctgatggagctcggagtacgtttccaccggcttacttatgagcatcttcaacaatattcctacagttgtatgggcggcatgcttgcaatttgcgacgttgctgaatatagaaaatgtgccaaagacttcaagattccaatggtattacatctttttgatactctgcatgcactttgcaatctcctagtcgttgctccagataatttaaagcaagtctgctcaggagaacaactggccaatctggacaagaacatactccactccttcgtccagcttcgagctgactatagatccgcccgcctggctcggcacttcagctga

SEQ ID NO: 8957 - protein, 708 aa, Rattus norvegicus
  ref <308>: DATABASE ACCESSION NUMBER: SWISS-Prot / AAC53096
  ref <309>: DATABASE ENTRY DATE: 2002-06-15
MATTAELFEEPFVADEYIERLVWRTPGGGSRGGPEAFDPKRLLEEFVNHIQELQIMDERIQRKVEKLEQQCQKEAKEFAKKVQELQKSNQVAFQHFQELDEHISYVATKVCHLGDQLEGVNTPRQRAVEAQKLMKYFNEFLDGELKSDVFTNPEKIKEAADVIQKLHLIAQELPFDRFSEVKSKIASKYHDLECQLIQEFTSAQRRGEVSRMREVAAVLLHFKGYSHCIDVYIKQCQEGAYLRNDIFEDAAILCQRVNKQVGDIFSNPEAVLAKLIQNVFEVKLQSFVKDQLEECRKSDAEQYLKSLYDLYTRTTSLSSKLMEFNLGTDKQTFLSKLIKSIFVSYLENYIEVEIGYLKSRSAMILQRYYDSKNHQKRSIGTGGIQDLKERIRQRTNLPLGPSIDTHGETFLSQEVVVNLLQETKQAFERCHRLSDPSDLPRNAFRIFTILVEFLCIEHIDYALETGLAGIPSSDSRNANLYFLDVVQQANTIFHLFDKQFNDHLMPLISSSPKLSECLQKKKEIIEQMEMKLDTGIDRTLNCMIGQMKHILAAEQKKTDFKPEDENNVLIQYTNACVKVCAYVRKQVEKIKNSMDGKNVDTVLMELGVRFHRLTYEHLQQYSYSCMGGMLAICDVAEYRKCAKDFKIPMVLHLFDTLHALCNLLVVAPDNLKQVCSGEQLANLDKNILHSFVQLRADYRSARLARHFS

SEQ ID NO: 8958 - DNA, 483 bp, Homo sapiens
  ref <308>: DATABASE ACCESSION NUMBER: EMBL / BE939943
  ref <309>: DATABASE ENTRY DATE: 2001-08-31
tgatagggcgtgcctatatcttgatattttcccaccttccccgctccaggcttagatgttgagtgtgcaataaggctctggtacagttttagcatttcatagacaattttcaagttaccttaacatttaactaaacaaatgctctcccctcctttctagctatttcattaatctgttttcattctgcagactgatttttctacttttttgatcccattatagatcagtgaaaattctaaggagaaagaatcctatttcctttcatcacaatcaatttgaagaatgatatatttatgatactttcaaaggcttgtttggtttcttgtaaaagattaaccaccacttcttgggatagaaaagtctccccatgagtatcgatacttggcccaagtggtaagttggtacgctgtctaattctttccttcaaatcttgaatactagtacatcataaagacaaatgaaaaaaagaaaacattttactta

SEQ ID NO: 8959 - protein, 708 aa, Homo sapiens
  ref <308>: DATABASE ACCESSION NUMBER: Refseq / NP_006535
  ref <309>: DATABASE ENTRY DATE: 2002-08-27
MATTAELFEEPFVADEYIERLVWRTPGGGSRGGPEAFDPKRLLEEFVNHIQELQIMDERIQRKVEKLEQQCQKEAKEFAKKVQELQKSNQVAFQHFQELDEHISYVATKVCHLGDQLEGVNTPRQRAVEAQKLMKYFNEFLDGELKSDVFTNSEKIKEAADIIQKLHLIAQELPFDRFSEVKSKIASKYHDLECQLIQEFTSAQRRGEISRMREVAAVLLHFKGYSHCVDVYIKQCQEGAYLRNDIFEDAGILCQRVNKQVGDIFSNPETVLAKLIQNVFEIKLQSFVKEQLEECRKSDAEQYLKNLYDLYTRTTNLSSKLMEFNLGTDKQTFLSKLIKSIFISYLENYIEVETGYLKSRSAMILQRYYDSKNHQKRSIGTGGIQDLKERIRQRTNLPLGPSIDTHGETFLSQEVVVNLLQETKQAFERCHRLSDPSDLPRNAFRIFTILVEFLCIEHIDYALETGLAGIPSSDSRNANLYFLDVVQQANTIFHLFDKQFNDHLMPLISSSPKLSECLQKKKEIIEQMEMKLDTGIDRTLNCMIGQMKHILAAEQKKTDFKPEDENNVLIQYTNACVKVCAYVRKQVEKIKNSMDGKNVDTVLMELGVRFHRLIYEHLQQYSYSCMGGMLAICDVAEYRKCAKDFKIPMVLHLFDTLHALCNLLVVAPDNLKQVCSGEQLANLDKNILHSFVQLRADYRSARLARHFS

SEQ ID NO: 8960 - DNA, 5952 bp, Rattus norvegicus
  ref <308>: DATABASE ACCESSION NUMBER: EMBL / U79568
  ref <309>: DATABASE ENTRY DATE: 2000-03-04
atggcgatgctgcctcctccaggacctcagagtttcgttcacttcacaaaacagtcccttgccctcattgaacagcgtatttctgaagaaaaagccaaggaacacaaagacgaaaagaaagatgatgaggaagaaggccccaagcccagcagtgacttggaagctgggaaacagctccccttcatctatggagacattccccctggaatggtgtcagagcccctggaggacctggacccatactatgctgacaaaaaaacttttatagtattgaacaaagggaaagcaatcttccgtttcaacgccacccctgctttgtacatgctgtctcccttcagtcctctaagaagaatatctattaagatcttagtgcactccttattcagcatgctaatcatgtgcacaattctgacgaactgcatattcatgaccttgagcaaccctccagaatggaccaaaaatgtagagtacacttttactgggatatatacttttgaatcactcataaaaatccttgcaagaggcttttgcgtgggagaattcaccttcctccgtgacccttggaactggctggactttgttgtcattgtttttgcgtatttaacagaatttgtaaacctaggcaatgtttcagctcttcgaactttcagagtcttgagagctttgaaaactatttctgtaatcccaggactaaagaccatcgtgggggccctgatccagtcagtgaagaagctctctgacgtcatgatcctcactgtgttctgtctcagtgtgtttgcactaattggactacagctgtttatgggcaacttgaagcataaatgtttcaggaaggaactcgaagagaatgaaacattagaaagtatcatgaatactgctgagagtgaagaagaattgaaaaaatatttttattacttggagggatccaaagatgctctactctgcggcttcagcacagattcagggcagtgtccagaaggctacatctgtgtgaaggctggcagaaacccggattatggctacacgagctttgacacattcagctgggccttcttggccttgtttcggctaatgactcaggactactgggagaacctttaccaacagactctgcgtgctgctggcaaaacctacatgattttctttgtcgtggttatttttctgggctccttttacctgataaacttgatcctggctgtggtagccatggcgtatgaggaacagaaccaggccaacatcgaagaagctaaacagaaagagttagaatttcagcagatgttagaccgactcaaaaaggagcaggaagaagctgaggcgatcgctgcagctgctgctgagttcacgagtatagggcggagcaggatcatgggactctctgagagctcttcagaaacctccaggctgagctcaaagagtgccaaggagagaagaaaccgaagaaagaaaaagaaacagaagatgtccagtggcgaggaaaagggtgacgatgagaagctgtccaagtcaggatcagaggaaagcatccgaaagaaaagcttccatctcggtgtggaagggcaccaccggacccgggaaaagaggctgtccacccccaaccagtcgccactcagcattcgcgggtccctgttttctgccaggcgcagcagcaggacgagtctcttcagttttaaggggcgaggaagagatctgggatctgagacagaattcgctgatgatgagcatagcatttttggagacaacgagagcagaaggggttcactattcgtaccccatagaccccgggagcggcgcagcagtaacatcagtcaggccagtaggtccccgccagtgctaccggtgaacgggaagatgcacagtgcagtggactgcaatggagtcgtgtcgcttgttgatggaccctcagccctcatgctccccaatggacagcttcttccagaggtgataatagataaggcaacttccgacgacagcggcacgactaatcagatgcgcaaaaaaaggctctctagttcttacttcttgtctgaggacatgctgaatgacccgcatctcaggcaaagggccatgagcagggcgagcatactgaccaacactgtggaagaacttgaagaatctagacaaaaatgtccaccatggtggtacagatttgctcacacatttttaatctggaattgctctccatattggataaaattcaaaaagctcatctattttattgtgatggatccttttgtagatcttgcaattaccatttgcatagttttaaacaccttatttatggctatggagcaccacccaatgactgaagaattcaaaaatgtccttgcagtggggaacttgatctttacagggatcttcgcagctgaaatggtactgaagttaatagccatggacccctatgagtatttccaagtagggtggaatatttttgacagcctaattgtgacgctgagtttgatagagcttttcctagcagatgtggaaggattatcagttctgcggtcattcagattgctccgagtcttcaagttggcaaagtcctggcccacactgaacatgctcattaagatcatcggcaactcggtgggcgcactgggcaacctgaccctggtgctggccatcatcgtcttcatttttgccgtggtcggcatgcagctgtttggaaagagctacaaggagtgtgtctgcaagatcaatgtggactgcaagctgccgcgctggcacatgaacgacttcttccactccttcctcatcgtgttccgagtgctgtgtggggagtggatagagaccatgtgggactgcatggaggtcgcgggccagaccatgtgccttattgtttacatgatggtcatggtgattgggaaccttgtggtcctgaacctgtttctggctcttttgctgagttcctttagttctgacaatcttacagcaattgaggaagacaccgatgcaaacaacctccagatcgcagtggccagaattaagaggggaatcaattacgtgaaacagaccctgcgtgaattcattctaaaatcattttccaaaaagccaaagggctccaaggacacaaaacgaacagcagatcccaacaacaagaaagaaaactatatttcaaaccgtacccttgcggagatgagcaaggatcacaatttcctcaaagaaaaggataggatcagtggttatggcagcagtctagacaaaagctttatggatgaaaatgattaccagtcctttatccataaccccagcctcacagtgacagtgccaattgcacctggggagtctgatttggagattatgaacacagaagagcttagcagtgactcagacagtgactacagcaaagagaaacggaaccgatcaagctcttctgagtgcagcactgttgacaaccctctgccaggagaagaggaggctgaagcagagcccgtaaacgcagatgagcctgaagcctgctttacagatggttgtgtgaggagatttccatgctgccaagttaatgtagactctgggaaagggaaagtttggtggaccatcaggaagacgtgctacaggatagttgaacacagctggtttgaaagcttcatcgttctcatgatcctgctcagcagtggagctctggcttttgaagatatctatattgaaaagaaaaagaccattaagattatcctggagtatgctgacaagatattcacctacatcttcattctggaaatgcttctaaaatgggtcgcatatgggtataaaacatatttcactaatgcctggtgttggctggacttcttaattgttgatgtgtctctagttactttagtagccaacactcttggctactcagaccttggccccattaaatctctacggacactgagggccctaagacccctaagagccttgtctagatttgaaggaatgagggtagtggtcaacgcactcataggagcaatcccttccatcatgaacgtgcttctcgtgtgccttatattctggctaatatttagcatcatgggagtcaatctgtttgctggcaagttctatgagtgtgtcaacaccaccgatgggtcacgatttcctacatctcaagttgcaaaccgttctgagtgttttgccctgatgaacgttagtggaaatgtgcgatggaaaaacctgaaagtaaacttcgacaacgttgggcttggttacctgtcgctgcttcaagttgcaacattcaagggctggatggatattatgtatgcagcagttgactctgttaatgtaaatgaacagccgaaatacgaatacagtctctacatgtacatttactttgtcatcttcatcatcttcggctcattcttcacgttgaacctgttcattggtgtcatcatagataatttcaaccaacagaaaaaaaagcttggaggtcaagatatctttatgacagaagaacagaagaaatactataatgcaatgaagaagcttgggtccaaaaaaccacaaaaaccaattccaaggccagggaacaaattccaaggatgtatatttgacttagtgacaaaccaagcttttgatatcaccatcatggttcttatatgcctcaacatggtaaccatgatggtagaaaaagaggggcaaactgagtacatggattatgttttacactggatcaacatggtcttcattatcctgttcactggggagtgtgtgctgaagctaatctccctcagacattactacttcactgtgggttggaacatttttgattttgtggtagtgatcctctccattgtaggaatgtttctcgctgagatgatagagaagtatttcgtgtcccctaccctgttccgagtcatccgcctggccaggattggacgaatcctacgcctgatcaaaggcgccaaggggatccgcactctgctctttgctttgatgatgtcccttcctgcgctgttcaacatcggcctcctgcttttcctggtcatgttcatctacgccatctttgggatgtccaactttgcctacgttaaaaaggaggctggaattaatgacatgttcaactttgagacttttggcaacagcatgatctgcttgttccaaatcaccacctctgccggctgggacggactgctggcccccatcctcaacagcgcacctcccgactgtgaccctaaaaaagttcacccaggaagttcagtggaaggggactgtgggaacccatccgtggggattttttactttgtcagctacatcatcatatccttcctggtggtggtgaacatgtacatcgctgtcatcctggagaacttcagcgtcgccaccgaagagagcactgagcctctgagtgaggacgactttgagatgttctacgaggtctgggagaagttcgaccctgacgccactcagttcatagagttctgcaagctctctgactttgcagctgccctggatcctcccctcctcatcgcaaagccaaacaaagtccagctcattgccatggacctgcccatggtgagtggagaccgcatccactgcctggacatcttgtttgcttttacaaagcgggtcctgggtgagggtggagagatggattctcttcgttcacagatggaagaaaggttcatgtcagccaatccttctaaagtgtcctatgaacccatcacgaccacactgaagagaaaacaagaggaggtgtccgcgactatcattcagcgtgcttacagacggtatcgcctcagacaacacgtcaagaatatatcgagtatatacataaaagatggagacagggatgatgatttgcccaataaagaagatacagtttttgataacgtgaacgagaactcaagtccggaaaagacagatgtaactgcctcaaccatctcgccaccttcctatgacagtgtcacaaagccagatcaagagaaatatgaaacagacaaaacagagaaggaagacaaagagaaagatgaaagcaggaaa

SEQ ID NO: 8961 - protein, 1984 aa, Rattus norvegicus; identical to SEQ ID NO: 350
  ref <308>: DATABASE ACCESSION NUMBER: SWISS-Prot / AAB50403
  ref <309>: DATABASE ENTRY DATE: 2003-02-01

SEQ ID NO: 8962 - DNA, 7831 bp, Homo sapiens; identical to SEQ ID NO: 5525

SEQ ID NO: 8963 - protein, 1836 aa, Homo sapiens; identical to SEQ ID NO: 3249

SEQ ID NO: 8964 - DNA, 3498 bp, Rattus norvegicus
  ref <308>: DATABASE ACCESSION NUMBER: EMBL / U81035
  ref <309>: DATABASE ENTRY DATE: 2000-03-04
attgagattccgatggatctgacccaacccccaacgatcaccaagcagtcggtgaaggaccacatcgtggacccccgagataacatcctgattgaatgtgaagctaaagggaaccccgcccccagtttccactggactcgcaacagcaggttcttcaacattgccaaggacccacgggtgtccatgaggaggaggtctgggaccttggtgatcgacttccgcagtggtgggcggcctgaggagtacgaaggggagtaccagtgctttgcccggaacaaattcggcacagctcttagcaacccgatccgcctgcaggtgtccaaatctcccctgtggcccaaggaaaacctagaccccgtcgtggttcaagagggtgcccccttaaccctgcagtgcaaccccccacctggcctcccatcccccgtcatcttctggatgagcacgtccatggagcccatcacccaggacaagcgtgtctcccagggtcacaacggggacctgtacttctccaacgtcatgctgcaggacatgcagaccgactacagctgcaatgcacgcttccacttcacccacaccattcagcagaagaatcccttcaccctcaaagtcctcaccaacaacccctataatgactcgtctttaagaaaccaccctgacatatatagtgcccgaggagttgcggaaagaacacctagcttcatgtatccccagggcacgtcaagcagtcagatggtactgcgcggcatggacctgctgctggagtgcattgcctctggggtcccaacaccagatattgcatggtacaagaaaggtggggacctcccatctgacaaggccaagttcgagaattttaacaaggctctgcgcatcaccaatgtctctgaagaggactctggggagtatttctgcctggcctccaacaagatgggcagcatccggcacacgatctcggtgagagtaaaggctgccccatactggctggatgagcccaagaacttgatcctggctcctggtgaagatgggaggctggtgtgtcgagccaatgggaacccgaagccgaccgtccagtggctggtgaatggagaccctttgcaatcggcaccacccaaccccaaccgtgaggtggccggagacactatcatcttccgggacactcagatcagcagcagggcagtgtaccagtgtaacacatccaacgaacatggctacctgctggccaatgccttcgtcagcgtattagatgtaccccctcggatgctgtctccccggaaccagctcatcagggtgatcctttacaaccggacgcgactggactgtccgttctttgggtctcccattccaacactccgatggtttaagaatgggcaaggaagcaacctggatggtggtaactaccacgtctaccaaaatggcagcctggaaatcaagatgattcgcaaagaggaccaaggcatctacacctgtgtggccaccaacatcctgggaaaagctgaaaatcaagtccgcctggaggtcaaagaccccaccaggatctacaggatgcctgaagaccaggtggccaagaggggcaccacagtgcagctggagtgccgtgtgaagcatgacccctccttgaaactcacagtctcctggctgaaggatgacgagccactctacattggaaacaggatgaaaaaggaagatgactccctgaccatcttcggagtggcagagcgggaccaaggcagttacacgtgcatggccagcaccgagctggaccaggacctggcaaaggcctacctcactgttctagctgatcaggccactccgactaaccgtttggctgccctgcccaaagggcggccagaccgacccagggacctggagctcactgacctggcggaaaggagtgtgaggctgacctggatcccgggggatgataacaacagtcccatcacagactacgttgtccagtttgaagaggaccagttccagccaggagtcttgcatgaccactccaagttcccaggcagtgtcaactcagccgtcctccatctgtccccgtatgtcaactatgacttccgagtcatcgctgtcaacgaggttgggagcagccaccccagccttccatccgagcggtaccgaacaagcggggcaccccctgaatccaaccccagtgatgtgaagggcgaagggacacgaaaaaacaatatggagatcacatggacgcctatgaatgctacctccgcctttggccccaacctgcgctactacattgtcaagtggcgacggagagaaacccgagagacttggaacaatgtcaccgtgtggggctctcgctatgtggtggggcagacccctgtctacgtaccctatgagatccgagtccaggctgaaaatgactttgggaaaggcccggagcctgaaaccgtcattgggtactcgggggaagattatcccagggctgcacccactgaagttaaaatccgagtcctgaacagcacagccatcagccttcagtggaaccgcgtctaccctgacacggtccagggccagctcagagagtatcgagcttactactggagggaaagcagtttgctgaagaacctgtgggtgtctcagaagagacagcaggccagcttccctggcgaccgcccccggggcgtggtgggtcgcctgttcccctacagtaactacaagctggagatggttgtggtcaatgggagaggtgatgggcctcgaagtgaaaccaaggaattcaccaccccggaaggagtacccagtgcccccaggcgtttcagagtccgacagcccaacctggagaccatcaacctggaatgggatcacccagagcaccccaacgggatcctgattggatacacgctcagatacgtgccctttaatggaaccaaactgggaaagcagatggtggaaaacttctctcccaatcagaccaagttctcggtgcagagagcagaccccgtgtcccgttaccgcttctccctcagtgccaggacgcaggtgggctctggagaagcagccacggaggagtccccaacacctccaaatgaagctactccaactgcagcttacaccaacaaccagactgacatcgccacccagggctggttcatcgggctcatgtgtgccattgcccttctggtgctgatcctgctgatcgtctgcttcatcaagaggagtcgtggcggcaagtacccagtgcgagaaaagaaggatgtccccttgggccctgaagaccccaaagaagaagatggttcatttgactacagtgacgaggacaacaagcccctgcagggcagccagacatctctggacggcaccatcaagcagcaggagagtgacgacagcctagtggactacggcgagggtggcgagggccagttcaacgaagatggctcctttattggccagtacactgtcagaaaggacaaggaggagaccgagggcaatgagagctcagaggccacatctccagtcaatgccatctattccctggcc

SEQ ID NO: 8965 - protein, 1217 aa, Rattus norvegicus; identical to SEQ ID NO: 2863
  ref <308>: DATABASE ACCESSION NUMBER: SWISS-Prot / AAB47753
  ref <309>: DATABASE ENTRY DATE: 2003-02-01

SEQ ID NO: 8966 - DNA, 4955 bp, Homo sapiens; identical to SEQ ID NO: 2864
  ref <308>: DATABASE ACCESSION NUMBER: EMBL / AB018299
  ref <309>: DATABASE ENTRY DATE: 2002-05-12

SEQ ID NO: 8967 - protein, 836 aa, Homo sapiens; identical to SEQ ID NO: 2865
  ref <308>: DATABASE ACCESSION NUMBER: SWISS-Prot / BAA34476
  ref <309>: DATABASE ENTRY DATE: 2003-02-01

SEQ ID NO: 8968 - DNA, 4044 bp, Rattus norvegicus
  ref <308>: DATABASE ACCESSION NUMBER: EMBL / U81037
  ref <309>: DATABASE ENTRY DATE: 2000-03-04
gctgatcagcttaaaaccatgccgaagaagaagcccttgtctgcaggcagagcgcccctgtttctcttcctgtgccagatgatcagcgctctggatgttcctcttgatccaaagctccttgatgacttggtacagcctccaactatcactcaacagtcaccaaaagactacatcattgacccacgggagaatattgtaatccaatgtgaggccaaagggaaacctcctccaagcttttcctggactcgtaacggaacacattttgacatagacaaagaccctctggtcactatgaagcctggctcaggaacccttgtcatcaacatcatgagtgaaggaaaggcggagacctatgaaggggtttaccagtgcactgcaaggaatgagcgcggagctgctgtctccaataacattgttgtccgcccctctaggtcacccttgtggaccaaggaaagacttgaaccaataatcctccgaagtggtcagtcactagtactaccatgtaggcctccaattggattaccaccggccataatattttggatggataactcctttcaaagactgccacagagtgagcgggtttcccaaggactgaatggagacctttacttctccaatgtcctcccagaggacacccgtgaggactacatctgctatgccagatttaatcacactcaaacaattcaacagaaacaacctatttctctgaaggtgatttcagtggatgaattgaatgacactatagctgctaatttgagtgacactgagttttatggtgctaaatctagtaaagagaggccaccaacatttctaactccagagggcaatgaaagtcacaaggaagaattaagaggaaacgtgctttccctggagtgcattgcagaaggcctacctactccagttatttactggatcaaggaagatggaacgcttcctgtcaaccggacgttttatcggaactttaagaaaaccttgcagatcattcatgtctctgaagcagactctggaaattatcagtgcatagcaaaaaacgcattgggagccgtccatcataccatttctgtcacagttaaagcggctccctactggattgttgcacctcacaacctcgtgctttccccaggggagaatgggaccctcatctgcagagctaacggcaacccaaaacccagaattagctggttaacaaatggagtcccagtagaaattgctctcgatgaccccagccgaaaaatcgatggtgataccattatgttttcaaatgttcaagaaagctcaagtgcggtttatcagtgcaatgcctctaacaaatatggatatttactagcaaatgcatttgtaaatgtgctcgctgaaccacctcggattcttacctcagcaaacacactgtaccaggtcattgcaaaccggcctgctttgctggactgtgccttctttgggtctcctatgcctaccattgagtggtttaaaggaactaaaggaagcgctcttcacgaagacatttatgttttacatgataacggaacgctagaaattcctgtggcccaaaaggatagtacagggacatatacttgtgtcgcaaggaataaattagggatggcaaagaatgaagttcacttggaaatcaaagatccaaccaggttcattaaacaacctggatatgcagtcgttcagagggggagcaaggtttcctttgaatgcaaagtgaaacacgaccacaccttaatccccaccattctgtggctgaaggacaatggagagctgcccaatgatgaaaggttctctgtcgacaaggaccatctggtggtctctgacgtaaaggatgaagatggtgggacctacacatgtgcagccaacacaacgctggacagtgtttcagccagcgccgtgctcagggtggtcgctcctactccaactccagcccccatttacgatgtcccgaatcctccctttgatttagaattgaccaatcaacttgacaaaagtgttcagctgacatggaccccaggcgatgacaacaatagtcccattacaaaattcatcatcgagtatgaagatgcaatgcatgaggcagggctgtggcgccaccaggcggaagtttctggaacgcagaccacagcccagctgaagctgtctccctatgtgaactactccttccgagtcatggcggagaacagcatcgggaggagtgtgccaagcgaggcatcggagcagtatcttacaaaggccgcggaaccagaccagaatcccacggctgtggaaggactagggacagagccggacaacttggtgatcacatggaagcccctgaatggttttcaatcgaatgggcccggcctccagtacaaagtgagctggcgtcagaaagatggtgacgatgaatggacgtctgtggttgtggccaatgtatccaaatacattgtttctggcacaccaacttttgtcccatacctgataaaagttcaagccctgaatgatgtgggctttgctccagagccagctgcagtcatgggacattccggagaagaccttccaatggtggctcctggaaatgtgcgtgtcagtgtggtgaacagcaccttggcagaggcacactgggaccctgtacctcccaagagtgtccgaggacacttacaaggctaccggatttactactggaaggctcagagctcatctaaaagaaacagacgccacattgagaagaagatcctcaccttccagggcagcaagactcacggcatgctgccagggctgcaaccttacagtcactatgttctcaatgtccgagtggtcaatgggaaaggggagggcccagccagcgccgacagaggcttccatactccagagggagtccctagtgctccctcatctttgaaaattgttaatcctacactggactctctcactttggaatgggaccctccaagccacccaaatggtatcctgactgaatacatcttaaaatatcagccaattaatagcacacacgaactaggccctctggtagatttaaaaattcctgccaacaagacacgctggactttgaaaaatttaaatttcagcactcggtacaagttctacttctatgcacaaacatcagtgggatcgggcagtcagatcacagaggaagcaataacaactgtggacgaaggtaagaaggctggtattcttccacctgatgtaggtgcaggcaaagcaatggcaagtcggcaagtggatattgcgacccaaggctggttcataggtctaatgtgtgctgttgccctcctcatcttaattttgctaatcgtttgcttcatcagaagaaacaagggtggtaaatatccagttaaagaaaaggaggatgctcacgcagaccctgaaatccagcccatgaaggaggatgacggaacgtttggagaatatagtgatgcagaagatcacaagcctttgaaaaagggaagtcgaacaccttcagacaggactgtgaaaaaagaagatagtgatgacagcctggttgactatggcgagggggtgaatggccaattcaatgaggatggctcctttatcggacaatacagtggtaagaaagagaaagaaccagcagagggaaatgaaagctcagaggccccttctcctgtcaacgcaatgaactcctttgtttaagtctttaagctctgtgccaatgtcccatctctctggaatggttttcctgaacacttgtcatccctctcatactatggacatatgggtagaaagaatgttttctgcggtatatgagtattataagaacagagcaagaacataactcagtcagatgatacgttaatatgaactggggtgaaaaggcatactttttgttcagagtgggttttctcaatttccttggaactgattaaaaagaactacaacatcatcaatagcttacattattccctgtgcaggatacagttcaataagatgcatgaaacatgctgcacagaggacatagctgtgtatgtgattgcgacgtggttgggtacttcgttgacactatcctcagctgaaccctaaatatgaatt

SEQ ID NO: 8969 - protein, 1215 aa, Rattus norvegicus
  ref <308>: DATABASE ACCESSION NUMBER: SWISS-Prot / AAB47755
  ref <309>: DATABASE ENTRY DATE: 2003-02-01
ADQLKTMPKKKPLSAGRAPLFLFLCQMISALDVPLDPKLLDDLVQPPTITQQSPKDYIIDPRENIVIQCEAKGKPPPSFSWTRNGTHFDIDKDPLVTMKPGSGTLVINIMSEGKAETYEGVYQCTARNERGAAVSNNIVVRPSRSPLWTKERLEPIILRSGQSLVLPCRPPIGLPPAIIFWMDNSFQRLPQSERVSQGLNGDLYFSNVLPEDTREDYICYARFNHTQTIQQKQPISLKVISVDELNDTIAANLSDTEFYGAKSSKERPPTFLTPEGNESHKEELRGNVLSLECIAEGLPTPVIYWIKEDGTLPVNRTFYRNFKKTLQIIHVSEADSGNYQCIAKNALGAVHHTISVTVKAAPYWIVAPHNLVLSPGENGTLICRANGNPKPRISWLTNGVPVEIALDDPSRKIDGDTIMFSNVQESSSAVYQCNASNKYGYLLANAFVNVLAEPPRILTSANTLYQVIANRPALLDCAFFGSPMPTIEWFKGTKGSALHEDIYVLHDNGTLEIPVAQKDSTGTYTCVARNKLGMAKNEVHLEIKDPTRFIKQPGYAVVQRGSKVSFECKVKHDHTLIPTILWLKDNGELPNDERFSVDKDHLVVSDVKDEDGGTYTCAANTTLDSVSASAVLRVVAPTPTPAPIYDVPNPPFDLELTNQLDKSVQLTWTPGDDNNSPITKFIIEYEDAMHEAGLWRHQAEVSGTQTTAQLKLSPYVNYSFRVMAENSIGRSVPSEASEQYLTKAAEPDQNPTAVEGLGTEPDNLVITWKPLNGFQSNGPGLQYKVSWRQKDGDDEWTSVVVANVSKYIVSGTPTFVPYLIKVQALNDVGFAPEPAAVMGHSGEDLPMVAPGNVRVSVVNSTLAEAHWDPVPPKSVRGHLQGYRIYYWKAQSSSKRNRRHIEKKILTFQGSKTHGMLPGLQPYSHYVLNVRVVNGKGEGPASADRGFHTPEGVPSAPSSLKIVNPTLDSLTLEWDPPSHPNGILTEYILKYQPINSTHELGPLVDLKIPANKTRWTLKNLNFSTRYKFYFYAQTSVGSGSQITEEAITTVDEGKKAGILPPDVGAGKAMASRQVDIATQGWFIGLMCAVALLILILLIVCFIRRNKGGKYPVKEKEDAHADPEIQPMKEDDGTFGEYSDAEDHKPLKKGSRTPSDRTVKKEDSDDSLVDYGEGVNGQFNEDGSFIGQYSGKKEKEPAEGNESSEAPSPVNAMNSFV

SEQ ID NO: 8970 - DNA, 3900 bp, Homo sapiens
  ref <308>: DATABASE ACCESSION NUMBER: EMBL / AJ001057
  ref <309>: DATABASE ENTRY DATE: 2001-05-05
atgccgaaaaagaagcgcttatctgcgggcagagtgcccctgattctcttcctgtgccagatgattagtgcactggaagtacctcttgatccaaaacttcttgaagacttggtacagcctccaaccatcacccaacagtctccaaaagattacattattgaccctcgggagaatattgtaatccagtgtgaagccaaagggaaaccgcccccaagcttttcctggacccgtaatgggactcattttgacatcgataaagaccctctggtcaccatgaagcctggcacaggaacgctcataattaacatcatgagcgaagggaaagctgagacctatgaaggagtctatcagtgtacagcaaggaacgaacgcggagctgcagtttctaataacattgttgtccgcccatccagatcaccattgtggaccaaagaaaaacttgaaccaatcacacttcaaagtggtcagtctttagtacttccctgcagacccccaattggattaccaccacctataatattttggatggataattcctttcaaagacttccacaaagtgagagagtttctcaaggtttgaatggggacctttatttttccaatgtcctcccagaggacacccgcgaagactatatctgttatgctagatttaatcatactcaaaccatacagcagaagcaacctatttctgtgaaggtgatttcagtggatgaattgaatgacactatagctgctaatttgagtgacactgagttttatggtgctaaatcaagtagagagaggccaccaacatttttaactccagaaggcaatgcaagtaacaaagaggaattaagaggaaatgtgctttcactggagtgcattgcagaaggactgcctaccccaattatttactgggcaaaggaagatggaatgctacccaaaaacaggacagtttataagaactttgagaaaaccttgcagatcattcatgtttcagaagcagactctggaaattaccaatgtatagcaaaaaatgcattaggagccatccaccataccatttctgttagagttaaagcggctccatactggatcacagcccctcaaaatcttgtgctgtccccaggagaggatgggaccttgatctgcagagctaatggcaaccccaaacccagaattagctggttaacaaatggagtcccaatagaaattgcccctgatgaccccagcagaaaaatagatggcgataccattattttttcaaatgttcaagaaagatcaagtgcagtatatcagtgcaatgcctctaatgaatatggatatttactggcaaacgcatttgtaaatgtgctggctgagccaccacgaatcctcacacctgcaaacacactctaccaggtcattgcaaacaggcctgctttactagactgtgccttctttgggtcacctctcccaaccatccagtggtttaaaggagctaaaggaagtgctcttcatgaagatatttatgttttacatgaaaatggaactttggaaattcctgtggcccaaaaggacagtacaggaacttatacgtgtgttgcaaggaataaattagggatggcgaagaatgaagttcacttagaaatcaaagatcctacatggatcgttaaacagcccgaatatgcagttgtgcaaagagggagcatggtgtcctttgaatgcaaagtgaaacatgatcacaccttatccctcactgtcctgtggctgaaggacaacagggaactgcccagtgatgaaaggttcactgttgacaaggatcatctagtggtagctgatgtcagtgacgatgacagcgggacctacacgtgtgtggccaacaccactctggacagcgtctccgccagcgctgtgcttagcgttgttgctcctactccaactccagctcccgtttacgatgtcccaaatcctccgcttgacttagaactgacagatcaacttgacaaaagtgttcagctgtcatggaccccaggcgatgacaacaatagccccattacaacaattcatgacgaatatgaagatgcaatgcacaagccagggctgtggcaccaccaaactgaagtttctggaacacagaccacagcccagctgaagctgtctccttacgtgaactactccttccgcgtgatggcagtgaacagcattgggaagagcttgcccagcgaggcctctgagcagtatttgacgaaagcctcagaaccagataaaaaccccacagctgtggaaggactgggatcagagcctgataatttggtgattacgtggaagcccttgaatggtttcgaatttaatgggccaggccttcagtacaaagttagctggcgccagaaagttggtgatgatgaatggacatctgtggttgtggcaaatgtatccaaatatattgtttcaggcacgccaacctttgttccatacctgatcaaagttcaggccctgaatgacatggggtttgcccccgagccagctgtagtcatgggacattctggagaagacctcccaatggtggctcctgggaacgtgcgtgtgaatgtggtgaacagtaccttagccgaggtgcactgggacccagtacctctgaaaagcatccgaggacacctacaaggctatcggatttactattggaagacccagagttcatctaaaagaaacagacgtcacattgagaaaaagatcctcaccttccaaggcagcaagactcatggcatgttgccggggctagagccctttagccactacacactgaatgtccgagtggtcaatgggaaaggggagggcccagccagccctgacagagtctttaatactccagaaggagtccccagcgttccctcgtctttgaagattgtgaatccaacactggactctctcactttggaatgggatccaccgagccacccgaatggcattttgacagagtacaccttaaagtatcagccaattaacaacacacatgaattaggccctctggtagatttgaaaattcctgccaacaagacacggtggactttaaaaaatttaaatttcaccactcgatataagttttatttctatgcacaaacatcagcaggatcaggaagtcaaattacagaggaagcagtaacaactgtggatgaagctggtattcttccacctgatgtaggtgcaggcaaagttcaagcagtaaatcccaggatcagcaatcttactgctgcagctgctgaaacctatgccaatatcagttgggaatatgagggaccagagtatgccaacttttatgttgaatatggtgtagcaggcagcaaagaagaatggagaaaagaaattgtaaatggttctcggagcttctttgggttaaagggtctaatgccaggaacagcatacaagtttcgagttggtgctgtggggggaccccggtttgtgagttcagagggtgtgtttgagacaggcccagcgatggcaagccggcaggtggatattgcaactcagggctggttcattggtctgatgtgtgctgttgctctccttatcttaattttgctgattgtttgcttcatcagaagaaacaagggtggtaaatatccagttaaagaaaaggaagatgcccatgctgaccctgaaatccagcctatgaaggaagatgatgggacatttggagaatacagtgatgcagaagaccacaagcctttgaaaaaaggaagtcgaactccttcagacaggactgtgaaaaaagaagatagtgacgacagcctacttgactatggagaaggggttaatggccagttcaatgaggatggctcctttattggacaatacagtggtaaaaaagagaaagagccggctgaaggaaacgaaagctcagaggcaccttctcctgtcaacgccatgaattcctttgtttaa

SEQ ID NO: 8971 - protein, 1180 aa, Homo sapiens
  ref <308>: DATABASE ACCESSION NUMBER: Refseq / NP_005001
  ref <309>: DATABASE ENTRY DATE: 2002-11-05
MQLKIMPKKKRLSAGRVPLILFLCQMISALEVPLDPKLLEDLVQPPTITQQSPKDYIIDPRENIVIQCEAKGKPPPSFSWTRNGTHFDIDKDPLVTMKPGTGTLIINIMSEGKAETYEGVYQCTARNERGAAVSNNIVVRPSRSPLWTKEKLEPITLQSGQSLVLPCRPPIGLPPPIIFWMDNSFQRLPQSERVSQGLNGDLYFSNVLPEDTREDYICYARFNHTQTIQQKQPISVKVISAKSSRERPPTFLTPEGNASNKEELRGNVLSLECIAEGLPTPIIYWAKEDGMLPKNRTVYKNFEKTLQIIHVSEADSGNYQCIAKNALGAIHHTISVRVKAAPYWITAPQNLVLSPGEDGTLICRANGNPKPRISWLTNGVPIEIAPDDPSRKIDGDTIIFSNVQERSSAVYQCNASNEYGYLLANAFVNVLAEPPRILTPANTLYQVIANRPALLDCAFFGSPLPTIEWFKGAKGSALHEDIYVLHENGTLEIPVAQKDSTGTYTCVARNKLGMAKNEVHLEIKDATWIVKQPEYAVVQRGSMVSFECKVKHDHTLSLTVLWLKDNRELPSDERFTVDKDHLVVADVSDDDSGTYTCVANTTLDSVSASAVLSVVAPTPTPAPVYDVPNPPFDLELTDQLDKSVQLSWTPGDDNNSPITKFIIEYEDAMHKPGLWHHQTEVSGTQTTAQLNLSPYVNYSFRVMAVNSIGKSLPSEASEQYLTKASEPDKNPTAVEGLGSEPDNLVITWKPLNGFESNGPGLQYKVSWRQKDGDDEWTSVVVANVSKYIVSGTPTFVPYLIKVQALNDMGFAPEPAVVMGHSGEDLPMVAPGNVRVNVVNSTLAEVHWDPVPLKSIRGHLQGYRIYYWKTQSSSKRNRRHIEKKILTFQGSKTHGMLPGLEPFSHYTLNVRVVNGKGEGPASPDRVFNTPEGVPSAPSSLKIVNPTLDSLTLEWDPPSHPNGILTEYTLKYQPINSTHELGPLVDLKIPANKTRWTLKNLNFSTRYKFYFYAQTSAGSGSQITEEAVTTVDEAMASRQVDIATQGWFIGLMCAVALLILILLIVCFIRRNKGGKYPVKEKEDAHADPEIQPMKEDDGTFGEYSDAEDHKPLKKGSRTPSDRTVKKEDSDDSLVDYGEGVNGQFNEDGSFIGQYSGKKEKEPAEGNESSEAPSPVNAMNSFV

SEQ ID NO: 8972 - DNA, 1830 bp, Rattus norvegicus
  ref <308>: DATABASE ACCESSION NUMBER: EMBL / U81186
  ref <309>: DATABASE ENTRY DATE: 2000-03-04
tggcgagttatggagcgcgctctcccggcggccggcttcctatactgggtgggcgcgagcaccattgcttacctgaccctgcgagcctcgtactcgctcttcagggccttccaggtgtggtgcgtgggcaaccaggcctttgtcggcccgcggctcggagaatgggcagttgttacaggtggcactgatggaattggaaaatcatatgcagaagagttagcaaagcgtggaatgaagattgtcttgataagcagatcccaggataaactgaaggaagtttccaacaacatcaaagaaaaattcaacgttgaaacaaggaccattgctgtcgacttttcattggatgatatttatgataaaattaagacaggcctgtctggtcttgaaattggcgttttagtgaacaacgtgggcatgtcatacgagtatccagaatactttttggaaattcctgacttggacaacaccatcaagaaactgataaatattaatgtgctttccatttgcaaggtgacacgcttggtgctgcctggcatggtagagagatctaaaggggtgattctcaacatctcctctgccagtggcatgctcccggttccactgttgacagtctactctgcaaccaaggcctttgtagatttcttctctcagtgcctccatgaggagtataagagcaagggcatctttgtgcagagtgtcctgccattctttgtatctacaaaactggcaaaaatacggaagccgactttggataagccctctgcagagacatttgtgaagtctgcaattaaaacagtaggtctgcagacccgaaccactgggatatgtgatccacgccatcatgggctcaataaactcaatcttgccccgttggatttattttaaaacgatcatgggtttcaacaagtctttgcggaatcgctatctgaagaaaaccaagaagaactaagttctgctgggtcatcgagctccttggccagacgcttgacctgtgcttgcatactgggcccctgcctgtccccagagtctctactgtcatctcagtaattactaacatggcatagctggcggaaagcaaattccttttagaggttcctaacatatattctggatacaaccaggagtaatttgaagtttaatataaatgttcttggcaaatgtatgtataccactttgacagaaaggaacagatcccagaatgacagacgtagcacccatccggcccagaatgccaatgattacctaatatttggtctggaacctactataaagtgtaatagctagctacttttttatttttaacattaaagggaatggggcttagttgattttttttttatgggcagatacaatgcagtttacattgatttctgtaaggttttctaaaggtatgttccagcttatgtgtttctatggaactggtcttcttaaaagtagctaagaaagacataaagagaattgaaacacggagttctttctaacacagaagtccacaaaatgttattcttggaacacacattatgtctgctctgttccatgtatgtaaatactgaatgctatatagtgtgactgaaatgtaaaggtaagtgggcccaagtgtacatcaagaccagcaacatcctgtggtactgtgggatccagaagagcagcctgcctggatatccagtgttggtcatgtctgtactgcacccatactatttgcctaggatgacagactccttctgtggtagtgaggggtcatggaaacatgttctttttaagttggtgtctcatttgaattcatatatccacttttaataaaagatgatgtaaccgcaaaaaaaaaaaaaa

SEQ ID NO: 8973 - protein, 291 aa, Rattus norvegicus
  ref <308>: DATABASE ACCESSION NUMBER: SWISS-Prot / AAD00504
  ref <309>: DATABASE ENTRY DATE: 2002-10-01
MERALPAAGFLYWVGASTIAYLTLRASYSLFRAFQVWCVGNQAFVGPRLGEWAVVTGGTDGIGKSYAEELAKRGMKIVLISRSQDKLKEVSNNIKEKFNVETRTIAVDFSLDDIYDKIKTGLSGLEIGVLVNNVGMSYEYPEYFLEIPDLDNTIKKLININVLSICKVTRLVLPGMVERSKGVILNISSASGMLPVPLLTVYSATKAFVDFFSQCLHEEYKSKGIFVQSVLPFFVSTKLAKIRKPTLDKPSAETFVKSAIKTVGLQTRTTGICDPRHHGLNKLNLAPLDLF

SEQ ID NO: 8974 - DNA, 2393 bp, Homo sapiens
  ref <308>: DATABASE ACCESSION NUMBER: Refseq / NM_016142
  ref <309>: DATABASE ENTRY DATE: 2002-05-21
ggccggcgcctcctcctggattcattcactcgctcttttcattcacgaaggtagtgaggcctagtggaaagccatggagagcgctctccccgccgccggcttcctgtactgggtcggcgcgggcaccgtggcctacctagccctgcgtatttcgtactcgctcttcacggccctccgggtctggggagtggggaatgaggcgggggtcggcccggggctcggagagtgggcagttgtcacaggtagtactgatggaattggaaaatcatatgcagaagagttagcaaagcatggaatgaaggttgtccttatcagcagatcaaaggataaacttgaccaggtttccagtgaaataaaagaaaaattcaaagtggagacaagaaccattgctgttgactttgcatcagaagatatttatgataaaattaaaacaggcttggctggtcttgaaatcggcatcttagtgaacaacgtgggaatgtcgtatgagtatcctgaatactttttggatgttcctgacttggacaatgtgatcaagaaaatgataaatattaatattctttctgtttgtaagatgacacaattggtactgcctggcatggtggaaagatccaaaggggctattctgaacatttcatctggcagtggcatgctccctgtcccactcttgaccatctattctgcaaccaagacttttgtagatttcttctctcagtgcctccatgaggagtataggagcaagggcgtctttgtgcagagtgtcctgccatacttcgtagctacaaaactggctaaaatccggaagccaactttggataagccctctccggagacgtttgtgaagtctgcaattaaaacagtcggcctgcaatcccgaaccaatggatacctgatccatgctcttatgggctcgataatctcaaacctgccttcttggatttatttgaaaatagtcatgaatatgaacaagtctacacgggctcactatctgaagaaaaccaagaagaactaagcatgataactgcattgtaacttggccagatgctccagcatatgcacgttcactgcaaagcaccctactggttttgaaaatctgaccttgtcatttcaatagttattaacatgactaaatattatcttaattaagaggaaaatagaagttgcttttaggggtttctgacatatattctggatactatccgaggtaattttgaagtttaatataaatgctcatatcaaatgaatatagaactaatattgtcgggaacacctaatagaaaggaatactattatagcaaatcacagaatgatagactcaagcataaaacttggcagttttatctgcttcaaaatgccattgatcattattcctgtattttctctgaaactgattataaaaaccaatgtccagctactcttttgtttttgacacttgaagaaatggagatcgatttgatttgtttataagcagacacactgcaatttacaaagatctctttacggttttataaaattatcttccagtttgtacatttatatggaattgttctttatcaagggtagctaatgacatgaaaataattgtgaaatatggaattatttctgacacatgaagcccactaaactatgctttcctataatgcatatttcttctcagtttaaatgtatgtaaatatcgaagctatatggtatgatttataaagataaatgggccaaagtgtacattgagactggcagccatctatggtaccactgaaaccctgacccagaaaagtggcttgcttggacacccagctgcctttgtttctgcattaaaccaatattgatcacacatatgacacaggctagtcctataaaagtaatgacttcatagaaatggcattataatttttaagttgatactctacaggtagctattgatataattagttttaataaaacatgctgcaaccatggtatacaacaaaaatacatttctttggtgattgaaattaaggccgtatttacaatgacttaatataagactgacttttatcctgcttcataacttgtatggagaactcaccaagaaagaattcaatactgtgaaatatgcagcaagaagattggtctttacctaggctgtgtttcctaagctctgagttttcagcaccagtagatttgtattaaaagaaaaaaaaatggggccttagcttctggcttttaattttgccagctaaggacataaaacaaaaataaacaaacaaaaacaaatagccatctgctatcagcatcattatgtaaaagaaaatatattttagcccctaaaattaggaagaatgtaatctcagaataaaggttgtcatttaagttgaataaatatatagctttatgaaaaacacaaaaaaaaaaaa

SEQ ID NO: 8975 - protein, 312 aa, Homo sapiens
  ref <308>: DATABASE ACCESSION NUMBER: Refseq / NP_057226
  ref <309>: DATABASE ENTRY DATE: 2002-05-21
MESALPAAGFLYWVGAGTVAYLALRISYSLFTALRVWGVGNEAGVGPGLGEWAVVTGSTDGIGKSYAEELAKHGMKVVLISRSKDKLDQVSSEIKEKFKVETRTIAVDFASEDIYDKIKTGLAGLEIGILVNNVGMSYEYPEYFLDVPDLDNVIKKMININILSVCKMTQLVLPGMVERSKGAILNISSGSGMLPVPLLTIYSATKTFVDFFSQCLHEEYRSKGVFVQSVLPYFVATKLAKIRKPTLDKPSPETFVKSAIKTVGLQSRTNGYLIHALMGSIISNLPSWIYLKIVMNMNKSTRAHYLKKTKKN

SEQ ID NO: 8976 - DNA, 1830 bp, Rattus norvegicus; identical to SEQ ID NO: 8972
  ref <308>: DATABASE ACCESSION NUMBER: EMBL / U81186
  ref <309>: DATABASE ENTRY DATE: 2000-03-04

SEQ ID NO: 8977 - protein, 291 aa, Rattus norvegicus; identical to SEQ ID NO: 8973
  ref <308>: DATABASE ACCESSION NUMBER: SWISS-Prot / AAD00504
  ref <309>: DATABASE ENTRY DATE: 2002-10-01

SEQ ID NO: 8978 - DNA, 2393 bp, Homo sapiens; identical to SEQ ID NO: 8974
  ref <308>: DATABASE ACCESSION NUMBER: Refseq / NM_016142
  ref <309>: DATABASE ENTRY DATE: 2002-05-21

SEQ ID NO: 8979 - protein, 312 aa, Homo sapiens; identical to SEQ ID NO: 8975
  ref <308>: DATABASE ACCESSION NUMBER: Refseq / NP_057226
  ref <309>: DATABASE ENTRY DATE: 2002-05-21

SEQ ID NO: 8980 - DNA, 1830 bp, Rattus norvegicus; identical to SEQ ID NO: 8972
  ref <308>: DATABASE ACCESSION NUMBER: EMBL / U81186
  ref <309>: DATABASE ENTRY DATE: 2000-03-04

SEQ ID NO: 8981 - protein, 291 aa, Rattus norvegicus; identical to SEQ ID NO: 8973
  ref <308>: DATABASE ACCESSION NUMBER: SWISS-Prot / AAD00504
  ref <309>: DATABASE ENTRY DATE: 2002-10-01

SEQ ID NO: 8982 - DNA, 2393 bp, Homo sapiens; identical to SEQ ID NO: 8974
  ref <308>: DATABASE ACCESSION NUMBER: Refseq / NM_016142
  ref <309>: DATABASE ENTRY DATE: 2002-05-21

SEQ ID NO: 8983 - protein, 312 aa, Homo sapiens; identical to SEQ ID NO: 8975
  ref <308>: DATABASE ACCESSION NUMBER: Refseq / NP_057226
  ref <309>: DATABASE ENTRY DATE: 2002-05-21

SEQ ID NO: 8984 - DNA, 1830 bp, Rattus norvegicus; identical to SEQ ID NO: 8972
  ref <308>: DATABASE ACCESSION NUMBER: EMBL / U81186
  ref <309>: DATABASE ENTRY DATE: 2000-03-04

SEQ ID NO: 8985 - protein, 291 aa, Rattus norvegicus; identical to SEQ ID NO: 8973
  ref <308>: DATABASE ACCESSION NUMBER: SWISS-Prot / AAD00504
  ref <309>: DATABASE ENTRY DATE: 2002-10-01

SEQ ID NO: 8986 - DNA, 2393 bp, Homo sapiens; identical to SEQ ID NO: 8974
  ref <308>: DATABASE ACCESSION NUMBER: Refseq / NM_016142
  ref <309>: DATABASE ENTRY DATE: 2002-05-21

SEQ ID NO: 8987 - protein, 312 aa, Homo sapiens; identical to SEQ ID NO: 8975
  ref <308>: DATABASE ACCESSION NUMBER: Refseq / NP_057226
  ref <309>: DATABASE ENTRY DATE: 2002-05-21

SEQ ID NO: 8988 - DNA, 3622 bp, Rattus norvegicus
  ref <308>: DATABASE ACCESSION NUMBER: EMBL / U82623
  ref <309>: DATABASE ENTRY DATE: 1997-12-20
cagcgtgagtgcgaggcggaggcggcggctgcagcggagcggacggtcgctcggcggcaggcactggtgtaatggataggtaacagaagaccacttcccttcctcctcagggcttcagcatgactgagtgcttcctgccccccaccagcagccctagtgaacaccgcagggccgagcacggcagcgggctgacccggacccccagctccgaggagatcagccctacaaaatttcctggattgtaccggacgggtgagccttcacctccccatgacatcctccacgagcctcctgatatcgtgtcagatgatgagaaagaccatggaaagaaaaaaggaaaatttaagaaaaaggagaaaaggactgaaggctacgctgccttccaggaagacagctctggagatgaggctgaaagtccttccaagatgaagaggtccaagggcatccatgtgttcaaaaagcccagcttctctaaaaagaaggaaaaggattttaaaatcaaagaaaagcccaaagaagaaaagcacaaagaagaaaagcataaagaggaaaagcataaagaaaagaaatgtaaagacttgacggccgccgatgttgttaaacagtggaaggaaaagaagaaaaagaagaagccaactcaggagccagaggtgcctcagacggacgccccgagtctcagacccattttcggcgctcccttggctgacgcagtagagaggaccatgatgtacgacggcatccggctgccagctgtcttccgggagtgcgtggactacatggagaagcacggcatgaaatgtgaaggcatctaccgagtgtcaggaatcaaatcaaaggtagatgagctgaaagcagcctatgaccgagaggagtctccaaacttggaagaatatgaacctaacactgtagccagcttgctgaagcagtatctgcgagaccttcccgagaatttgcttaccaaagagcttatgccccgatttgaagaggcttgtgggaggaccacagaggtggagaaagtgcaggagttccagcgcttgctcagggaactgccggagtacaaccatcttctgctctcctggctcattgtgcacatggaccacgtcatcgcgaaggagctggaaaccaagatgaacatccagaacatctccatagtgctgagcccaaccgtccagatcagcaaccgggtcctgtatgtgcttttcacacacgtgcaagagctctttggcaccgtggtcctgaagcaagtaacgagacctctgcgttggtccaacatggccacaatgcctacactgccagagacccaagcaggcatcaaggaagaaatcaggagacaggagttccttttgaactgtttacatcgagatctgcagggcgggataaaggacttgtctaaagaagaaagattatgggaagtacagaggattctgactgccctcaagagaaagctgagggaagctaaaagacaagagtgtgagaccaagattgcacaggagatagccagcctttcgaaggaggatgtttccaaagaagaaacgaacgaaaacgaggaggtcataaatatcctccttgcccaggagaatgagatcctgactgagcaggaggagctcctggccatggagcagtttctgcgtcgtcagatcgcctcggagaaagaagagattgaccccctccgagctgagattgcggagatccagagtcgccagcatggccgcagcgagacagaggagtactcctctgacagcgagagcgagagcgaggatgaggaggagctgcagatcattctggaagacttacagaggcagaatgaagagttagaaataaagaacaatcacttgaaccaggcagtccatgaagagcgggaggccatcgttgagctccgagtgcagctccggctgctccagatgctgcgagccaagtctgagcagcagctccaggaggaggaggagcccgagaggcgagggggcacaggcccactaccctgtgaaggtgtcctcgaggtgagagcagccaaggagcaggcgaagcctcgcccagcaaagaccggaaggagacgcccatctgaactgccccggccctgtgcatcgtactgtaagcgagagtccgctgcctgtcctgccaggcagcgttctgtgaaggctctcagagacgctcgctcttgcacacgtctgactccgtgtcaggctcaggtcctgggagagtgaaggggtggacactcgggggtggggggcttgcagggaacacaggtatttccagatagtgtcagcttatttgaaaattaattttctttgttaaaaataactattttaacccttgagtggcttctttttaaaccaaaaaactttttgcttttttttgttgttgtttaaatcacagcagaatcaggatctctttcttatcaaagggtgggaaccaaaccaggtcacttctgcgcctgccttgtggacgctcgtggtctcaccagccctgcagggtccctggccactcttgcttgtgccttccacaccttttggtgcagattgttcagtggggagctgcctcatattctctgactggccaaaaaggctctcgctggggttccctgtacctgccctgtgtgtaccactttgcttttccagctccgggtctgtcagtgtgagtcaggacggcccagtttggttgcagacggaggttaccatgcagcctgccaccagcctgggcagggcaggccacccactcactgccagggagcagcaagggcctcttctcagaggtggtcagagatgaccaccttgaccctgaggttgcacaggacacttctcacaccagggtccttttccacactgaccttccaggaaagtcaccttccacagtgacttcagttgctagcttgggctgggatacccacacctctgccaggataagccatgtagatgctgtcatgcacaactttcacctgtccatgtcatctcaaggggctgcttaaggactctgacagaactgagcggaaggaaggaaagcgtaactgtaattgaccccccctggtgtttgcctctaacctggacgactgctcccagcggtctgggaggccggactcttaggcaaccggatttcactgtcagatgagtggcccccagggaggtccccctgtggctctgaagacaaatcccacactctaaagtgagcgacaaacccacaggagggctccggtctactcctagttagtatttatttcagcacctgttggtgcgatttttcgttagcctctacctattgcactgttgtgacttgttggccattatttgatttttgtacggaaaaaaaagctttgttatagaaatcagcatactatttttttaaatctggagagaagatattatggaaactggaaacgtggtcaggtgtcaaatgtaaatgtataaatgccttgctgcacccgtcagatgtgcaacactcattctatatttgctggcaatattgaggaattctttttgtttgtgtaaactctaatttctatcaaggtatcatgggtttttaaaatttcattacaaatgtctcaatgttggttaactaatttttgccaggaccattattgattaaggaaataaactcagcagccatttgagaaaaaaaaaaaaaaaaaaaa

SEQ ID NO: 8989 - protein, 693 aa, Rattus norvegicus
  ref <308>: DATABASE ACCESSION NUMBER: SWISS-Prot / AAB91537
  ref <309>: DATABASE ENTRY DATE: 2002-10-01
MTECFLPPTSSPSEHRRAEHGSGLTRTPSSEEISPTKFPGLYRTGEPSPPHDILHEPPDIVSDDEKDHGKKKGKFKKKEKRTEGYAAFQEDSSGDEAESPSKMKRSKGIHVFKKPSFSKKKEKDFKIKEKPKEEKHKEEKHKEEKHKEKKCKDLTAADVVKQWKEKKKKKKPTQEPEVPQTDAPSLRPIFGAPLADAVERTMMYDGIRLPAVFRECVDYMEKHGMKCEGIYRVSGIKSKVDELKAAYDREESPNLEEYEPNTVASLLKQYLRDLPENLLTKELMPRFEEACGRTTEVEKVQEFQRLLRELPEYNHLLLSWLIVHMDHVIAKELETKMNIQNISIVLSPTVQISNRVLYVLFTHVQELFGTVVLKQVTRPLRWSNMATMPTLPETQAGIKEEIRRQEFLLNCLHRDLQGGIKDLSKEERLWEVQRILTALKRKLREAKRQECETKIAQEIASLSKEDVSKEETNENEEVINILLAQENEILTEQEELLAMEQFLRRQIASEKEEIDPLRAEIAEIQSRQHGRSETEEYSSDSESESEDEEELQIILEDLQRQNEELEIKNNHLNQAVHEEREAIVELRVQLRLLQMLRAKSEQQLQEEEEPERRGGTGPLPCEGVLEVRAAKEQAKPRPAKTGRRRPSELPRPCASYCKRESAACPARQRSVKALRDARSCTRLTPCQAQVLGE

SEQ ID NO: 8990 - DNA, 217 bp, Homo sapiens
  misc_feature (1)..(217): n=a, c, g or t
  ref <308>: DATABASE ACCESSION NUMBER: EMBL / AA029488
  ref <309>: DATABASE ENTRY DATE: 2000-03-03
aaaccccacacgagggctctcacctccttctcctaggtagtatttattttcagcacctgtttgatgcagtttttaatcctctacctattgcactgttgtgactcgttggccattatttgatttttgtacgaaaaaaagctttgttatagaaatcagcatactatttttttaaatctggagagaagatattctggtgactggaangtatgggcccggg

SEQ ID NO: 8991 - protein, 655 aa, Homo sapiens
  ref <308>: DATABASE ACCESSION NUMBER: Refseq / NP_006779
  ref <309>: DATABASE ENTRY DATE: 2002-11-05
MTECFLPPTSSPSEHRRVEHGSGLTRTPSSEEISPTKFPGLYRTGEPSPPHDILHEPPDVVSDDEKDHGKKKGKFKKKEKRTEGYAAFQEDSSGDEAESPSKMKRSKGIHVFKKPSFSKKKEKDFKIKEKPKEEKHKEEKHKEEKHKEKKSKDLTAADVVKQWKEKKKKKKPIQEPEVPQIDVPNLKPIFGIPLADAVERTMMYDGIRLPAVFRECIDYVEKYGMKCEGIYRVSGIKSKVDELKAAYDREESTNLEDYEPNTVASLLKQYLRDLPENLLTKELMPRFEEACGRTTETEKVQEFQRLLKELPECNYLLISWLIVHMDHVIAKELETKMNIQNISIVLSPTVQISNRVLYVFFTHVQELFGNVVLKQVMKPLRWSNMATMPTLPETQAGIKEEIRRQEFLLNCLHRDLQGGIKDLSKEERLWEVQRILTALKRKLREAKRQECETKIAQEIASLSKEDVSKEEMNENEEVINILLAQENEILTEQEELLAMEQFLRRQIASEKEEIERLRAEIAEIQSRQQHGRSETEEYSSESESESEDEEELQIILEDLQRQNEELEIKNNHLNQAIHEEREAIIELRVQLRLLQMQRAKAEQQAQEDEEPEWRGGAVQPPRDGVLEPKAAKEQPKAGKEPAKPSPSRDRKETSI

SEQ ID NO: 8992 - DNA, 4104 bp, Rattus norvegicus
  ref <308>: DATABASE ACCESSION NUMBER: EMBL / U82626
  ref <309>: DATABASE ENTRY DATE: 1998-01-17
gaggggccggtctgcgtctctcctgaccctgccgccgcgctgttgcggttctgaggtgaagctttcctcctgcggaggggcgcggagccatgtacatcaagcaggtgattatccagggcttccgaagttaccgagatcaaacaattgtagatcccttcagttcaaaacataatgttattgtgggcagaaatggatctggaaaaagcaactttttttatgcaatccagtttgttctcagtgatgaatttagtcatcttcgtccagagcagcgattggctttgttgcacgagggtacaggtcctcgtgttatttctgcttttgtggaaatcatttttgacaattcagacaaccggttaccaattgataaagaggaagtttcgcttcgaagagttattggtgccaaaaaagatcagtatttcctagataagaagatggtcacgaaaaatgatgtgatgaatctccttgaaagtgctgggttttcgagaagtaatccttattacattgttaaacaaggaaagatcaaccaaatggcaacagcaccggattctcagagattaaagctgttgagagaagtagctggcactcgagtgtatgacgagcgcaaagaggaaagcatctccctgatgaaagaaacagagggcaaacgggaaaagatcaatgagttgttaaaatacattgaagagcgattacatactctagaggaggagaaggaggaactggcccagtatcagaagtgggataaaatgaggcgtgccctggagtacaccatctacaaccaggagctcaacgagactcgcgccaagcttgatgagctttctgctaagcgagaaacaagcggagagaaatccagacaattaagagatgcccagcaggatgcaagagataaaatggaggatattgagcgccaagttagagaactgaaaacaaaaatttcagccatgaaagaagaaaaagaacagctcagtgcggagagacaagagcagattaagcaaaggaccaagctggagcttaaagccaaggacttacaggatgagctggcagggaacagtgagcagcggaaacgtttattaaaagaaagacagaagctgcttgaaaaaatagaagaaaagcagaaagaactggcagaaacagaaccgaaattcaacagcgtaaaggaaaaagaagagcgaggaattgctagattggctcaagctacacaggaaagaactgatctttatgcaaagcagggtcgaggaagccagtttacatcaaaagaagaaagagataagtggattaagaaggaactgaagtctttagatcaggctattaatgataagaaaagacagattgctgctatacacaaggatttggaggataccgaggccaataaagagaaaaatctggagcaatataataaactggatcaggatctcaatgaagtcaaagctcgagttgaagaactggacagaaaatattatgaagtgaaaaataagaaagatgaactacaaagtgaaagaaattacttgtggagagaggagaatgcagaacagcaagcacttgccgctaagagagaagaccttgagaagaagcagcagcttcttagagcggcaacaggaaaggccattttaaatggaatcgacagcattaacaaagtgttagaccatttccggcggaagggtataaaccagcatgtgcaaaatggctaccatggcatcgtgatgaataactttgagtgcgaaccagctttctatacttgtgtggaagtcactgccggtaacaggttattctatcacattgtcgattcagatgaagtcagcacgaagatattaatggagttcaataaaatgaatcttcctggagaggtgactttcctgcctcttaacaagttagatgtgagggacactgcctatcctgaaactaacgatgctattcctatgatcagtaagctgaggtacaatcccagattcgacaaagctttcaaacatgtgtttggaaagacactcatctgtcggagcatggaggtttccactcagctagctcgtgccttcactatggactgcattactctggaaggtgatcaagtcagccatcgaggtgctctgactggaggctattacgacacaagaaagtctcgccttgagttacagaaggatgttaggaaagcagaggaggagctgggtgagctcgaagctaagctcaatgaaaacctgcgcagaaacattgaaaggattaataatgaaattgatcaattgatgaaccaaatgcagcagatagagacccaacagagaaaatttaaagcatccagagatagcaccttatcagagatgaagatgctaaaagagaagagacagcagtcagaaaagaccttcatgccaaagcaacgcagtttgcagagtctggaggccagtctgcacgctatggagtcgaccagagagtcgctgaaggcagagctagggacagatttgccctctcagctcagcctggaagaccagaaaagagtcgacgcactgaatgacgagatccggcagcttcagcagaaaaacagacagctgctgaatgaaagaattaaactagaaggcattattactcgagtagagacttacctcaatgagaatctgaggaaacgtctggaccaagtagagcaggaacttaatgaactgagagagacagaaggtggcactgttcttactgccaccacgtcacaacttgaagctattaataaaagagtgaaagatactatggcaagatcagaagatttggataattccattgacaaaacagaagctggaattaaagagctccagaaaagcatggagcgctggaagaacatggagaaggagcacatggatgccataaatcacgacactaaagagctggagaagatgaccaaccgacagggcatgctgttgaagaagaaagaggagtgcatgaagaagatccgagagctggggtcccttccccaggaagcatttgaaaagtaccagacactgagcctgaagcagttgtttcggaaacttgagcagtgcaacacagagttgaagaagtacagccatgtcaacaagaaggctctggaccagtttgtgaatttctctgagcagaaggagaaactgataaagcgacaggaagaattggacaggggctacaagtcaatcatggagttgatgaatgtactcgaacttagaaaatatgaagctatccagttaaccttcaaacaggtatctaagaactttagtgaagttttccagaagttggtacctggggcaaaagcgaccttggtgatgaagaaaggagacgtggagggcagccagtctcaggacgaaggagaggggagcggcgagagcgagaggggctctgggtcacaaagcagcgttccatcagttgaccagttcacaggagtcgggatcagggtatcatttacaggaaagcaaggcgagatgagagaaatgcagcagctttcaggagggcagaagtctctggtagcccttgctctcatttttgccattcagaagtgtgaccctgctcctttctacctgtttgatgagatcgaccaagctttggatgctcagcacagaaaagctgtgtcagatatgattatggaactagctgtacacgcccagtttatcactaccacttttaggcctgaactgcttgagtctgctgataaatcctccgggaagtcagaataaggtagtcacatcgacgtgatcacagcaagagatggccaaagactttgtagaagacgataccacgcatggttaactgaaagataacgcctgccgtcttggaagatgtgtatagtaatgtggtccgtacctgggaacgtaaattttaaaaataataattggttattactgagtttttggatttagaatacacagtccttttatacttgtctttgtattttataagctcccctgtaatgttacatttctacgtatagtcgaggaattttatttcctacacgacaaaaagtaagtgtcctcctattttaaatcttttgagattctaaatattcccaattattttatagcttctattaaataattggtttgtgcataacttagtgtaaatgtggccttttgtctttgtaattgttagaaacattcggtgggtattttgcataag

SEQ ID NO: 8993 - protein, 1191 aa, Rattus norvegicus
  ref <308>: DATABASE ACCESSION NUMBER: SWISS-Prot / AAB96342
  ref <309>: DATABASE ENTRY DATE: 2003-02-01
MYIKQVIIQGFRSYRDQTIVDPFSSKHNVIVGRNGSGKSNFFYAIQFVLSDEFSHLRPEQRLALLHEGTGPRVISAFVEIIFDNSDNRLPIDKEEVSLRRVIGAKKDQYFLDKKMVTKNDVMNLLESAGFSRSNPYYIVKQGKINQMATAPDSQRLKLLREVAGTRVYDERKEESISLMKETEGKREKINELLKYIEERLHTLEEEKEELAQYQKWDKMRRALEYTIYNQELNETRAKLDELSAKRETSGEKSRQLRDAQQDARDKMEDIERQVRELKTKISAMKEEKEQLSAERQEQIKQRTKLELKAKDLQDELAGNSEQRKRLLKERQKLLEKIEEKQKELAETEPKFNSVKEKEERGIARLAQATQERTDLYAKQGRGSQFTSKEERDKWIKKELKSLDQAINDKKRQIAAIHKDLEDTEANKEKNLEQYNKLDQDLNEVKARVEELDRKYYEVKNKKDELQSERNYLWREENAEQQALAAKREDLEKKQQLLRAATGKAILNGIDSINKVLDHFRRKGINQHVQNGYHGIVMNNFECEPAFYTCVEVTAGNRLFYHIVDSDEVSTKILMEFNKMNLPGEVTFLPLNKLDVRDTAYPETNDAIPMISKLRYNPRFDKAFKHVFGKTLICRSMEVSTQLARAFTMDCITLEGDQVSHRGALTGGYYDTRKSRLELQKDVRKAEEELGELEAKLNENLRRNIERINNEIDQLMNQMQQIETQQRKFKASRDSTLSEMKMLKEKRQQSEKTFMPKQRSLQSLEASLHAMESTRESLKAELGTDLPSQLSLEDQKRVDALNDEIRQLQQKNRQLLNERIKLEGIITRVETYLNENLRKRLDQVEQELNELRETEGGTVLTATTSQLEAINKRVKDTMARSEDLDNSIDKTEAGIKELQKSMERWKNMEKEHMDAINHDTKELEKMTNRQGMLLKKKEECMKKIRELGSLPQEAFEKYQTLSLKQLFRKLEQCNTELKKYSHVNKKALDQFVNFSEQKEKLIKRQEELDRGYKSIMELMNVLELRKYEAIQLTFKQVSKNFSEVFQKLVPGAKATLVMKKGDVEGSQSQDEGEGSGESERGSGSQSSVPSVDQFTGVGIRVSFTGKQGEMREMQQLSGGQKSLVALALIFAIQKCDPAPFYLFDEIDQALDAQHRKAVSDMIMELAVHAQFITTTFRPELLESADKSSGKSE

SEQ ID NO: 8994 - DNA, 3903 bp, Rattus norvegicus
  ref <308>: DATABASE ACCESSION NUMBER: EMBL / U83119
  ref <309>: DATABASE ENTRY DATE: 2000-03-04
aggaagcaagaaactaatcgtcttggcaacaaaacaaagagaatgaaagcacacaaacataacctcacatccaaatatgaatataaagggagcaataatcactattccttaatatctctcaatatcaatggcctcaactccccaataaaaagacatagattaacaaactggatacgcaatgaggaccctgcattctgctgcctacaggaaacacacctcagagacaaagacagacattacctcagagtgaaaggctggaaaacaactttccaagcaaatggtcagaagaagcaagctggagtagccattctaatatcaaataaaatcaatttccaactaaaagtcatcaaaaaagataaggaaggacacttcatattcatcaaaggaaaaatccaccaagatgaactctcaatcctaaatatctatgccccaaatacaagggcacctacatacgtaaaagaaaccttactaaagctcaaaacacacattgcacctcacacaataatagtgggagacttcaacaccccactctcatcaatggacagatcatggaaacagaaattaaacagtgatgtcgacagactaagagaagtcatgagccaaatggacttaacggatatttatagaacattctatcctaaagcaaaaggatataccttcttctcagctcctcatggtactttctccaaaattgaccatataattggtcaaaaaacgggcctcaacaggtacagaaagatagagataatcccatgcatgctatcggaccaccacggcctaaaactggtcttcaataacaataagggaagaatgcccacatatacgtggaaattgaacaatgctctactcaatgataacctggtcaaggaagaaataaagaaagaaattaaaaagtttttagaatttaatgaaaatgaagatacaacatactcaaacttatgggacacaatgaaagctgtgctaagaggaaaactcatagcgctgagtgcctgcagaaagaaacaggaaagagcatatgtcagcagcttgacaacacacctaaaagctctagaacaaaaagaagcaaatacgcccaggaggagtagaaggcaggaaataatcaaactcagagctgaaatcaaccaagtagaaacaaaaaggaccatagaaagaatcaacagaaccaaaagttggttctttgagaaaatcaacaagatagataaacccttagccagactaacgagaggacacagagagtgcgtccaaattaacaaaatcagaaatgaaaagggagacataactacagattcagaggaaattcaaaaaatcatcagatcttactataaaaacctatattcaacaaaatttgaaaatcttcaggaaatggacaatttcctagacagataccaggtatcgaagttaaatcaggaacagataaaccagttaaacaaccccataactcctaaggaaatagaagcagtcactaaaggtctcccaaccaaaaagagcccaggtccagacgggtttagtgcagaattctatcaaaccttcatagaagacctcataccaatattatccaaactattccacaaaattgaaacagatggagcactaccgaattccttctatgaagccacaattactcttatacctaaaccacacaaagacacgacaaagaaagagaacttcagaccaatttcccttatgaatatcaacgcaaaaatactcaataaaattctggcaaaccgaattcaagagcacatcaaaacaatcatccaccatgatcaagtaggcttcatcccaggcatgcagggatggtttaatatacggaaaaccatcaacgtgatccattatataaacaaactgaaagaacagaaccacatgatcatttcattagatgctgagaaagcatttgacaaaattcaacaccccttcatgataaaagtcctggaaagaataggaattcaaggcccatacctaaacatagtaaaagccatatacagcaaaccagttgctaacattaaactaaatggagagaaacttgaagcaatcccactaaaatcagggactagacaaggctgcccactctctccctacttattcaatatagttcttgaagttctagccagaccaatcagaaaacaaaaggagatcaaggggatacagatcggaaaagaagaggtcaaaatatcactatttgcagatgacatgatagtatatttaagtgatcccaaaagttccaccagagaacaactaaagctgataaacaacttcagcaaagtggctgggtataaaattaactcaaataaatcagttgccttcctctatacaaaagagaaacaagccgagaaagaaattagggaaacgacacccttcataatagacccaaataatataaagtacctcggtgtgactttaaccaagcaagtaaaagatctgtacaataagaacttcaagacactgaggaaagaaattgaagaagacctcagaagatggaaagatctcccatgctcatggattggcaggattaatatagtaaaaatggccattttaccaaaagcaatctacagattcaatgcaatccccatcaaaataccaatccaattcttcaaagagttagacagaacaatttgcaaattcatctggaataacaaaaaacccaggatagctaaagctatcctcaacaataaaaggacttcagggggaatcactatccctgaactcaagcagtattacagagcaatagtgataaaaactgcatggtattggtacagagacagacagatagaccaatggaatagaattgaagacccagaaatgaactcacacacctatggtcacttgatttttgacaaaggagccaaaaccatccaatggaaaaaagatagcattttcagcaaatggtgctggttcaactggagggcaacatgtagaagaatgcagatcgatccatgcttatcaccctgtacaaagcttaagtccaagtggatcaaggacctccacatcaaaccagacacactcaaactaatagaagaaaaactagggaagcatctggaacacatgggcactggaaaaaatttcctgaacaaaacaccaatggcttatgctctaagatcaagaattgacaaatgggatctcataaaactgcaaagcttctgtaaggcaaaggacactgtggttaggacaaaacggcaaccaacagattgggaaaagatctttaccaaccctacaacagatagaggccttatatccaaaatatacaaagaactcaagaagttagaccgcagggaaacaaataaccctattaaaaaatggggttcagagctaaacaaagaattcacagctgaggaatgccgaatggctgagaaacacctaaagaaatgttcaacatctttagtcataagggaaatgcaaatcaaaacaaccctgagatttcacctcacaccagtgagaatggctaagatcaaaaactcaggggacaacagatgctggcgaggatgtggagaaagaggaacactcctccattgttggtgggattgcaaactggtacaaccattctggaaatcagtctggaggatcctcagaaaattggacattgaactgcctgaggatccagctatacctctcttgggcatatacccaaaagatgccccaacatataaaaaagacacgtgctccactatgttcattgcagccttatttataatagccagaagctggaaagaacccagatgcccttcaacagaggaatggatacagaaaatgtggtacatctacacaatggaatattactcagctatcaaaaacaacgactttatgaaattcgtaggcaaatggctggaactggaaaatatcatcctgagtgagctaacccaaacacagaaagacatacatggtatgtactcactgatatgtggctattag

SEQ ID NO: 8995 - protein, 1300 aa, Rattus norvegicus
  ref <308>: DATABASE ACCESSION NUMBER: SWISS-Prot / AAB41224
  ref <309>: DATABASE ENTRY DATE: 2003-02-01
RKQETNRLGNKTKRMKAHKHNLTSKYEYKGSNNHYSLISLNINGLNSPIKRHRLTNWIRNEDPAFCCLQETHLRDKDRHYLRVKGWKTTFQANGQKKQAGVAILISNKINFQLKVIKKDKEGHFIFIKGKIHQDELSILNIYAPNTRAPTYVKETLLKLKTHIAPHTIIVGDFNTPLSSMDRSWKQKLNSDVDRLREVMSQMDLTDIYRTFYPKAKGYTFFSAPHGTFSKIDHIIGQKTGLNRYRKIEIIPCMLSDHHGLKLVFNNNKGRMPTYTWKLNNALLNDNLVKEEIKKEIKKFLEFNENEDTTYSNLWDTMKAVLRGKLIALSACRKKQERAYVSSLTTHLKALEQKEANTPRRSRRQEIIKLRAEINQVETKRTIERINRTKSWFFEKINKIDKPLARLTRGHRECVQINKIRNEKGDITTDSEEIQKIIRSYYKNLYSTKFENLQEMDNFLDRYQVSKLNQEQINQLNNPITPKEIEAVTKGLPTKKSPGPDGFSAEFYQTFIEDLIPILSKLFHKIETDGALPNSFYEATITLIPKPHKDTTKKENFRPISLMNINAKILNKILANRIQEHIKTIIHHDQVGFIPGMQGWFNIRKTINVIHYINKLKEQNHMIISLDAEKAFDKIQHPFMIKVLERIGIQGPYLNIVKAIYSKPVANIKLNGEKLEAIPLKSGTRQGCPLSPYLFNIVLEVLARPIRKQKEIKGIQIGKEEVKISLFADDMIVYLSDPKSSTREQLKLINNFSKVAGYKINSNKSVAFLYTKEKQAEKEIRETTPFIIDPNNIKYLGVTLTKQVKDLYNKNFKTLRKEIEEDLRRWKDLPCSWIGRINIVKMAILPKAIYRFNAIPIKIPIQFFKELDRTICKFIWNNKKPRIAKAILNNKRTSGGITIPELKQYYRAIVIKTAWYWYRDRQIDQWNRIEDPEMNSHTYGHLIFDKGAKTIQWKKDSIFSKWCWFNWRATCRRMQIDPCLSPCTKLKSKWIKDLHIKPDTLKLIEEKLGKHLEHMGTGKNFLNKTPMAYALRSRIDKWDLIKLQSFCKAKDTVVRTKRQPTDWEKIFTNPTTDRGLISKIYKELKKLDRRETNNPIKKWGSELNKEFTAEECRMAEKHLKKCSTSLVIREMQIKTTLRFHLTPVRMAKIKNSGDNRCWRGCGERGTLLHCWWDCKLVQPFWKSVWRILRKLDIELPEDPAIPLLGIYPKDAPTYKKDTCSTMFIAALFIIARSWKEPRCPSTEEWIQKMWYIYTMEYYSAIKNNDFMKFVGKWLELENIILSELTQTQKDIHGMYSLICGY

SEQ ID NO: 8996 - DNA, 6075 bp, Homo sapiens
  ref <308>: DATABASE ACCESSION NUMBER: EMBL / M80340
  ref <309>: DATABASE ENTRY DATE: 2002-05-02
gggggaggagccaagatggccgaataggaacagctccggtctacagctcccagcgtgagcgacgcagaagacggtgatttctgcatttccatctgaggtaccgggttcatctcactagggagtgccagacagtgggcgcaggccagtgtgtgtgcgcaccgtgcgcgagccgaagcagggcgaggcattgcctcacctgggaagcgcaaggggtcagggagttccctttctgagtcaaagaaaggggtgacggtcgcacctggaaaatcgggtcactcccacccgaatattgcgcttttcagaccggcttaagaaacggcgcaccacgagactatatcccacacctggctcggagggtcctacgcccacggaatctcgctgattgctagcacagcagtctgagatcaaactgcaaggcggcaacgaggctgggggaggggcgcccgccattgcccaggcttgcttaggtaaacaaagcagccgggaagctcgaactgggtggagcccaccacagctcaaggaggcctgcctgcctctgtaggctccacctctgggggcagggcacagacaaacaaaaagacagcagtaacctctgcagacttaagtgtccctgtctgacagctttgaagagagcagtggttctcccagcacgcagctggagatctgagaacgggcagacagactgcctcctcaagtgggtccctgactcctgacccccgagcagcctaactgggaggcaccccccagcaggggcacactgacacctcacacggcagggtattccaacagacctgcagctgagggtcctgtctgttagaaggaaaactaacaaccagaaaggacatctacaccgaaaacccatctgtacatcaccatcatcaaagaccaaaagtagataaaaccacaaagatgggaaaaaacagaacagaaaaactggaaactctaaaacgcagagcgcctctcctcctccaaaggaacgcagttcctcaccagcaacagaacaaagctggatggagaatgattttgacgagctgagagaagaaggcttcagacgatcaaattactctgagctacgggaggacattcaaaccaaaggcaaagaagttgaaaactttgaaaaaaatttagaagaatgtataactagaatatccaatacagagaagtgcttaaaggagctgatggagctgaaaaccaaggctcgagaactacgtgaagaatgcagaagcctcaggagccgatgcgatcaactggaagaaagggtatcagcaatggaagatgaaatgaatgaaatgaagcgagaagggaagtttagagaaaaaagaataaaaagaaatgagcaaagcctccaagaaatatgggactatgtgaaaagaccaaatctacgtctgattggtgtacctgaaagtgatgtggagaatggaaccaagttggaaaacactctgcaggatattatccaggagaacttccccaatctagcaaggcaggccaacgttcagattcaggaaatacagagaacgccacaaagatactcctcgagaagagcaactccaagacacataattgtcagattcaccaaagttgaaatgaaggaaaaaatgttaagggcagccagagagaaaggtcgggttaccctcaaagggaagcccatcagactaacagcggatctctcggcagaaaccctacaagccagaagagagtgggggccaatattcaacattcttaaagaaaagaattttcaacccagaatttcatatccagccaaactaagcttcataagtgaaggagaaataaaatactttatagacaagcaaatgttgagagattttgtcaccaccaggcctgccctaaaagagctcctgaaggaagcgctaaacatggaaaggaacaaccggtaccagccgctgcaaaatcatgccaaaatgtaaagaccatcgagactaggaagaaactgcatcaactaatgagcaaaatcaccagctaacatcataatgacaggatcaaattcacacataacaatattaactttaaatataaatggactaaattctgcaattaaaagacacagactggcaagttggataaagagtcaagacccatcagtgtgctgtattcaggaaacccatctcacgtgcagagacacacataggctcaaaataaaaggatggaggaagatctaccaagccaatggaaaacaaaaaaaggcaggggttgcaatcctagtctctgataaaacagactttaaaccaacaaagatcaaaagagacaaagaaggccattacataatggtaaagggatcaattcaacaagaggagctaactatcctaaatatttatgcacccaatacaggagcacccagattcataaagcaagtcctcagtgacctacaaagagacttagactcccacacattaataatgggagactttaacaccccactgtcaacattagacagatcaacgagacagaaagtcaacaaggatacccaggaattgaactcagctctgcaccaagcagacctaatagacatctacagaactctccaccccaaatcaacagaatatacatttttttcagcaccacaccacacctattccaaaattgaccacatagttggaagtaaagctctcctcagcaaatgtaaaagaacagaaattataacaaactatctctcagaccacagtgcaatcaaactagaactcaggattaagaatctcactcaaagccgctcaactacatggaaactgaacaacctgctcctgaatgactactgggtacataacgaaatgaaggcagaaataaagatgttctttgaaaccaacgagaacaaagacaccacataccagaatctctgggacgcattcaaagcagtgtgtagagggaaatttatagcactaaatgcctacaagagaaagcaggaaagatccaaaattgacaccctaacatcacaattaaaagaactagaaaagcaagagcaaacacattcaaaagctagcagaaggcaagaaataactaaaatcagagcagaactgaaggaaatagagacacaaaaaacccttcaaaaaatcaatgaatccaggagctggttttttgaaaggatcaacaaaattgatagaccgctatcaagactaataaagaaaaaaagagagaagaatcaaatagacacaataaaaaatgataaaggggatatcaccaccgatcccacagaaatacaaactaccatcagagaatactacaaacacctctacgcaaataaactagaaaatctagaagaaatggatacattcctcgacacatacactctcccaagactaaaccaggaagaagttgaatctctgaatagaccaataacaggctctgaaattgtggcaataatcaatagtttaccaaccaaaaagagtccaggaccagatggattcacagccgaattctaccagaggtacatggaggaactggtaccattccttctgaaactattccaatcaatagaaaaagagggaatcctccctaactcattttatgaggccagcatcattctgataccaaagccgggcagagacacaaccaaaaaagagaattttagaccaatatccttgatgaacattgatgcaaaaatcctcaataaaatactggcaaaccgaatccagcagcacatcaaaaagcttatccaccatgatcaagtgggcttcatccctgggatgcaaggctggttcaatatacgcaaatcaataaatgtaatccagcatataaacagagccaatgacaaaaaccacatgattatctcaatagatgcagaaaaagcctttgacaaaattcaacaacccttcatgctaaaaactctcaataaattaggtattgatgggacgtatttcaaaataataagagctatctatgacaaacccacagccaatatcatactgaatgggcaaaaactggaagcattccctttgaaaaccggcacaagacagggatgccctctctcaccgctcctattcaacatagtgttggaagttctggccagggcaatcaggcaggagaaggaaataaagggtattcaattaggaaaagaggaagtcaaattgtccctgtttgcagacgacatgattgtatatctagaaaaccccatcgtctcagcccaaaatctccttaagctgataagcaacttcagcaaagtctcaggatacaaaatcaatgtacaaaaatcacaagcattcttatacaccaacaacagacaaacagagagccaaatcatgggtgaactcccattcgtaattgcttcaaagagaataaaatacctaggaatccaacttacaagggatgtgaaggacctcttcaaggagaactacaaaccactgctcaaggaaataaaagaggacacaaacaaatggaagaacattccatgctcatgggtaggaagaatcaatatcgtgaaaatggccatactgcccaaggtaatttacagattcaatgccatccccatcaagctaccaatgactttcttcacagaattggaaaaaactactttaaagttcatatggaaccaaaaaagagcccgcattgccaagtcaatcctaagccaaaagaacaaagctggaggcatcacactacctgacttcaaactatactacaaggctacagtaaccaaaacagcatggtactggtaccaaaacagagatatagatcaatggaacagaacagagccctcagaaataatgccgcatatctacaactatctgatctttgacaaacctgagaaaaacaagcaatggggaaaggattccctatttaataaatggtgctgggaaaactggctagccatatgtagaaagctgaaactggatcccttccttacaccttatacaaaaatcaattcaagatggattaaagatttaaacgttaaacctaaaaccataaaaaccctagaagaaaacctaggcattaccattcaggacataggcgtgggcaaggacttcatgtccaaaacaccaaaagcaatggcaacaaaagacaaaattgacaaatgggatctaattaaactaaagagcttctgcacagcaaaagaaactaccatcagagtgaacaggcaacctacaacatgggagaaaattttcgcaacctactcatctgacaaagggctaatatccagaatctacaatgaactcaaacaaatttacaagaaaaaaacaaacaaccccatcaaaaagtgggcgaaggacatgaacagacacttctcaaaagaagacatttatgcagccaaaaaacacatgaagaaatgctcatcatcactggccatcagagaaatgcaaatcaaaaccactatgagatatcatctcacaccagttagaatggcaatcattaaaaagtcaggaaacaacaggtgctggagaggatgcggagaaataggaacacttttacactgttggtgggactgtaaactagttcaaccattgtggaagtcagtgtggcgattcctcagggatctagaactagaaataccatttgacccagccatcccattactgggtatatacccaaatgagtataaatcatgctgctataaagacacatgcacacgtatgtttattgcggcactattcacaatagcaaagacttggaaccaaccgaaatgtccaacaatgatagactggattaagaaaatgtggcacatatacaccatggaatactatgcagccataaaaaatgatgagttcatatcctttgtagggacatggatgaaattggaaaccatcattctcagtaaactatcgcaagaacaaaaaaccaaacaccgcatattctcactcataggtgggaattgaacaatgagatcacatggacacaggaaggggaatatcacactctggggactgtggtggggtcgggggaggggggagggatagcattgggagatatacctaatgctagatgacacattagtgggtgcagcgcaccagcatggcacatgtatacatatgtaactaacctgcacaatgtgcacatgtaccctaaaacttagagtataataaaaaaaaaaaaaaaaaaaaaaaaaaaaaaaaaaaaaaaaaaaaaaaaaaaaaa

SEQ ID NO: 8997 - protein, 1275 aa, Homo sapiens [sequence omitted]

SEQ ID NO: 8998 - DNA, 3166 bp, Rattus norvegicus
  ref <308>: DATABASE ACCESSION NUMBER: EMBL / U83883
  ref <309>: DATABASE ENTRY DATE: 2000-03-04
ccgtgcaacggggcatcgtcaagatggtcctctctgggtgtgccatgattgtccgagggctgccccgtggtaccgctccagagaggcagatcaacctcagcaacattcgagctggaaatctcgacacacgtcgtcgagctgctacacaaccagatgggaaagataccccagatgagccctgggcatttcctgctagagagttccttcgcaagaagctgattgggaaggaagtctgtttcacgatagaaaacaagactccccaaggacgagagtatggaatgatctaccttggaaaagatactaatggggaaaacattgcagagtcgctagtcgcagaaggcttggctcccggagagagcatgagagccaataatccagagcagaaccggctttcagaatgcgaggaacaagcaaaggcatcgaagaaagggatgtggagtgaggggacgggtcacacacatccggacctcaagtacaccattgagaacccaaggcactttgtggactcacaccaccagaagcctgtcaatgctatcattgagcatgttcgagacggcagtgtggtccgggccctgctccttccggatcactaccttgttaccgtcatgctgtcagggattaagtgcccaacctttcgtcgagaaacagatggtagtgaaacaccagagcccttcgctgcagaagccaagtttttcacggagtctcgactgcttcagagagatgttcagatcattctggagagctgccataatcagaacattctgggcaccatccttcatccaaatggtaacatcactgaactcctcctgaaggaaggttttgcccgctgtgtggactggtcaattgcagtttacacccggggtgcagaaaagctgagggcagctgagaggtttgccaaggagcgtaggctgagaatatggagagactatgtgcctcctactgctaatttggaccaaaaggacaagcagtttgttgccaaggtaatgcaggttttgaatgctgatgccattgttgtgaagctgagttctggagactacaagaccatccacctgtcaagcatccgaccaccaaggttggagggagacaacatacaggataagaataagaagctgcgtcccctgtatgacatcccctacatgtttgaggcccgggaattccttcgcaaaaagctgattgggaagaaggtcagtgtgactgtggactacattagaccagccagcccagccacagaaacagtgcctgccttttctgagcgtacctgtgccacagtcaccattggaggaataaacattactgaggcccttgtcagcaaaggcctagccacagtgatcagataccggcaggatgatgaccagagatcttcacactatgatgagctgctggctgcagaggccagagcgattaagaatggcaaaggattgcacagcaagaaggaagtgcccatccaccgagttgcagacatttctggggacacccagaaagcaaagcagttcctgccctttcttcagcgcgcaggccgttctgaggctgtggtggagtatgtcttcagtggctctcgcctcaagctctacttacctaaggagacctgtctcatcaccttcctgctggcaggcattgaatgtcccagaggagcacgaaatctcccaggcttggtgcaggaaggagagccattcagtgaggaagccacacttttcaccaaggaactagtgctgcagcgagaggtggaggtggaggtagagagcatggataaggctggcaacttcattggctggctacacatggatggggctaacctgtctgtcttgctggtggagcacgcgctctccaaggtccacttcactgctgagcgcagcggctactataagcctctcctgtctgctgaggaagctgccaagcagaggaaagagaaggtctgggcccactatgaggagcagcctgtggaggaggtaatgcctgtactggaagagaaggagcgctcggccagctacaagccagtgtttgtgaccgagatcacagatgacctgcatttctatgtgcaagatgtggagactggcacccagctggaaaaactgatggagaacatgcgcagtgacatctccagccaccctcctgttgagggtctacgcccacgccggggagagttctgcattgccaaatttgtagatggagaatggtaccgcgcccgggtagaaaaagaggagtcccctgccaaagtgcatgtcttctacatcgactatggcaatagagagatcctgccatccacccgcctggccctaccacctgccttcagcactcgcgtgttgccagctcaagccacagagtatgccttcgccttcatccagtggccccaagatgaggacgctcgcacagatgctgtgacagtgtgtgcggacatccaaaacactcagtgcctgctcaacgtggagcacctgagtgccagctgcccccatgtcactctgcagtttgcggattccaaaggtgatgtggggctgggcctggtgaaggaaggactcgtcatggtagaagttcggaaggagaagcagttccagaaagtgatcacagagtacctgaatgcccaggaatcagccaagagtgccaggctgaacctgtggcgctatggcgacttccgagctgacgatgctgatgagtttggctacagtcgctaaggagaacttgcctggctcccagcaccgatgatgccagaccttctccctctgccaggaagccgttttcaactccagacctggtcgggggagtatagattgggtccagcttgcttcagacagaaacctcctctgtcgcgggtagcattggagctggggtggagagcccaaggcttgctggggcagacccctcagtggtactgccgtccagtctctcccagatgattttgtatttttatttaattgtcttcaaatcaggaaagaaccatgaaagactgtgtgttagtgaagggtataatcgtgacacagaggcagctgtcagctggcacccacctctcccccagaccacccttcttcccaagctctgtccaagtgttgattatgtgacttctgatacatccgttctcaaattccagtgtgcccatatctgcccccacaccagcctgttctgtatttaaagcttttgagacccaataaaatagtacctgctgtctgcaaaaaaa

SEQ ID NO: 8999 - protein, 880 aa, Rattus norvegicus
  ref <308>: DATABASE ACCESSION NUMBER: SWISS-Prot / AAB41439
  ref <309>: DATABASE ENTRY DATE: 2003-02-01
MVLSGCAMIVRGLPRGTAPERQINLSNIRAGNLDTRRRAATQPDGKDTPDEPWAFPAREFLRKKLIGKEVCFTIENKTPQGREYGMIYLGKDTNGENIAESLVAEGLAPGESMRANNPEQNRLSECEEQAKASKKGMWSEGTGHTHPDLKYTIENPRHFVDSHHQKPVNAIIEHVRDGSVVRALLLPDHYLVTVMLSGIKCPTFRRETDGSETPEPFAAEAKFFTESRLLQRDVQIILESCHNQNILGTILHPNGNITELLLKEGFARCVDWSIAVYTRGAEKLRAAERFAKERRLRIWRDYVPPTANLDQKDKQFVAKVMQVLNADAIVVKLSSGDYKTIHLSSIRPPRLEGDNIQDKNKKLRPLYDIPYMFEAREFLRKKLIGKKVSVTVDYIRPASPATETVPAFSERTCATVTIGGINITEALVSKGLATVIRYRQDDDQRSSHYDELLAAEARAIKNGKGLHSKKEVPIHRVADISGDTQKAKQFLPFLQRAGRSEAVVEYVFSGSRLKLYLPKETCLITFLLAGIECPRGARNLPGLVQEGEPFSEEATLFTKELVLQREVEVEVESMDKAGNFIGWLHMDGANLSVLLVEHALSKVHFTAERSGYYKPLLSAEEAAKQRKEKVWAHYEEQPVEEVMPVLEEKERSASYKPVFVTEITDDLHFYVQDVETGTQLEKLMENMRSDISSHPPVEGLRPRRGEFCIAKFVDGEWYRARVEKEESPAKVHVFYIDYGNREILPSTRLALPPAFSTRVLPAQATEYAFAFIQWPQDEDARTDAVTVCADIQNTQCLLNVEHLSASCPHVTLQFADSKGDVGLGLVKEGLVMVEVRKEKQFQKVITEYLNAQESAKSARLNLWRYGDFRADDADEFGYSR

SEQ ID NO: 9000 - DNA, 714 bp, Homo sapiens
  ref <308>: DATABASE ACCESSION NUMBER: EMBL / BG542891
  ref <309>: DATABASE ENTRY DATE: 2001-04-04
gaggctcttgtcagcaaaggtctagccacagtgatcagataccggcaggatgatgaccagagatcatcacactacgatgaactgcttgctgcagaggccagagctattaagaatggcaaaggattgcatagcaagaaggaagtgcctatccaccgtgttgcagatatatctggggatacccaaaaagcaaagcagttcctgccttttcttcagcgggcaggtcgttctgaagctgtggtggaatacgtcttcagtggttctcgtctcaaactctatttgccaaaggaaacttgccttatcaccttcttgcttgcaggcattgaatgccccagaggagcccgaaacctcccaggcttggtgcaggaaggagagcccttcagcgaggaagctacacttttcaccaaggaactggtgctgcagcgagaggtctgggcccactatgaggagcagcccgtggaggaggtgatgccagtgctggaggagaaggagcgatctgctagctacaagcccgtgtttgtgaccgagatcactgatgacctgcacttctacgtgcaggatgtggagaccggcacccagttggagaagctgatggagaacatgcgcaatgacattgccagtcacccccctgtagagggctccctatgccccccgcaggggagagttctgattgcaaatttgtcgatggagaatggtaccgtgcccgagtagagaaag

SEQ ID NO: 9001 - protein, 914 aa, Homo sapiens
  ref <308>: DATABASE ACCESSION NUMBER: Refseq / XP_011618
  ref <309>: DATABASE ENTRY DATE: 2002-08-01
MASSAQSGGSSGGPAVPTVQRGIIKMVLSGCAIIVRGQPRGGPPPERQINLSNIRAGNLARRAAATQPDAKDTPDEPWAFPAREFLRKKLIGKEVCFTIENKTPQGREYGMIYLGKDTNGENIAESLVAEGLATRREGMRANNPEQNRLSECEEQAKAAKKGMWSEGNGSHTIRDLKYTIENPRHFVDSHHQKPVNAIIEHVRDGSVVRALLLPDYYLVTVMLSGIKCPTFRREADGSETPEPFAAEAKFFTESRLLQRDVQIILESCHNQNILGTILHPNGNITELLLKEGFARCVDWSIAVYTRGAEKLRAAERFAKERRLRIWRDYVAPTANLDQKDKQFVAKVMQVLNADAIVVKLNSGDYKTIHLSSIRPPRLEGENTQDKNKKLRPLYDIPYMFEAREFLRKKLIGKKVNVTVDYIRPASPATETVPAFSERTCATVTIGGINIAEALVSKGLATVIRYRQDDDQRSSHYDELLAAEARAIKNGKGLHSKKEVPIHRVADISGDTQKAKQFLPFLQRAGRSEAVVEYVFSGSRLKLYLPKETCLITFLLAGIECPRGARNLPGLVQEGEPFSEEATLFTKELVLQREVEVEVESMDKAGNFIGWLHIDGANLSVLLVEHALSKVHFTAERSSYYKSLLSAEEAAKQKKEKVWAHYEEQPVEEVMPVLEEKERSASYKPVFVTEITDDLHFYVQDVETGTQLEKLMENMRNDIASHPPVEGSYAPRRGEFCIAKFVDGEWYRARVEKVESPAKIHVFYIDYGNREVLPSTRLGTLSPAFSTRVLPAQATEYAFAFIQVPQDDDARTDAVDSVVRDIQNTQCLLNVEHLSAGCPHVTLQFADSKGDVGLGLVKEGLVMVEVRKEKQFQKVITEYLNAQESAKSARLNLWRYGDFRADDADCPRPSSLSNC

SEQ ID NO: 9002 - DNA, 3166 bp, Rattus norvegicus; identical to SEQ ID NO: 8998
  ref <308>: DATABASE ACCESSION NUMBER: EMBL / U83883
  ref <309>: DATABASE ENTRY DATE: 2000-03-04

SEQ ID NO: 9003 - protein, 880 aa, Rattus norvegicus; identical to SEQ ID NO: 8999
  ref <308>: DATABASE ACCESSION NUMBER: SWISS-Prot / AAB41439
  ref <309>: DATABASE ENTRY DATE: 2003-02-01

SEQ ID NO: 9004 - DNA, 714 bp, Homo sapiens; identical to SEQ ID NO: 9000
  ref <308>: DATABASE ACCESSION NUMBER: EMBL / BG542891
  ref <309>: DATABASE ENTRY DATE: 2001-04-04

SEQ ID NO: 9005 - protein, 914 aa, Homo sapiens; identical to SEQ ID NO: 9001
  ref <308>: DATABASE ACCESSION NUMBER: Refseq / XP_011618
  ref <309>: DATABASE ENTRY DATE: 2002-08-01

SEQ ID NO: 9006 - DNA, 1399 bp, Rattus norvegicus
  ref <308>: DATABASE ACCESSION NUMBER: EMBL / U83895
  ref <309>: DATABASE ENTRY DATE: 2001-10-24
gcgagctggtgtctggcaggacgcgggctgcgggaggtcagtggcggtcggtggccggagtcggtcgccggcaccatggaggacgatgacagctatgtccccagtgacctgactgcagaggagcgtcaagaactggagaacatccggcggaggaagcaggagctgctggctgacatccagaggctgaaggaagagatagcagaggttgctaatgaaattgaaagcctgggatccacagaggaacggaaaaacatgcagaggaacaaacaggtagccatgggcagaaagaaattcaacatggatcctaagaaggggatccagttcttaatcgagaatggcctgctgaaaaacacttgtgaggacattgcccagttcctgtataaaggggaagggctcaacaaaacagccatcggtgactaccttggggagagagatgagttcagcatccaggtcttgcatgcatttgtggagctgcacgagttcaccgacctgaacctcgtccaggccttgcggcagttcctgtggagcttccggctccctggagaggcccagaagattgaccggatgatggaggcctttgcgcagcggtactgtcagtgcaatactggggtgttccagtctacagacacttgctatgtcctgtcctttgcaatcatcatgctgaacaccagcctacacaaccccaacgtcaaagacaagcctacggtggagaggttcatcgccatgaaccgaggcatcaatgacggaggagacctgcccgaggagctgctgcggaatctctatgagagcatcaaaaacgaaccctttaaaatcccagaagatgacggcaatgatctcactcacactttcttcaatccagaccgagagggctggctactaaagctcggaggtggcagggtaaagacttggaagaggcgctggttcattctgactgacaactgcctttactactttgaatacaccacggacaaagagccccgcgggatcatccccctggagaacctgagtatccgagaggtggaagactccaagaagccgaactgctttgagctttatatccctgacaataaagaccaggtgattaaggcctgcaagacagaggctgacggacgagtggtggaagggaaccacactgtgtaccgcatctcggcccccactcctgaggagaaggaagactggatcaagtgcatcaaagccgccatcagcagagacccgttctacgagatgcttgcagcacggaaaaagaaggtctcctccacaaagaggcactgagggtgcaccagggcacggccagcccgtgaagctgtggccccttctcctgcctcccctgagggcgctgtggagcccagcagaggagagcagagggcttctctgccagttcctgcccactccgctccta

SEQ ID NO: 9007 - protein, 398 aa, Rattus norvegicus
  ref <308>: DATABASE ACCESSION NUMBER: SWISS-Prot / P97694
  ref <309>: DATABASE ENTRY DATE: 2001-10-16
MEDDDSYVPSDLTAEERQELENIRRRKQELLADIQRLKEEIAEVANEIESLGSTEERKNMQRNKQVAMGRKKFNMDPKKGIQFLIENGLLKNTCEDIAQFLYKGEGLNKTAIGDYLGERDEFSIQVLHAFVELHEFTDLNLVQALRQFLWSFRLPGEAQKIDRMMEAFAQRYCQCNTGVFQSTDTCYVLSFAIIMLNTSLHNPNVKDKPTVERFIAMNRGINDGGDLPEELLRNLYESIKNEPFKIPEDDGNDLTHTFFNPDREGWLLKLGGGRVKTWKRRWFILTDNCLYYFEYTTDKEPRGIIPLENLSIREVEDSKKPNCFELYIPDNKDQVIKACKTEADGRVVEGNHTVYRISAPTPEEKEDWIKCIKAAISRDPFYEMLAARKKKVSSTKRH

SEQ ID NO: 9008 - DNA, 3311 bp, Homo sapiens
  ref <308>: DATABASE ACCESSION NUMBER: Refseq / NM_004762
  ref <309>: DATABASE ENTRY DATE: 2001-02-03
gcgagcgggggcgcgggtggcgcggcgggacgcgagcggcgagccggagcgcgagcccgctcccgcaccatggaggaggacgacagctacgttcccagtgacctgacagcagaggagcgtcaagaactggagaacatccgacggagaaaacaggagctgctggctgacattcagaggctgaaggatgagatagcagaagtagctaatgaaattgaaaacctgggatccacagaggaaaggaaaaacatgcagaggaacaaacaggtagccatgggcaggaaaaaatttaatatggaccctaaaaaggggatccagttcttaatagagaacgacctcctgaagaacacttgtgaagacattgcccagttcttatataaaggcgaagggctcaacaagacagccatcggcgactacctaggggagagagatgagtttaatatccaggttcttcatgcatttgtggagctgcatgagttcactgatcttaatctcgtccaggcactacggcagttcctgtggagcttccggctacccggagaggcccagaagatcgaccggatgatggaggcgtttgcccagcgatattgtcagtgcaataatggcgtgttccagtccacggatacttgttacgtcctctcctttgccatcatcatgttgaacaccagtctgcacaaccccaatgtcaaagataagcccactgtggagaggttcattgccatgaaccgaggcatcaatgatgggggagacctgccggaggagctcctccggaatctctatgagagcataaaaaatgaaccctttaaaatcccagaagacgacgggaatgacctcactcacactttcttcaatccagaccgagaaggctggctattgaaactcggaggtggcagggtaaagacttggaagagacgctggttcattctgactgacaactgcctttactactttgagtataccacggataaggagccccgtggaatcatccctttagagaatctgagtatccgggaagtggaggactccaaaaaaccaaactgctttgagctttatatccccgacaataaagaccaagttatcaaggcctgcaagaccgaggctgacgggcgggtggtggaggggaaccacactgtttaccggatctcagctccgacgcccgaggagaaggaggagtggattaagtgcattaaagcagccatcagcagggaccctttctacgaaatgctcgcagcacggaaaaagaaggtctcctccacgaagcgacactgagcgtgcagccaagggcgttggtctgcgggggccttggagctcctgctcttctcccgcacctccatggatgcactgctgccgagcagagcgtcctctgccaggccccgccctggattcctagagactagcttcagcttttgctattttttttaagtgggagaagggtgggcagttatcactggggaagagaggaccggccacctgtccagcatgggctccagagccttcctctctcacagggcagagctcttgtcggcagggcagcctcctggccagtttctctgctcagtgttctggtagcagagctcagagccaactgtttacctcttggttgtccccgtgaagaagccttcaaaccctgcaccataaatacatgtgtccatatattattatatgttaagagaaaaaggtggaaaggaagagaagccacatactataaagatctattttttttttttaagagagaacgtagggctgttcaggtgcattctgccctggctgcgctggggagcttctccctggagaagagcacctggggctgcggccaaggggcatcagcctgggcccgcggcagggcctggcctgcctctcctgtgctgtgggagctcgctgcctggtgcttgtcttggcgagatggacaggtgaggtcgaggacgcagagggcagaggcccagtggagcctcagacggcacagtcagagtcgggggcctgcctggccggggtcgcagtcggcagcagcgtgcagtccggcatctcccgcggatgcttttccatcccaagtgcctgcggagcccgaggagaggagagagctgactggacgcttacgttattttcctccttcagaatccaagttcttgttgggctttaaagtagaaagtcagcattttccttgagctaaatacctaataaccaaaactgtgaggaaggttatcgggacagaggttccggataacctgtttcattttgggttttcttcctcttccccagactccagtcctcgttctagaggaaggagtaggacttccccgatccccgtagcttcagctttttctgcctcaaaaccagccctaactggactactctggatgcattttgtggtgggccccctagagggaagatgggcctttatctgctccgtggggtgcactggagtgaggggggtggccgggctgcctctcgcatctctgtcttcccctgcaggcgctgtgtgagctggccctgcccctcctcattacagtatgaagggagccgtgacacgcagcattttcctgccgttctctcagggactctcagggcagctcctgccactccgccagggccagcatgccagtccaggcagagcaggtggctggctgtctggccgtctcgccccgcccctccacaggaccctggaccagggcggtgcagggcgcagccccgaggaggcaggtggaggagctgcgggttttcacagggccgcgtcgccacggctcctctgatcctttagggttggcgagcatctctggaaatagcttttgcagaggagtggtgggaggaatagagggggacagtctgtcacctccctccccgccactttgtgtagatcctacctggagggaatggctttaggcacttttgtgccagagcttgtgagggtgacagaagagggtccaggctggaaacctgaactttctgggtgggagaaccaggtggtgcctgccgaggtctgggcgtgtttgggccggtgctggagcctgtccagctggcccgggccctggcctggttctcaagtgtttcctagacagagaggcacctgggtcagtattagtctatttatcagaggtgtaaataatctatgtatagtttttctccttttagattattttgtatttgtttaaaagaagttttgtcaaaatacaaaaatataaagaaatgactgaaagttgttgacagggtttttaagaaataattattctaattgtttttgtttgtttgtttttgccttgtaaactagcgccaaggaactgcagcaaataaactccaactctgcccaagcaaaaaaaaaa

SEQ ID NO: 9009 - protein, 398 aa, Homo sapiens
  ref <308>: DATABASE ACCESSION NUMBER: SWISS-Prot / Q15438
  ref <309>: DATABASE ENTRY DATE: 2001-10-16
MEEDDSYVPSDLTAEERQELENIRRRKQELLADIQRLKDEIAEVANEIENLGSTEERKNMQRNKQVAMGRKKFNMDPKKGIQFLIENDLLKNTCEDIAQFLYKGEGLNKTAIGDYLGERDEFNIQVLHAFVELHEFTDLNLVQALRQFLWSFRLPGEAQKIDRMMEAFAQRYCQCNNGVFQSTDTCYVLSFAIIMLNTSLHNPNVKDKPTVERFIAMNRGINDGGDLPEELLRNLYESIKNEPFKIPEDDGNDLTHTFFNPDREGWLLKLGGGRVKTWKRRWFILTDNCLYYFEYTTDKEPRGIIPLENLSIREVEDSKKPNCFELYIPDNKDQVIKACKTEADGRVVEGNHTVYRISAPTPEEKEEWIKCIKAAISRDPFYEMLAARKKKVSSTKRH

SEQ ID NO: 9010 - DNA, 1561 bp, Rattus norvegicus
  ref <308>: DATABASE ACCESSION NUMBER: EMBL / U83896
  ref <309>: DATABASE ENTRY DATE: 2001-10-24
gcgggccccaccggccgggcggttgggccgtgaagggagagtcttttcggcgctgaggacgggcgctgaggaggcggcggtggctcctggggcgtttgagcgggctcactcgagcccgcgggccgacgcggacgcaggcccagccggcggaaacgccccggactccccgcgggccttcctagccgccatggaggacggtgtctacgagcccccagacttgactccagaggagcgcatggagctggagaacatccgtcggcgaaagcaggagctgctggtggagatccagcgcctccgggaagagctaagtgaagctatgagcgaagtggagggtctggaggccaatgagggcagtaagaccttgcagcggaaccggaagatggcaatgggccggaagaaattcaacatggaccccaaaaaggggatccaattcttggtggagcatgaacttctacagaacacacctgaggaaattgcccgcttcctgtacaagggcgaggggctgaacaagacagccattggggactacctaggggaaagggaagagctgaacctgtctgtgctccatgcttttgtggatctacatgagttcaccgacctcaatctggttcaggccctccggcaattcctgtggagctttcgcctccctggagaggctcagaaaattgaccgaatgatggaggcctttgcccagagatattgcttatgtaatcccggggtcttccagtccacagacacctgctacgtgttgtccttcgctgtgatcatgctgaacaccagccttcacaatcccaatgtcagggacaagccgggcctggagcgctttgtggccatgaaccgaggcatcaatgagggtggggacctgcctgaggaccttctcaggaacctctatgacagcatccgaaacgagcccttcaaaatccctgaggatgatgggaatgatctcacccacaccttcttcaacccagaccgagagggctggctcctaaagctgggagggggccgggtgaagacttggaagcgtcgctggttcatcctcacagacaactgcctctactactttgagtacactacggacaaggagcccagagggatcatccccctagagaacctgagcattcgtgaggtggatgatcctcggaagccgaactgctttgagctttacattcccaacaataagggacagctcatcaaagcctgcaaaacggaggctgatggtcgggtagtagaggggaaccacatggtgtaccgaatctcagcacccacacaggaggagaaagacgagtggatcaagtccatccaggctgctgtaagcgtggaccccttctacgagatgttggcagcaagaaagaagcggatttctgtgaagaagaagcaagaacaaccctgaccctgtccccaactccattatttattttggagctgccccgcctgggtggcaggacccctgggccctggggctgtggatcctggttccctgtttggaaaatcaccacctctagctcctgactccttatttgtaattaacatgttggtaatcttattaattatttaacccctc

SEQ ID NO: 9011 - protein, 400 aa, Rattus norvegicus
  ref <308>: DATABASE ACCESSION NUMBER: SWISS-Prot / P97695
  ref <309>: DATABASE ENTRY DATE: 2001-10-16
MEDGVYEPPDLTPEERMELENIRRRKQELLVEIQRLREELSEAMSEVEGLEANEGSKTLQRNRKMAMGRKKFNMDPKKGIQFLVEHELLQNTPEEIARFLYKGEGLNKTAIGDYLGEREELNLSVLHAFVDLHEFTDLNLVQALRQFLWSFRLPGEAQKIDRMMEAFAQRYCLCNPGVFQSTDTCYVLSFAVIMLNTSLHNPNVRDKPGLERFVAMNRGINEGGDLPEDLLRNLYDSIRNEPFKIPEDDGNDLTHTFFNPDREGWLLKLGGGRVKTWKRRWFILTDNCLYYFEYTTDKEPRGIIPLENLSIREVDDPRKPNCFELYIPNNKGQLIKACKTEADGRVVEGNHMVYRISAPTQEEKDEWIKSIQAAVSVDPFYEMLAARKKRISVKKKQEQP

SEQ ID NO: 9012 - DNA, 311 bp, Homo sapiens
  misc_feature (1)..(311): n=a, c, g or t
  ref <308>: DATABASE ACCESSION NUMBER: EMBL / AA371941
  ref <309>: DATABASE ENTRY DATE: 2000-03-08
ctgcccctgcgcacccctccctgtgcccaccctgtttctntngcctgcggctcttgggggtgctccattctcccgccttcccttctcctgcacctggtcctgcctgctttctcgctgtctgccccaggaggtaggtacacgacctgtctttgtctcccaccccttccctttcagggggccgggtgaagacgtggaagcggcgctggtttatcctcacagacaactgcctctactactttgagtacaccacggacaaggagccccgaggaatcatccccctgggagaaatctgaggcattccgagaaggtgg

SEQ ID NO: 9013 - protein, 400 aa, Homo sapiens
  ref <308>: DATABASE ACCESSION NUMBER: SWISS-Prot / Q99418
  ref <309>: DATABASE ENTRY DATE: 2002-06-15
MEDGVYEPPDLTPEERMELENIRRRKQELLVEIQRLREELSEAMSEVEGLEANEGSKTLQRNRKMAMGRKKFNMDPKKGIQFLVENELLQNTPEEIARFLYKGEGLNKTAIGDYLGEREELNLAVLHAFVDLHEFTDLNLVQALRQFLWSFRLPGEAQKIDRMMEAFAQRYCLCNPGVFQSTDTCYVLSFAVIMLNTSLHNPNVRDKPGLERFVAMNRGINEGGDLPEELLRNLYDSIRNEPFKIPEDDGNDLTHTFFNPDREGWLLKLGGGRVKTWKRRWFILTDNCLYYFEYTTDKEPRGIIPLENLSIREVDDPRKPNCFELYIPNNKGQLIKACKTEADGRVVEGNHMVYRISAPTQEEKDEWIKSIQAAVSVDPFYEMLAARKKRISVKKKQEQP

SEQ ID NO: 9014 - DNA, 1081 bp, Rattus norvegicus
  ref <308>: DATABASE ACCESSION NUMBER: EMBL / U84410
  ref <309>: DATABASE ENTRY DATE: 2001-05-16
gcttggaacggtacgcgaagaaaagtgaccatggacaacaacgaaacctccgtggattcaaaatccattaataattttgaaacaaagactatccatggaagcaagtcgatggactctggaatatatctggacagcagttacaaaatggattaccctgaaatgggcttgtgtataataattaataataagaacttccataaaagcactggaatgtcagctcgcaatggtaccgatgtcgatgcagctaacctcagagagacattcatggccctgaaatacgaagtcaggaataaaaatgaccttactcgtgaagaaattatggaattgatggatagtgtttctaaggaagatcacagcaaaaggagcagttttgtgtgtgtgattctaagtcatggagatgaaggagtaatttttggaacgaacggacctgtggacctgaaaaaactaactagtttcttcagaggcgactactgccggagtctgactggaaagccgaaactcttcatcattcaggcctgccgaggtacagagctggactgcggtattgagacagacagtggaactgacgatgatatggcatgccagaagataccagtgggggccgacttcctgtatgcttactctaccgcacccggttactattcctggagaaattcaagggacgggtcatggttcatccagtcactttgcgccatgctgaaactgtacgcgcacaagctggaattcatgcacatcctcactcgtgttaaccggaaggtggccatggaatttgagtccttctccctggacgccactttccacgcaaagaaacagatcccgtgtattgtgtcaatgctcacaaaagaactgtacttttatcactaaaggaatgactgggagtggggtaggggcatgtttctgttttggtttttttttggtttttggtttgttttttttttttttatttgaatgccaaatgagaaaactgtcagggagactttttttttcccctctcatttaaatcaaatccgatgttccaggtcgtcattgaacaataccactgcctgcaatgcagccacaatacaatacctcagctttgata

SEQ ID NO: 9015 - protein, 277 aa, Rattus norvegicus
  ref <308>: DATABASE ACCESSION NUMBER: SWISS-Prot / P55213
  ref <309>: DATABASE ENTRY DATE: 2002-06-15
MDNNETSVDSKSINNFETKTIHGSKSMDSGIYLDSSYKMDYPEMGLCIIINNKNFHKSTGMSARNGTDVDAANLRETFMALKYEVRNKNDLTREEIMELMDSVSKEDHSKRSSFVCVILSHGDEGVIFGTNGPVDLKKLTSFFRGDYCRSLTGKPKLFIIQACRGTELDCGIETDSGTDDDMACQKIPVEADFLYAYSTAPGYYSWRNSRDGSWFIQSLCAMLKLYAHKLEFMHILTRVNRKVATEFESFSLDATFHAKKQIPCIVSMLTKELYFYH

SEQ ID NO: 9016 - DNA, 834 bp, Homo sapiens
  ref <308>: DATABASE ACCESSION NUMBER: EMBL / U26943
  ref <309>: DATABASE ENTRY DATE: 1999-07-02
atggagaacactgaaaactcagtggattcaaaatccattaaaaatttggaaccaaagatcatacatggaagcgaatcaatggactctggaatatccctggacaacagttataaaatggattatcctgagatgggtttatgtataataattaataataagaattttcataaaagcactggaatgacatctcggtctggtacagatgtcgatgcagcaaacctcagggaaacattcagaaacttgaaatatgaagtcaggaataaaaatgatcttacacgtgaagaaattgtggaattgatgcgtgatgtttctaaagaagatcacagcaaaaggagcagttttgtttgtgtgcttctgagccatggtgaagaaggaataatttttggaacaaatggacctgttgacctgaaaaaaataacaaactttttcagaggggatcgttgtagaagtctaactggaaaacccaaacttttcattattcaggcctgccgtggtacagaactggactgtggcattgagacagacagtggtgttgatgatgacatggcgtgtcataaaataccagtggaggccgacttcttgtatgcatactccacagcacctggttattattcttggcgaaattcaaaggatggctcctggttcatccagtcgctttgtgccatgctgaaacagtatgccgacaagcttgaatttatgcacattcttacccgggttaaccgaaaggtggcaacagaatttgagtccttttcctttgacgctacttttcatgcaaagaaacagattccatgtattgtttccatgctcacaaaagaactctatttttatcactaa

SEQ ID NO: 9017 - protein, 277 aa, Homo sapiens
  ref <308>: DATABASE ACCESSION NUMBER: SWISS-Prot / P42574
  ref <309>: DATABASE ENTRY DATE: 2002-06-15
MENTENSVDSKSIKNLEPKIIHGSESMDSGISLDNSYKMDYPEMGLCIIINNKNFHKSTGMTSRSGTDVDAANLRETFRNLKYEVRNKNDLTREEIVELMRDVSKEDHSKRSSFVCVLLSHGEEGIIFGTNGPVDLKKITNFFRGDRCRSLTGKPKLFIIQACRGTELDCGIETDSGVDDDMACHKIPVDADFLYAYSTAPGYYSWRNSKDGSWFIQSLCAMLKQYADKLEFMHILTRVNRKVATEFESFSFDATFHAKKQIPCIVSMLTKELYFYH

SEQ ID NO: 9018 - DNA, 678 bp, Rattus norvegicus
  ref <308>: DATABASE ACCESSION NUMBER: EMBL / U86635
  ref <309>: DATABASE ENTRY DATE: 2000-10-27
atgtcgtgctccaagtctatggttctgggttactgggatatccgcgggctggctcatgccatccgtatgctcctggagtttactgataccagctatgaagagaaacagtacacgtgtggggaagctcctgactatgatagaagccaatggctggacgtgaaattcaagctagatctggattttcctaacctgccctaccttatggacgggaagaacaagatcacccagagtaacgccatcttgcggtacatcgcacgcaagcacaacatgtgtggtgacaccgaagaagaaaagattcgagtggacatcatggagaaccagataatggacttccgcatgcagctggttcggctctgctacaattctaaccacgaaagcctgaagcctcagtatttggaacaactgcctgcacagctgaaacagttctcgttgttcctggggaaattcacatggtttgcaggagaaaagctgaccttcgtggattttctcacttatgacgtcttggaccagaatcgtatgtttgagcccaagtgcctggatgagttcccaaatctgaaggctttcatgtgccgttttgaggctttggagaagattgctgcattcctgcagtctgaccgctgcttcaagatgccaatcaacaacaagatggccaagtggggtaacaagagcatatgctga

SEQ ID NO: 9019 - protein, 217 aa, Rattus norvegicus
  ref <308>: DATABASE ACCESSION NUMBER: PIR / A29036
  ref <309>: DATABASE ENTRY DATE: 1999-06-18
PMTLGYWDIRGLAHAIRLLLEYTDSSYEEKRYTMGDAPDFDRSQWLNEKFKLGLDFPNLPYLIDGSHKITQSNAILRYLGRKHNLCGETEEERIRVDILENQLMDNRMVLARLCYNPDFEKLKPGYLEQLPGMMRLYSEFLGKRPWFAGDKITFVDFIAYDVLERNQVFEATCLDAFPNLKDFIARFEGLKKISDYMKSSRFLPRPLFTKMAIWGSK

SEQ ID NO: 9020 - DNA, 1286 bp, Homo sapiens
  ref <308>: DATABASE ACCESSION NUMBER: EMBL / BC000088
  ref <309>: DATABASE ENTRY DATE: 2001-07-13
ggcacgaggcggaagcccgtcaccatgtcgtgcgagtcgtctatggttctcgggtactgggatattcgtgggctggcgcacgccatccgcctgctcctggagttcacggatacctcttatgaggagaaacggtacacgtgcggggaagctcctgactatgatcgaagccaatggctggatgtgaaattcaagctagacctggactttcctaatctgccctacctcctggatgggaagaacaagatcacccagagcaatgccatcttgcgctacatcgctcgcaagcacaacatgtgtggtgagactgaagaagaaaagattcgagtggacatcatagagaaccaagtaatggatttccgcacacaactgataaggctctgttacagctctgaccacgaaaaactgaagcctcagtacttggaagagctacctggacaactgaaacaattctccatgtttctggggaaattctcatggtttgccggggaaaagctcacctttgtggattttctcacctatgatatcttggatcagaaccgtatatttgaccccaagtgcctggatgagttcccaaacctgaaggctttcatgtgccgttttgaggctttggagaaaatcgctgcctacttacagtctgatcagttctgcaagatgcccatcaacaacaagatggcccagtggggcaacaagcctgtatgctgagcaggaggcagacttgcagagcttgttttgtttcatcctgtccgtaaggggtcagcgctcttgctttgctcttttcaatgaatagcacttatgttactggtgtccagctgagtttctcttgggtataaaggctaaaagggaaaaaggatatgtggagaatcatcaagatatgaattgaatcgctgcgatactggcatttccctactccccaactgagttcaagggctgtaggttcatgcccaagccctgagagtgggtactagaaaaaacgagattgcacagttggagagagcaggtgtgttaaatgggactggagtccctgtgaagactgggtgaggataacacaagtaaaactgtggtactgatggacttaaccggagttcggaaaccgtcctgtgtacacatgggagtttagtgtgataaaggcagtatttcagactggtgggctagccaatagagttgggacaattgcttactcattaaaaataatagagccccacttgacactattcactaaaattaatctggaatttaaggcccaacattaaacacaaagctgttgaaataaaaaaaaaaaaaaaaaa

SEQ ID NO: 9021 - protein, 224 aa, Homo sapiens
  ref <308>: DATABASE ACCESSION NUMBER: SWISS-Prot / P21266
  ref <309>: DATABASE ENTRY DATE: 2002-06-15
SCESSMVLGYWDIRGLAHAIRLLLEFTDTSYEEKRYTCGEAPDYDRSQWLDVKFKLDLDFPNLPYLLDGKNKITQSNAILRYIARKHNMCGETEEEKIRVDIIENQVMDFRTQLIRLCYSSDHEKLKPQYLEELPGQLKQFSMFLGKFSWFAGEKLTFVDFLTYDILDQNRIFDPKCLDEFPNLKAFMCRFEALEKIAAYLQSDQFCKMPINNKMAQWGNKPVC

SEQ ID NO: 9022 - DNA, 678 bp, Rattus norvegicus; identical to SEQ ID NO: 9018
  ref <308>: DATABASE ACCESSION NUMBER: EMBL / U86635
  ref <309>: DATABASE ENTRY DATE: 2000-10-27

SEQ ID NO: 9023 - protein, 217 aa, Rattus norvegicus; identical to SEQ ID NO: 9019
  ref <308>: DATABASE ACCESSION NUMBER: PIR / A29036
  ref <309>: DATABASE ENTRY DATE: 1999-06-18

SEQ ID NO: 9024 - DNA, 1286 bp, Homo sapiens; identical to SEQ ID NO: 9020
  ref <308>: DATABASE ACCESSION NUMBER: EMBL / BC000088
  ref <309>: DATABASE ENTRY DATE: 2001-07-13

SEQ ID NO: 9025 - protein, 224 aa, Homo sapiens; identical to SEQ ID NO: 9021
  ref <308>: DATABASE ACCESSION NUMBER: SWISS-Prot / P21266
  ref <309>: DATABASE ENTRY DATE: 2002-06-15

SEQ ID NO: 9026 - DNA, 678 bp, Rattus norvegicus; identical to SEQ ID NO: 9018
  ref <308>: DATABASE ACCESSION NUMBER: EMBL / U86635
  ref <309>: DATABASE ENTRY DATE: 2000-10-27

SEQ ID NO: 9027 - protein, 217 aa, Rattus norvegicus; identical to SEQ ID NO: 9019
  ref <308>: DATABASE ACCESSION NUMBER: PIR / A29036
  ref <309>: DATABASE ENTRY DATE: 1999-06-18

SEQ ID NO: 9028 - DNA, 1286 bp, Homo sapiens; identical to SEQ ID NO: 9020
  ref <308>: DATABASE ACCESSION NUMBER: EMBL / BC000088
  ref <309>: DATABASE ENTRY DATE: 2001-07-13

SEQ ID NO: 9029 - protein, 224 aa, Homo sapiens; identical to SEQ ID NO: 9021
  ref <308>: DATABASE ACCESSION NUMBER: SWISS-Prot / P21266
  ref <309>: DATABASE ENTRY DATE: 2002-06-15

SEQ ID NO: 9030 - DNA, 2838 bp, Rattus norvegicus
  misc_feature (1)..(2838): n=a, c, g or t
  ref <308>: DATABASE ACCESSION NUMBER: EMBL / U87306
  ref <309>: DATABASE ENTRY DATE: 2000-03-04
atgagggcccggagcggggcgcggggcgcgctgctgctggcgctgctgctctgctgggatccgacaccgagcttagcaggcattgactctggtggccaggcactcccagactccttcccatcagcacccgcggagcagctgcctcacttcctgctggaaccagaggatgcctacatcgtaaagaacaagccagtggaattgcactgccgagccttccctgccacacagatctacttcaagtgtaatggcgagtgggttagccagaaaggccacgtcacgcaggagagcctggatgaggccacaggcttgcgaatacgagaggtgcagatagaggtgtcgcggcagcaggtggaggaactttttgggctcgaggactactggtgtcagtgcgtggcctggagctcttcgggaaccaccaagagtcgccgagcctacatccgcattgcctacttgcgcaagaactttgaccaggagcctctggcgaaggaggtacccttggatcatgaggtccttctgcagtgccgcccaccagagggagtgcctgtggctgaggtggaatggctcaagaatgaagatgtcatcgatcccgctcaggacactaacttcctgctcaccattgaccacaacctcatcatccgccaggcgcgcctctcagacacagccaactacacctgtgtggcaaagaatattgtggccaagcgccggagcacgacggccacagtcatcgtctatgtgaacggaggttggtccagctgggcagaatggtcaccctgctctaaccgctgcggccgaggttggcagaaacgtactaggacctgcaccaacccagccccactcaatggaggtgccttctgcgagggacaggcttgccagaagacggcttgcaccaccgtgtgcccagtggatggagcgtggactgagtggagcaagtggtccgcctgcagcacagagtgtgcgcactggcgcagccgcgagtgcatggcaccgccgccccagaacggaggccgtgactgcagcgggacgctacttgactccaagaactgcaccgatgggctgtgcgtgctgaatcagagaactctaaacgaccctaaaagccgccccctggagccgtcgggagacgtggcgctgtatgcgggcctcgtggtggccgtctttgtggttctggcagttctcatggctgtaggagtgatcgtgtaccggagaaactgccgggacttcgacacggacatcactgactcctctgctgccctcactggtggtttccaccccgtcaacttcaagactgcaaggcccagcaacccacagctcctgcacccatccgcccctccggacctaacggccagtgctggcatctaccgcggacctgtgtatgccctgcaggactctgccgacaagatccctatgactaattcaccccttctggatcccttgcccagcctcaagatcaaggtctatgactccagcaccatcggctctggggctggcctggctgatggagccgacctgctgggtgtcttaccacccggtacatacccaggcgatttctcccgggacacccacttcctgcacctgcgcagcgccagccttggttcccagcacctcctgggcctccctcgagaccccagcagcagtgtcagtggcacctttggttgcctgggtgggaggctgaccattcccggcacaggggtcagcctgttggtaccaaatggagccattccccagggcaagttctatgacttgtatctacgtatcaacaagactgaaagcaccctcccactttcggaaggttcccagacagtattgagcccctcggtgacctgcgggcccacgggcctcctcctgtgccgccctgttgtcctcactgtgccccactgtgctgaagtcattgccggagactggatcttccagctcaagacccaggcccatcagggccactgggaggaggtggtgactttggatgaggagactctgaacaccccctgctactgccagctagaggctaaatcctgccacatcctgttggaccagctgggtacctacgtgttcacgggcgagtcctactcccgctccgcagtcaagcggctccagctagccatcttcgccccagccctctgcacctccctggagtatagtctcagggtctactgtctggaggacactcctgcagcactgaaggaggtcctagagctggagaggactctgggtggctacttggtggaggagcccaagactttgctctttaaggacagttaccacaacctacgnctctccctccatgacatcccccatgcccactggaggagcaaactactggccaagtaccaggagattcccttctaccatgtgtggaacggcagccagaaagccctgcactgcactttcaccctggagagacatagcctagcctccactgagttcacctgtaaggtctgcgtgcggcaggtagaaggggaaggccagattttccagctgcacaccacgctggctgagacgcctgctggctccctggatgcactctgctctgcccctggcaatgctgccaccacacagctgggaccctatgccttcaagataccactgtccatccgccagaagatctgcaacagcctggacgcccccaactcacggggcaatgactggcggctgttggcacagaagctctccatggaccggtacctgaactacttcgccaccaaagctagtcccacaggcgtgatcttagacctctgggaagctcggcagcaggatgatggggacctcaacagcctggccagtgccttggaggagatgggcaagagtgagatgctggtagccatgaccactgatggcgattgctga

SEQ ID NO: 9031 - protein, 945 aa, Rattus norvegicus
  ref <308>: DATABASE ACCESSION NUMBER: SWISS-Prot / AAB57679
  ref <309>: DATABASE ENTRY DATE: 2003-02-01
MRARSGARGALLLALLLCWDPTPSLAGIDSGGQALPDSFPSAPAEQLPHFLLEPEDAYIVKNKPVELHCRAFPATQIYFKCNGEWVSQKGHVTQESLDEATGLRIREVQIEVSRQQVEELFGLEDYWCQCVAWSSSGTTKSRRAYIRIAYLRKNFDQEPLAKEVPLDHEVLLQCRPPEGVPVAEVEWLKNEDVIDPAQDTNFLLTIDHNLIIRQARLSDTANYTCVAKNIVAKRRSTTATVIVYVNGGWSSWAEWSPCSNRCGRGWQKRTRTCTNPAPLNGGAFCEGQACQKTACTTVCPVDGAWTEWSKWSACSTECAHWRSRECMAPPPQNGGRDCSGTLLDSKNCTDGLCVLNQRTLNDPKSRPLEPSGDVALYAGLVVAVFVVLAVLMAVGVIVYRRNCRDFDTDITDSSAALTGGFHPVNFKTARPSNPQLLHPSAPPDLTASAGIYRGPVYALQDSADKIPMTNSPLLDPLPSLKIKVYDSSTIGSGAGLADGADLLGVLPPGTYPGDFSRDTHFLHLRSASLGSQHLLGLPRDPSSSVSGTFGCLGGRLTIPGTGVSLLVPNGAIPQGKFYDLYLRINKTESTLPLSEGSQTVLSPSVTCGPTGLLLCRPVVLTVPHCAEVIAGDWIFQLKTQAHQGHWEEVVTLDEETLNTPCYCQLEAKSCHILLDQLGTYVFTGESYSRSAVKRLQLAIFAPALCTSLEYSLRVYCLEDTPAALKEVLELERTLGGYLVEEPKTLLFKDSYHNLRLSLHDIPHAHWRSKLLAKYQEIPFYHVWNGSQKALHCTFTLERHSLASTEFTCKVCVRQVEGEGQIFQLHTTLAETPAGSLDALCSAPGNAATTQLGPYAFKIPLSIRQKICNSLDAPNSRGNDWRLLAQKLSMDRYLNYFATKASPTGVILDLWEARQQDDGDLNSLASALEEMGKSEMLVAMTTDGDC

SEQ ID NO: 9032 - DNA, 1948 bp, Homo sapiens
  ref <308>: DATABASE ACCESSION NUMBER: EMBL / AK022859
  ref <309>: DATABASE ENTRY DATE: 2002-08-06
ctagcgatttcgcccgggacacccacttcctgcacctgcgcagcgccagcctcggttcccagcagctcttgggcctgccccgagacccagggagcagcgtcagcggcacctttggctgcctgggtgggaggctcagcatccccggcacaggggtcagcttgctggtgcccaatggagccattccccagggcaagttctacgagatgtatctactcatcaacaaggcagaaagtaccctcccgctttcagaagggacccagacagtattgagcccctcggtgacctgtggacccacaggcctcctgctgtgccgccccgtcatcctcaccatgccccactgtgccgaagtcagtgcccgtgactggatctttcagctcaagacccaggcccaccagggccactgggaggaggtggtgaccctggatgaggagaccctgaacacaccctgctactgccagctggagcccagggcctgtcacatcctgctggaccagctgggcacctacgtgttcacgggcgagtcctattcccgctcagcagtcaagcggctccagctggccgtcttcgcccccgccctctgcacctccctggagtacagcctccgggtctactgcctggaggacacgcctgtagcactgaaggaggtgctggagctggagcggactctgggcggatacttggtggaggagccgaaaccgctaatgttcaaggacagttaccacaacctgcgcctctccctccatgacctcccccatgcccattggaggagcaagctgctggccaaataccaggagatccccttctatcacatttggagtggcagccagaaggccctccactgcactttcaccctggagaggcacagcttggcctccacagagctcacctgcaagatctgcgtgcggcaagtggaaggggagggccagatattccagctgcataccactctggcagagacacctgctggctccctggacactctctgctctgcccctggcagcactgtcaccacccagccgggaccttatgccttcaagatcccactgtccatccgccagaagatatgcaacagcctagatgcccccaactcacggggcaatgactggcggatgttagcacagaagctctctatggaccggtacctgaattactttgccaccaaagcgagccccacgggtgtgatcctggacctctgggaagctctgcagcaggacgatggggacctcaacagcctggcgagtgccttggaggagatgggcaagagtgagatgctggtggctgtggccaccgacggggactgctgagcctcctgggacagcgggctggcagggactggcaggaggcaggtgcagggaggcctggggcagcctcctgatggggatgtttggcctctgcttcctcccagttcacagccagagttgcctctcctcctcctcttccccaacccccagaccatgaccagccttagaaaatccatgtactctgttgttagagggcccagagttccttctccacccccgctctctctctcttggcctgagatctctgtgcaggaaccaagatggggctgaagcctctggaggcagttggttgggggcgggcaggcaggaggccctccctccacccccccaccctcagcccggcaacttctgggttccatgggttttagttccgttctcgttttcttcctccgttattgatttctcctttctccctaagcccccttctgcttccacgcccttttcctctttgaagagtcaagtacaattcagacaaactgctttctcctgtccaaaagcaaaaaggcaaaggaaagaaagaaagcttcagaccgctagtaaggctcaaagaagaagaaaaacaccaaaaccacaagggaaaagaaaaacccagtttcttaggaaacgcaaacgatttattatccagattatttggataagtccttttt

SEQ ID NO: 9033 - protein, 931 aa, Homo sapiens [sequence omitted]

SEQ ID NO: 9034 - DNA, 770 bp, Rattus norvegicus
  ref <308>: DATABASE ACCESSION NUMBER: EMBL / U87971
  ref <309>: DATABASE ENTRY DATE: 1998-01-07
gtacgtgtaggtgacgtggcggctccagttctttggtccggcttccactgcttacaagtccggcgaggaggcggcaacgacctgaggagagtagcggtggcggtaggcaacagaagagtccgaggttatgcgactcgatgatcccgcggaaacgctacggatctaagaacacggatcagggtgtctacctgggtctctcaaagacacaggttctgtcccctgcaactgctatcaatagcagcagtgacatcgctcctttgcccaccccggtggccctggtcccctcccctcccgacactatgtcctgccgggatcggacccaggagttcctgtctgcctgcaagtcgctgcagagccgtcagaatggaatccaaacaaataaaccagctctgcacgctacccggcagtgcagcgagtttaccctcatggccaggcgcattgggaaagatctcagcaatacatttgccaagctggagaagctaacaatcctggcaaagcgcaagtccctctttgatgataaagcagtagaaattgaggaactaacatacatcatcaaacaggacatcaatagcctcaacaaacaaattgctcagcttcaagattttgtgagggccaagggcagccagagtggccggcatctgcagacccattccaacaccattgtagtttcattgcagtcaaaactggcttccatgtccaatgacttcaagtctgttttggaagtgaggactgaaaatctgaaacagcagaggaaccgtcgggaacagttc

SEQ ID NO: 9035 - protein, 211 aa, Rattus norvegicus
  ref <308>: DATABASE ACCESSION NUMBER: SWISS-Prot / AAB93844
  ref <309>: DATABASE ENTRY DATE: 2002-10-01
MIPRKRYGSKNTDQGVYLGLSKTQVLSPATAINSSSDIAPLPTPVALVPSPPDTMSCRDRTQEFLSACKSLQSRQNGIQTNKPALHATRQCSEFTLMARRIGKDLSNTFAKLEKLTILAKRKSLFDDKAVEIEELTYIIKQDINSLNKQIAQLQDFVRAKGSQSGRHLQTHSNTIVVSLQSKLASMSNDFKSVLEVRTENLKQQRNRREQF

SEQ ID NO: 9036 - DNA, 1507 bp, Homo sapiens; identical to SEQ ID NO: 3016
  ref <308>: DATABASE ACCESSION NUMBER: Refseq / NM_003164
  ref <309>: DATABASE ENTRY DATE: 2002-05-14

SEQ ID NO: 9037 - protein, 301 aa, Homo sapiens; identical to SEQ ID NO: 3017
  ref <308>: DATABASE ACCESSION NUMBER: SWISS-Prot / Q13190
  ref <309>: DATABASE ENTRY DATE: 2002-06-15

SEQ ID NO: 9038 - DNA, 770 bp, Rattus norvegicus; identical to SEQ ID NO: 9034
  ref <308>: DATABASE ACCESSION NUMBER: EMBL / U87971
  ref <309>: DATABASE ENTRY DATE: 1998-01-07

SEQ ID NO: 9039 - protein, 211 aa, Rattus norvegicus; identical to SEQ ID NO: 9035
  ref <308>: DATABASE ACCESSION NUMBER: SWISS-Prot / AAB93844
  ref <309>: DATABASE ENTRY DATE: 2002-10-01

SEQ ID NO: 9040 - DNA, 1507 bp, Homo sapiens; identical to SEQ ID NO: 3016
  ref <308>: DATABASE ACCESSION NUMBER: Refseq / NM_003164
  ref <309>: DATABASE ENTRY DATE: 2002-05-14

SEQ ID NO: 9041 - protein, 301 aa, Homo sapiens; identical to SEQ ID NO: 3017
  ref <308>: DATABASE ACCESSION NUMBER: SWISS-Prot / Q13190
  ref <309>: DATABASE ENTRY DATE: 2002-06-15

SEQ ID NO: 9042 - DNA, 1614 bp, Rattus norvegicus
  ref <308>: DATABASE ACCESSION NUMBER: EMBL / U88958
  ref <309>: DATABASE ENTRY DATE: 2000-03-04
tactctctcgctctctttctgtctcttcctcgctccctctctttctctcctccctctgccttcccagtgcataaagtctctgtcgctcccggaacttgttggcaatgcctatttttcagctttcccccgcgttctctaaactaactatttaaaggtctgcggtcgcaaatggtttgactaaacgtaggatgggacttaagttgaacggcagatatatttcactgatcctcgcggtgcaaatagcttacctggtgcaggccgtgagagcagcaggcaagtgcgatgcagtctttaagggcttttcagactgtttgctcaagctgggtgacagcatggccaactacccgcagggcctggacgacaagacgaacatcaagaccgtgtgcacatactgggaggatttccacagctgcacggtcacagctcttacggattgccaggaaggggcgaaagatatgtgggataaactgagaaaagaatcgaaaaacctcaatatccaaggcagcttattcgaactctgcggcagcggcaacggggcggcggggtccctgctcccggcgctttccgtgctcctggtgtctctctcggcagctttagcgacctggctttccttctgagcacggggccgggtcccccctccgctcacccacccacactcactccatgctcccggaaatcgagaggaagagccattcgttctctaaggacgttgtgattctctgtgatattgaaaacactcatatgggattgtgggaaatcctgtttctctctttttttttttttaatttttttttattttggttgagtccttgtgttttagttgccaaatgttaccgatcagtgagcaaagcaagcacagccaaaatcggacctcaccttaagtccgtcttcacacaaaaataagaaaacggcaaactcacccccatttttaattttgtttttaattttacttacttatttatttatttattttttggcaaaagaatctcaggaatggccctgggccacctactatattaatcatgttgataacatgaaaaatgatgggctcctcctaatgagaaagcgaggagaggagaaggccaggggaatgagctcaagagtgatgcccacgtggggagcatctggtgaataatcgctcacgtctttcttccacagtaccttgttttgatcatttccacagcacatttctcctccagaaacgcgaaaaacacaagcgtgtgggttctgcatttttaaggataagagagagaaagaggttgggtatagtaggacaggttgtcagaagagatgctgctatggtcacgaggggccggtttcacctgctattgtcgtcgcctccttcagttccactgcctttatgtcccctcctctctcttgttttagctgttacacatacagtaatacctgaatatccaacggtatagttcacaagggggtaatcaatgttaaatctaaaatagaatttaaaaaaaaaagattttgacataaaagagccttgattttaaaaaaaaagagagagatgtaatttaaaaagtttattataaattaaattcagcaaaaatttgctacaaagtatagagaagtataaaataaaagttattgtttgaaaaa

SEQ ID NO: 9043 - protein, 142 aa, Rattus norvegicus
  ref <308>: DATABASE ACCESSION NUMBER: SWISS-Prot / AAB53415
  ref <309>: DATABASE ENTRY DATE: 2001-12-01
MGLKLNGRYISLILAVQIAYLVQAVRAAGKCDAVFKGFSDCLLKLGDSMANYPQGLDDKTNIKTVCTYWEDFHSCTVTALTDCQEGAKDMWDKLRKESKNLNIQGSLFELCGSGNGAAGSLLPALSVLLVSLSAALATWLSF

SEQ ID NO: 9044 - DNA, 1589 bp, Homo sapiens
  ref <308>: DATABASE ACCESSION NUMBER: EMBL / AF136631
  ref <309>: DATABASE ENTRY DATE: 2000-04-07
gtctcttcctcgctccctctctttctctcctccctctgccttcccagtgcataaagtctctgtcgctcccggaacttgttggcaatgcctattttttggctttcccccgcgttctctaaactaactatttaaaggtctgcggtcgcaaatggtttgactaaacgtaggatgggacttaagttgaacggcagatatatttcactgatcctcgcggtgcaaatagcgtatctggtgcaggccgtgagagcagcgggcaagtgcgatgcggtcttcaagggcttttcggactgtttgctcaagctgggcgacagcatggccaactacccgcagggcctggacgacaagacgaacatcaagaccgtgtgcacatactgggaggatttccacagctgcacggtcacagcccttacggattgccaggaaggggcgaaagatatgtgggataaactgagaaaagaatccaaaaacctcaacatccaaggcagcttattcgaactctgcggcagcggcaacggggcggcggggtccctgctcccggcgttcccggtgctcctggtgtctctctcggcagctttagcgacctggctttccttctgagcgtggggccagctccccccgcgcgcccacccacactcactccatgctcccggaaatcgagaggaagatccattagttctttggggacgttgtgattctctgtgatgctgaaaacactcatataggattgtgggaaatcctgattctcttttttatttcgtttgatttcttgtgttttatttgccaaatgttaccaatcagtgagcaagcaagcacagccaaaatcggacctcagctttagtccgtcttcacacacaaataagaaaacggcaaacccaccccattttttaattttattattattaattttttttgttggcaaaagaatctcaggaacggccctgggccacctactatattaatcatgctagtaacatgaaaaatgatgggctcctcctaataggaaggcgaggagaggagaaggccaggggaatgaattcaagagagatgtccacggccgaaacatacggtgaataattcacgctcacgtcgttcttccacagtatcttgttttgatcatttccactgcacatttctcctcaagaaaagcgaaaggacagactgttggctttgtgtttggaggataggagggagagagggaaggggctgaggaaatctctggggtaagagtaaaggcttccagaagacatgctgctatggtcactgaggggttagctttatctgctgttgttgatgcatccgtccaagttcactgcctttattttccctcctccctcttgttttagctgttacacacacagtaatacctgaatatccaacggtatagatcacaagggggggatgttaaatgttaatctaaaatatagctaaaaaaagattttgacataaaagagccttgattttaaaaaaaaaagagagagagatgtaatttaaaaagtttattataaattaaattcagcaaaaaaagatttgctacaaagtatagagaagtataaaataaaagttattgtttgaaaaaaaaaaaaaaaaaa

SEQ ID NO: 9045 - protein, 142 aa, Homo sapiens
  ref <308>: DATABASE ACCESSION NUMBER: Refseq / NP_057672
  ref <309>: DATABASE ENTRY DATE: 2002-11-05
MGLKLNGRYISLILAVQIAYLVQAVRAAGKCDAVFKGFSDCLLKLGDSMANYPQGLDDKTNIKTVCTYWEDFHSCTVTALTDCQEGAKDMWDKLRKESKNLNIQGSLFELCGSGNGAAGSLLPAFPVLLVSLSAALATWLSF

SEQ ID NO: 9046 - DNA, 1614 bp, Rattus norvegicus; identical to SEQ ID NO: 9042
  ref <308>: DATABASE ACCESSION NUMBER: EMBL / U88958
  ref <309>: DATABASE ENTRY DATE: 2000-03-04

SEQ ID NO: 9047 - protein, 142 aa, Rattus norvegicus; identical to SEQ ID NO: 9043
  ref <308>: DATABASE ACCESSION NUMBER: SWISS-Prot / AAB53415
  ref <309>: DATABASE ENTRY DATE: 2001-12-01

SEQ ID NO: 9048 - DNA, 1589 bp, Homo sapiens; identical to SEQ ID NO: 9044
  ref <308>: DATABASE ACCESSION NUMBER: EMBL / AF136631
  ref <309>: DATABASE ENTRY DATE: 2000-04-07

SEQ ID NO: 9049 - protein, 142 aa, Homo sapiens; identical to SEQ ID NO: 9045
  ref <308>: DATABASE ACCESSION NUMBER: Refseq / NP_057672
  ref <309>: DATABASE ENTRY DATE: 2002-11-05

SEQ ID NO: 9050 - DNA, 1624 bp, Rattus norvegicus
  ref <308>: DATABASE ACCESSION NUMBER: EMBL / U88986
  ref <309>: DATABASE ENTRY DATE: 1997-12-19
tcataggaagaattcattctttagagtaaaatggagcgccgctttttgccaggggccccagcccctctgtttttaccctgtcagaagttagaatgtcactaagaagtgaggcccgggtgaacacttctacactgcagaagatcgccgcagatatgagcaacctgatagaaaatctcgacacccgggaacttcattttgagggagaggaggtggagtatgatgcatctccaggagaccccacggctcaggaagcgtgcatcccattctcttctatttacaacactcaaggatttaaggagcccaacatccagatctacctctctggctgtcctgtaaaagcacaagtactggaagtggagcgcttcacgtcgacctcgaggatgccaagtgtcaacctgtacaccatcgagttaacacacggggaattcacatggcaagttaagaggaaattcaagcacttccaagagtttcatagagagctcctcaagtacaaagccttcatccggatccccattcccaccaaaagacatacgtttagaagacaaaatgtcaaagaagagcccagagaaatgcccagtctgccccgttcatcagaaaatgcaatccaggaggagcagttctttggcaggaggaagcaactggaagattacttgacaaaaatactaaaaatgcccatgtacagaaactatcatgccacgacagagttccttgatgtaagccaactgtcttttatccatgatttgggaccaaagggcctggaaggaatgatcatgaaaagatctgggggacacaggataccaggtgtgaattgctgtggccatggaagagcctgctaccggtggtcaaagaggtggttgatagtgaaagactctttcctgctgtatatgaaaccagacagcggggcgatcgccttcgtccttcttgtagacaaagaattcagaatcaaagtgggaaagaaggagacagaaacgaaatatggacttcgaattgataatctttcaaggacactgattttaaaatgtaacagctacagacatgcccggtggtggggaggcgccatcgaggagttcatccagaagcacggcactgacttcctcaaagaccatcgcttcggctcctacgctgcggtccacgagaacattttagctaaatggtacgtgaacgccaaaggttactttgaagatatcgcaaacgcaatggaaggggcaacggaagagatttttatcacagattggtggttaagtccagaaatcttcctgaagcgcccagtggtggaaggcaaccgctggaggctggactgcatcctcaaacggaaagcacaacaaggtgtgcggattttcataatgctttacaaagaggtggagctagccctcgggatcaacagcgagtacaccaagcggactttgatgcggctgcaccccaacataaaggtgatgagacacccagaccatgtgtcctccagtgtgtatctgtgggctcatcacgagaagctcgtcattatcgaccaatcggtggcgtttgtgggtgggattgacctggcctatggacggtgggatgacaatgagcacagactcacagatgtgggcagtgtcaagcgggtcacctcaggacagtctctgggctc

SEQ ID NO: 9051 - DNA, 3609 bp, Homo sapiens
  ref <308>: DATABASE ACCESSION NUMBER: EMBL / U38545
  ref <309>: DATABASE ENTRY DATE: 2000-03-04
ggcacgaggagccctgagagtccgccgccaacgcgcaggtgctagcggccccttcgccctgcagcccctttgcttttactctgtccaaagttaacatgtcactgaaaaacgagccacgggtaaatacctctgcactgcagaaaattgctgctgacatgagtaatatcatagaaaatctggacacgcgggaactccactttgagggagaggaggtagactacgacgtgtctcccagcgatcccaagatacaagaagtgtatatccctttctctgctatttataacactcaaggatttaaggagcctaatatacagacgtatctctccggctgtccaataaaagcacaagttctggaagtggaacgcttcacatctacaacaagggtaccaagtattaatctttacactattgaattaacacatggggaatttaaatggcaagttaagaggaaattcaagcattttcaagaatttcacagagagctgctcaagtacaaagcctttatccgcatccccattcccactagaagacacacgtttaggaggcaaaacgtcagagaggagcctcgagagatgcccagtttgccccgttcatctgaaaacatgataagagaagaacaattccttggtagaagaaaacaactggaagattacttgacaaagatactaaaaatgcccatgtatagaaactatcatgccacaacagagtttcttgatataagccagctgtctttcatccatgatttgggaccaaagggcatagaaggtatgataatgaaaagatctggaggacacagaataccaggcttgaattgctgtggtcagggaagagcctgctacagatggtcaaaaagatggttaatagtgaaagattcctttttattgtatatgaaaccagacagcggtgccattgccttcgtcctgctggtagacaaagaattcaaaattaaggtggggaagaaggagacagaaacgaaatatggaatccgaattgataatctttcaaggacacttattttaaaatgcaacagctatagacatgctcggtggtggggaggggctatagaagaattcatccagaaacatggcaccaactttctcaaagatcatcgatttgggtcatatgctgctatccaagagaatgctttagctaaatggtatgttaatgccaaaggatattttgaagatgtggcaaatgcaatggaagaggcaaatgaagagatttttatcacagactggtggctgagtccagaaatcttcctgaaacgcccagtggttgagggaaatcgttggaggttggactgcattcttaaacgaaaagcacaacaaggagtgaggatcttcataatgctctacaaagaggtggaactcgctcttggcatcaatagtgaatacaccaagaggactttgatgcgtctacatcccaacataaaggtgatgagacacccggatcatgtgtcatccaccgtctatttgtgggctcaccatgagaagcttgtcatcattgaccaatcggtggcctttgtgggagggattgacctggcctatggaaggtgggacgacaatgagcacagactcacagacgtgggcagtgtgaagcgggtcacttcaggaccgtctctgggttccctcccacctgccgcaatggagtctatggaatccttaagactcaaagataaaaatgagcctgttcaaaacctacccatccagaagagtattgatgatgtggattcaaaactgaaaggaataggaaagccaagaaagttctccaaatttagtctctacaagcagctccacaggcaccacctgcacgacgcagatagcatcagcagcattgacagcacctccagttattttaatcactatagaagtcatcacaatttaatccatggtttaaaaccccacttcaaactctttcacccgtccagtgagtctgagcaaggactcactagacctcatgctgataccgggtccatccgtagtttacagacaggtgtgggagagctgcatggggaaaccagattctggcatggaaaggactactgcaatttcgtcttcaaagactgggttcaacttgataaaccttttgctgatttcattgacaggtactccacgccccggatgccctggcatgacattgcctctgcagtccacgggaaggcggctcgtgatgtggcacgtcacttcatccagcgctggaacttcacaaaaattatgaaatcaaaatatcggtccctttcttatccttttctgcttccaaagtctcaaacaacagcccatgagttgagatatcaagtgcctgggtctgtccatgctaacgtacagttgctccgctctgctgctgattggtctgctggtataaagtaccatgaagagtccatccacgccgcttacgtccatgtgatagagaacagcaggcactatatctatatcgaaaaccagtttttcataagctgtgctgatgacaaagttgtgttcaacaagataggcgatgccattgcccagaggatcctgaaagctcacagggaaaaccagaaataccgggtatatgtcgtgataccacttctgccagggttcgaaggagacatttcaaccggcggaggaaatgctctacaggcaatcatgcacttcaactacagaaccatgtgcagaggagaaaattccatccttggacagttaaaagcagagcttggtaatcagtggataaattacatatcattctgtggtcttagaacacatgcagagctcgaaggaaacctagtaactgagcttatctatgtccacagcaagttgttaattgctgatgataacactgttattattggctctgccaacataaatgaccgcagcatgctgggaaagcgtgacagtgaaatggctgtcattgtgcaagatacagagactgttccttcagtaatggatggaaaagagtaccaagctggccggtttgcccgaggacttcggctacagtgctttagggttgtccttggctatcttgatgacccaagtgaggacattcaggatccagtgagtgacaaattcttcaaggaggtgtgggtttcaacagcagctcgaaatgctacaatttatgacaaggttttccggtgccttcccaatgatgaagtacacaatttaattcagctgagagactttataaacaagcccgtattagctaaggaagatcccattcgagctgaggaggaactgaagaagatccgtggatttttggtgcaattccccttttatttcttgtctgaagaaagcctactgccttctgttgggaccaaagaggccatagtgcccatggaggtttggacttaagagatattcattggcagctcaaagacttccaccctggagaccacactgcacacagtgacttcctggggatgtcatagccaaagccaggcctgacgcattctcgtatccaacccaaggaccttttggaatgactggggagggctgcagtcacattgatgtaaggactgtaaacatcagcaagactttataattccttctgcctaacttgtaaaaagggggctgcattcttgttggtagcatgtactctgttgagtaaaacacatattcaaattccgctcgtgccgaattc

SEQ ID NO: 9052 - protein, 1074 aa, Homo sapiens
  ref <308>: DATABASE ACCESSION NUMBER: SWISS-Prot / Q13393
  ref <309>: DATABASE ENTRY DATE: 2002-06-15
MSLKNEPRVNTSALQKIAADMSNIIENLDTRELHFEGEEVDYDVSPSDPKIQEVYIPFSAIYNTQGFKEPNIQTYLSGCPIKAQVLEVERFTSTTRVPSINLYTIELTHGEFKWQVKRKFKHFQEFHRELLKYKAFIRIPIPTRRHTFRRQNVREEPREMPSLPRSSENMIREEQFLGRRKQLEDYLTKILKMPMYRNYHATTEFLDISQLSFIHDLGPKGIEGMIMKRSGGHRIPGLNCCGQGRACYRWSKRWLIVKDSFLLYMKPDSGAIAFVLLVDKEFKIKVGKKETETKYGIRIDNLSRTLILKCNSYRHARWWGGAIEEFIQKHGTNFLKDHRFGSYAAIQENALAKWYVNAKGYFEDVANAMEEANEEIFITDWWLSPEIFLKRPVVEGNRWRLDCILKRKAQQGVRIFIMLYKEVELALGINSEYTKRTLMRLHPNIKVMRHPDHVSSTVYLWAHHEKLVIIDQSVAFVGGIDLAYGRWDDNEHRLTDVGSVKRVTSGPSLGSLPPAAMESMESLRLKDKNEPVQNLPIQKSIDDVDSKLKGIGKPRKFSKFSLYKQLHRHHLHDADSISSIDSTSSYFNHYRSHHNLIHGLKPHFKLFHPSSESEQGLTRPHADTGSIRSLQTGVGELHGETRFWHGKDYCNFVFKDWVQLDKPFADFIDRYSTPRMPWHDIASAVHGKAARDVARHFIQRWNFTKIMKSKYRSLSYPFLLPKSQTTAHELRYQVPGSVHANVQLLRSAADWSAGIKYHEESIHAAYVHVIENSRHYIYIENQFFISCADDKVVFNKIGDAIAQRILKAHRENQKYRVYVVIPLLPGFEGDISTGGGNALQAIMHFNYRTMCRGENSILGQLKAELGNQWINYISFCGLRTHAELEGNLVTELIYVHSKLLIADDNTVIIGSANINDRSMLGKRDSEMAVIVQDTETVPSVMDGKEYQAGRFARGLRLQCFRVVLGYLDDPSEDIQDPVSDKFFKEVWVSTAARNATIYDKVFRCLPNDEVHNLIQLRDFINKPVLAKEDPIRAEEELKKIRGFLVQFPFYFLSEESLLPSVGTKEAIVPMEVWT

SEQ ID NO: 9053 - DNA, 8216 bp, Rattus norvegicus
  ref <308>: DATABASE ACCESSION NUMBER: EMBL / U89282
  ref <309>: DATABASE ENTRY DATE: 2000-03-04
gagctccgcccctccccttgcccagcctcgccccttcgcctctctagggtgttggtttcctttcagttctctttcttcaacctatccactggctgacctaggccggtttctgctccttgttgcggagaaccaacgcgcccctcactgtgcacagcttttccagtcccgagcgcaggcacatagagattgtgctgccgctatggagaaactctgtggttatgtgcctgtccacccagacatcctctccttgaagaatcggtgcctgaccatgctctctgacatccaacccctggagaaaatacatggacagagatctgtcaacccagacatcctgtccttggagaaccggtgcctgaccttgctccctgatctccagcccatggagaaaatacatggacagagatctgtccacccagacatcctctcctcagagaaccggtgtctgaccttgctccctgacctccagtccctggagaagctatgtggacatatgtctagtcacccagacgtcctctctttggagaaccgatgtcttgctaccctcccgactgtaaagagaactgtttcgagtggccccttgctccagtgtcttcacagatctcatacggcacaagctgatctgcgtgacccgaactttcgcaactgcctgttccctgagcctcctaccatagaggctccatgtttcttgaaggaactagaccttccaactggacccagggccctgaaatccatgtctgctacagctcgagttcaggaagtagctttgggtcagcggtgcgtctcagaaggaaaggaattgcaggaagaaaaagaaagcgcagaagtcccgatgcctttgtacagtctaagcttggggggagaagaagaagaagtggtgggggcaccggtcctaaaactcacatctggagactctgactctcaccctgaaaccactgaccagatcctgcaggagaagaagatggctctcttgaccttgctgtgctcagctatggcctcaagtgtgaatgtgaaagatgcctccgatcctacccgggcatctatccatgaagtctgcagtgcgctggcccccttggaacctgagttcatccttaaggcatctttgtatgctaggcagcagcttaacctccgggacatagccaatatagtgttggccgtggctgccctcttgccagcctgccgcccccatgtacgacggtattactctgccattgttcacctgccttcagactggatccaggtagccgagttctaccagagcctggcagaaggggatgagaagaagttggtgcccctgcctgcctgcctccgtgctgccatgactgacaaatttgcccagtttgatgagtaccagctagcgaagtacaacccacggaaacaccgatccaagacacgttcccgccagccaccccgccctcaaaggacaaaacctccattttcagagagtgggaaatgttttccaaagagcgtttggccccttaaaaacgaacagatttcgttcgaagcagcttataatgcagtgtcagagaagaaaaggctaccaaggttcactctgaagaagttggtagagcaactgcatatccatgagcctgcgcagcatgtccaggccctgctgggctacaggtacccatccaccctagagctcttttctcggagtcatctccctgggccatgggactctagcagggctgggcaacggatgaagctccaaaggccagagacctgggagcgggagctgagcttacgtggaaacagagcttctgtgtgggaggaactcatagacaatgggaaactccccttcatggccatgctccggaacctgtgtaacctgctgcggactgggatcagtgcccaccaccatgaactcgttctccagagactccagcatgagaaatctgtgattcacagtcggcagtttccattcagattccttaatgctcacgactctctcgatagactcgaggctcagctcagaagtaaagcatcgcccttcccttccaatacaacattgatgaagcggataatgattagaaactcaaaaaaaatcaagagacctgccaacccgaggtacctgtgcaccctgacgcagcggcagcttcgggcggcaatggctatcccggtgatgtatgagcatctcaagcgggagaaactgaggctgcacaaggccagacagtggacctgtgaccttgagttgctggagcggtatcgccaggccctggaaacggccgtgaacatctctgtaaagcacaacctacccccgctgccaggccgaaccctcttggtctatctcacagatgcaaatgccaacagactttgtcccaagagtcacttgcaagggcctcccctgaactatgtgctgctgttgatcgggatgatgatggctcgggcggagcagacgacagtttggctgtgtgggacaggaactgtgaagacaccagtacttacagccgacgaaggtatcctgaagactgccatcaaacttcaggctcaagtccaggagttagaagaaaatgatgagtggcccctggaaacttttgagaagtacctgctatctctggctgtgcgaaggacccctattgacagggtcatcctgttcggccaaaggatggatacggagctgctgaatgtagccaaacagattatctggcagcatgtgaattccaagtgcctcttcgtcagtgtcctcctacggaaaatgcagtacatgtcaccaaatttgaatcccaatgatgtgacgctctcgggctgcactgacgggatcctgaagttcattgcggagcatggagcctctcgtcttctggaacatgtgggccaactagataagatattcaagatccctccacccccaggaaagacaaaggtctcacctctccggccgctggaggagaacaaccctggtcccttcgttcctatttcccagcatggatggcgcaacatccggcttttcatttcgtccactttccgagacatgcatggggaacgagacttgctgatgcgatctgttctgccagcgctgcaggcccgagcgttcccccaccgcatcagccttcacgccattgacctgcgctggggaatcacggaggaagagacccgcaggaacagacaactggaagtgtgccttggggaggtggagaactctcagctgttcgtggggatcctgggctcccgctatggctatactccccccagctatgatctgcctgaccacccccactttcactggacccagcgatacccttcggggcgctctgtaacagagatggaggtgatgcagttcctgaaccgtggccaacgctcggaaccctctgaccaagctctcatctacttccgagatcctggtttccttagctctgtgccagatgtctggaaacctgactttatttccgagtcagaagaggctgcacatcgggtctcagaactgaagagattcctacaggaacagaaagaggttacctgccgcaggtactcctgtgaatggggaggcgtagcagccggccggccctatactgggggcctggaggagtttggacagttggttctccaagatgtgtggagcgtgatccagaagcgttacctgcagcctggggcccagttggagcagccaggatccatctcagaagaggatttgatccaggccagctttcagcagctgaagagcccaccgagtcccgcacggccacgccttcttcaggataccgtgcaacagctgatgctgccccacgggaggctgagcctagtgattgggcaggcaggacagggaaagactgccttcctggcatcccttgtgtcggccctgaaggttcccgaccagcccaatgtggccccgttcgttttcttccacttttcagcagcccgccctgaccagtgtcttgctttcaacctcctcagacgcctctgtacccatctgcatcaaaaactgggagagccgagcgctctccccagcacttacagaggcctggtgtgggaactgcagcagaagctgctcctcaaatctgcccagtggctgcaaccaggccagactttggtccttattatcgacggggcagataagttggtggaccataatggacagctgatttcagactggatccccaagtctcttccgcggcgagtacacctggtgctgagtgtgtctagtgactcaggcctgggagagacccttcagcaaagtcagagtgcttatgtggtggccttggggtctttggtcccgtcttcaagggctcagcttgtgagagaagagctagcactgtatgggaaacggctggaggagtcaccttttaacaaccagatgcggctgctgctggcaaagcaggggtcaagcctgccactgtacctgcacctcgtcactgactacctgaggcttttcacactgtacgaacaggtgtctgagagacttcgaaccctgcccgccactctcccactgctgctgcagcacatcctgagcaccttggagcaagagcatggccataacgtccttcctcaagctttgactgcccttgaggtcacgcacagtggtctgactgtggaccagctgcatgcagtcctgagcacgtggttgactttgcccaaggagactaagagctgggaagaggcagtggctgccagtcacagtggaaacctctaccccttggctccatttgcctaccttgtccagagtctacgcagtttactaggcgagggccccgtggagcgccctggcgcccgtctctgcctctctgatgggcctctgaggacagcagttaaacgtcgctatgggaaaaggctggggctagagaagactgcgcatgtcctcattgcagctcacctctggaagatgtgtgaccctgatgcctcaggcaccttccgaagttgccctcccgaggctctgaaagatttaccttaccacctgctccagagcgggaaccatggtctccttgcaaagttccttaccaacctccatgtggtggctgcatatctggaagtgggtctagtcccggacctcttggaggcttacgagctctatgcttcttcaaagcctgaagtgaaccagaagctcccggaggcagatgttgctgtattccacaacttcctgaaacaacaggcttcactccttacccagtatcctttgctcctgctccagcaggcagctagccagcctgaagagtcacctgtttgctgccaggcccccctgctcacccagcggtggcacaaccagtgcatactgaaatggattaataaaccccagaccttgaagggtcagcaaagcttgtctctgccaatttcctcatccccaactgctgtggccttctctcctaatgggcaaagagcagctgtggggactgctggtgggacaatttacctgttgaacttgagaacctggcaggaggagaaggctctggtgagtggctgtgatgggatttcctctttcgcgttcctgtcagacactgctcttttccttaccaccttcgatgggctcctggagctttgggacctgcaacatggttgttgggtgttccagaccaaggcccaccagtaccaaatcactggctgctgcctgagcccagaccgccgcctgctggccaccgtgtgtttgggaggatacgtaaagctgtgggacacagtccagggccagctggctttccagtacacccatcccaagtctctaaactgcatcaccttccacccagaggggcaggtggtagccacaggcaactggtctggcatcgtgaccttcttccaggcagatggactcaaagtcaccaaggaactagggggcccaggaccctctgttcgtacgctggcattcagtgcacccgggaaggttgtggctctaggccggatagatgggacagtggagctgtgggcctggcaagagggcacacggctggcagccttccctgcacagtgtggcggtgtctccaccgttcttttcttgcatgctggaggccggttcctgacggctggggaagatggcaaggctcagttatggtcaggatttcttggccggcccaggggttgcctgggctctctttatctttctcctgcgctctctgtggctctcaacccagacggtgaccaggtggctgttgggtaccgaggagatggcattaaaatctacagaatttcttcaggtccccaggaggctcaatgccaagagctaaatgtggcggtgtctgcactggtctggctgagtcccagcgtcttggtgagtggtgcagaagatggctccctgcatggctggatgctcaggagaaactcccttcagtccctgtggctgtcatccgtgtgccagaagcctgtgctggggctggctgcctcccaggagttcttggcttctgcctcagaggacttcacggtgcgactgtggccaagacagctgctgacacagccacatgcagtagaagagttgccctgtgcggctgaactccggggacacgaggggccggtgtgctgctgtagcttcagcccggatggacgcatcttggccacagcgggcagggatcggaatctcctctgctgggacgtcaaggtagcccaagcccctctcctgattcacacgttctcgtcctgtcatcgagactggatcactggctgtacgtggaccaaagacaacatcctgatctcctgctctagtgatggctctgtgggactctggaacccagaggcaggacagcaacttggccagttcccaggtcaccagagtgccgtgagcgctgtggttgctgtggaggaacacattgtatctgtgagtcgggatgggaccttgaaagtgtgggaccgtcagggtgtggagctgaccagcatccctgcccattccggacccattagccagtgtgcggctgctctggaaccccgtccagctggacagcctggatcagagcttatggtggtgactgttggactggatggggccacaaagctgtggcatcccctgttggtgtgccaaatacataccctgcagggacacagtggtccagtcacagctgctgctgcttcagaggcctcaggcctcctgctgacctcagacaatagctctgtacgactctggcagatccctaaggaagcagatgatacctgcaaacctaggagttctgcggtcatcaccgctgtggcgtgggcaccagatggttctctggtggtgtctggaaatgaagctggggaactaacgctgtggcagaaagcgcaggctgtggctacggcacgggctccaggccgcgtcagtgacctgatctggtgctccgcaaatgcattctttgttctcagtgctaatgaaaatgtcagtgagtggcaagtggaactgaggaaaggttcaacatgcaccaatttcagactttatctgaagagagttctgcaggaggacttgggagtcttgacaggtatggccctggcgcctgacggccagtctctcattttgatgaaagaggatgtagaattgctacagatgaagcccgggtctactccatcttcgatctgcaggaggtatgcagtgcattcttctatactgtgcaccagcaaagactatggcctgttttacctgcagcagggaaactctggatctctttctatcttggagcaggaggagtcagggaagtttgaaaagaccctggacttcaatctgaacttaaataatcctaatgggtccccagtatcaatcactcaggctgaacctgagtctgggtcctcgcttttgtgtgctacctctgatgggatgctgtggaacttatctgagtgtaccccagaaggagagtgggtcgtagataacatctggcagaaaaaatcaagaaaccctaaaagtcgaactccggggacagattcgtccccaggcttattctgcatggatagctgggtagaacccacacatttaaaggcacggcagtgtaaaaagattcacttgggctctgtcacggccctccatgtgctgcccggattgctggtgactgcttcagaggacagagatgttaagctgtgggagagacccagtatgcagctgctcggcttgttccgatgtgaagggccggtgagctgtctggaaccttggatggagcccagctctcccctgcagcttgctgtgggagatgcacaaggaaacttgtattttctatcttgggaatgaagatgaagaatcaggacaaagatggtgtcaccggatgatggtcacctgaagacaccagtgtctatattcttaataaggttataaaataaagtgttggaagatctaaaaaaaaaaaaaaaaaaaaaaa

SEQ ID NO: 9054 - protein, 2629 aa, Rattus norvegicus
  ref <308>: DATABASE ACCESSION NUMBER: SWISS-Prot / AAB51690
  ref <309>: DATABASE ENTRY DATE: 2003-02-01
MEKLCGYVPVHPDILSLKNRCLTMLSDIQPLEKIHGQRSVNPDILSLENRCLTLLPDLQPMEKIHGQRSVHPDILSSENRCLTLLPDLQSLEKLCGHMSSHPDVLSLENRCLATLPTVKRTVSSGPLLQCLHRSHTAQADLRDPNFRNCLFPEPPTIEAPCFLKELDLPTGPRALKSMSATARVQEVALGQRCVSEGKELQEEKESAEVPMPLYSLSLGGEEEEVVGAPVLKLTSGDSDSHPETTDQILQEKKMALLTLLCSAMASSVNVKDASDPTRASIHEVCSALAPLEPEFILKASLYARQQLNLRDIANIVLAVAALLPACRPHVRRYYSAIVHLPSDWIQVAEFYQSLAEGDEKKLVPLPACLRAAMTDKFAQFDEYQLAKYNPRKHRSKTRSRQPPRPQRTKPPFSESGKCFPKSVWPLKNEQISFEAAYNAVSEKKRLPRFTLKKLVEQLHIHEPAQHVQALLGYRYPSTLELFSRSHLPGPWDSSRAGQRMKLQRPETWERELSLRGNRASVWEELIDNGKLPFMAMLRNLCNLLRTGISAHHHELVLQRLQHEKSVIHSRQFPFRFLNAHDSLDRLEAQLRSKASPFPSNTTLMKRIMIRNSKKIKRPANPRYLCTLTQRQLRAAMAIPVMYEHLKREKLRLHKARQWTCDLELLERYRQALETAVNISVKHNLPPLPGRTLLVYLTDANANRLCPKSHLQGPPLNYVLLLIGMMMARAEQTTVWLCGTGTVKTPVLTADEGILKTAIKLQAQVQELEENDEWPLETFEKYLLSLAVRRTPIDRVILFGQRMDTELLNVAKQIIWQHVNSKCLFVSVLLRKMQYMSPNLNPNDVTLSGCTDGILKFIAEHGASRLLEHVGQLDKIFKIPPPPGKTKVSPLRPLEENNPGPFVPISQHGWRNIRLFISSTFRDMHGERDLLMRSVLPALQARAFPHRISLHAIDLRWGITEEETRRNRQLEVCLGEVENSQLFVGILGSRYGYTPPSYDLPDHPHFHWTQRYPSGRSVTEMEVMQFLNRGQRSEPSDQALIYFRDPGFLSSVPDVWKPDFISESEEAAHRVSELKRFLQEQKEVTCRRYSCEWGGVAAGRPYTGGLEEFGQLVLQDVWSVIQKRYLQPGAQLEQPGSISEEDLIQASFQQLKSPPSPARPRLLQDTVQQLMLPHGRLSLVIGQAGQGKTAFLASLVSALKVPDQPNVAPFVFFHFSAARPDQCLAFNLLRRLCTHLHQKLGEPSALPSTYRGLVWELQQKLLLKSAQWLQPGQTLVLIIDGADKLVDHNGQLISDWIPKSLPRRVHLVLSVSSDSGLGETLQQSQSAYVVALGSLVPSSRAQLVREELALYGKRLEESPFNNQMRLLLAKQGSSLPLYLHLVTDYLRLFTLYEQVSERLRTLPATLPLLLQHILSTLEQEHGHNVLPQALTALEVTHSGLTVDQLHAVLSTWLTLPKETKSWEEAVAASHSGNLYPLAPFAYLVQSLRSLLGEGPVERPGARLCLSDGPLRTAVKRRYGKRLGLEKTAHVLIAAHLWKMCDPDASGTFRSCPPEALKDLPYHLLQSGNHGLLAKFLTNLHVVAAYLEVGLVPDLLEAYELYASSKPEVNQKLPEADVAVFHNFLKQQASLLTQYPLLLLQQAASQPEESPVCCQAPLLTQRWHNQCILKWINKPQTLKGQQSLSLPISSSPTAVAFSPNGQRAAVGTAGGTIYLLNLRTWQEEKALVSGCDGISSFAFLSDTALFLTTFDGLLELWDLQHGCWVFQTKAHQYQITGCCLSPDRRLLATVCLGGYVKLWDTVQGQLAFQYTHPKSLNCITFHPEGQVVATGNWSGIVTFFQADGLKVTKELGGPGPSVRTLAFSAPGKVVALGRIDGTVELWAWQEGTRLAAFPAQCGGVSTVLFLHAGGRFLTAGEDGKAQLWSGFLGRPRGCLGSLYLSPALSVALNPDGDQVAVGYRGDGIKIYRISSGPQEAQCQELNVAVSALVWLSPSVLVSGAEDGSLHGWMLRRNSLQSLWLSSVCQKPVLGLAASQEFLASASEDFTVRLWPRQLLTQPHAVEELPCAAELRGHEGPVCCCSFSPDGRILATAGRDRNLLCWDVKVAQAPLLIHTFSSCHRDWITGCTWTKDNILISCSSDGSVGLWNPEAGQQLGQFPGHQSAVSAVVAVEEHIVSVSRDGTLKVWDRQGVELTSIPAHSGPISQCAAALEPRPAGQPGSELMVVTVGLDGATKLWHPLLVCQIHTLQGHSGPVTAAAASEASGLLLTSDNSSVRLWQIPKEADDTCKPRSSAVITAVAWAPDGSLVVSGNEAGELTLWQKAQAVATARAPGRVSDLIWCSANAFFVLSANENVSEWQVELRKGSTCTNFRLYLKRVLQEDLGVLTGMALAPDGQSLILMKEDVELLQMKPGSTPSSICRRYAVHSSILCTSKDYGLFYLQQGNSGSLSILEQEESGKFEKTLDFNLNLNNPNGSPVSITQAEPESGSSLLCATSDGMLWNLSECTPEGEWVVDNIWQKKSRNPKSRTPGTDSSPGLFCMDSWVEPTHLKARQCKKIHLGSVTALHVLPGLLVTASEDRDVKLWERPSMQLLGLFRCEGPVSCLEPWMEPSSPLQLAVGDAQGNLYFLSWE

SEQ ID NO: 9055 - DNA, 8665 bp, Homo sapiens
  misc_feature (1)..(8665): n=a, c, g or t
  ref <308>: DATABASE ACCESSION NUMBER: EMBL / U86136
  ref <309>: DATABASE ENTRY DATE: 1999-07-01
ggtaccggtccggaattcccgggtcgacccacgcgtccggaatcggacgccccaggcatatacaagctgagtttcagccatggaaaaactccatgggcatgtgtctgcccatccagacatcctctccttggagaaccggtgcctggctatgctccctgacttacagcccttggagaaactacatcagcatgtatctacccactcagatatcctctccttgaagaaccagtgcctagccacgcttcctgacctgaagaccatggaaaaaccacatggatatgtgtctgcccacccagacatcctctccttggagaaccagtgcctggccacactttctgacctgaagaccatggagaaaccacatggacatgtttctgcccacccagacatcctctccttggagaaccggtgcctggccaccctccctagtctaaagagcactgtgtctgccagccccttgttccagagtctacagatatctcacatgacgcaagctgatttgtaccgtgtgaacaacagcaattgcctgctctctgagcctccaagttggagggctcagcatttctctaagggactagacctttcaacctgccctatagccctgaaatccatctctgccacagagacagctcaggaagcaactttgggtcgttggtttgattcagaagagaagaaaggggcagagacccaaatgccttcttatagtctgagcttgggagaggaggaggaggtggaggatctggccgtgaagctcacctctggagactctgaatctcatccagagcctactgaccatgtccttcaggaaaagaagatggctctactgagcttgctgtgctctactctggtctcagaagtaaacatgaacaatacatctgaccccaccctggctgccatttttgaaatctgtcgtgaacttgccctcctggagcctgagtttatcctcaaggcatctttgtatgccaggcagcagctgaacgtccggaatgtggccaataacatcttggccattgctgctttcttgccggcgtgtcgcccccacctgcgacgatatttctgtgccattgtccagctgccttctgactggatccaggtggctgagctttaccagagcctggctgagggagataagaataagctggtgcccctgcccgcctgtctccgtactgccatgacggacaaatttgcccagtttgacgagtaccagctggctaagtacaaccctcggaagcaccgggccaagagacacccccgccggccaccccgctctccagggatggagcctccattttctcacagatgttttccaaggtacatagggtttctcagagaagagcagagaaagtttgagaaggccggtgatacagtgtcagagaaaaagaatcctccaaggttcaccctgaagaagctggttcagcgactgcacatccacaagcctgcccagcacgttcaagccctgctgggttacagatacccctccaacctacagctcttttctcgaagtcgccttcctgggccttgggattctagcagagctgggaagaggatgaagctgtctaggccagagacctgggagcgggagctgagcctacgggggaacaaagcgtcggtctgggaggaactcattgaaaatgggaagcttcccttcatggccatgcttcggaacctgtgcaacctgctgcgggttggaatcagttcccgccaccatgagctcattctccagagactccagcatgggaagtcggtgatccacagtcggcagtttccattcagatttcttaacgcccatgatgccattgatgccctcgaggctcaactcagaaatcaagcattgccctttccttcgaatataacactgatgaggcggatactaactagaaatgaaaagaaccgtcccaggcggaggtttctttgccacctaagccgtcagcagcttcgtatggcaatgaggatacctgtgttgtatgagcagctcaagagggagaagctgagagtacacaaggccagacagtggaaatatgatggtgagatgctgaacaggtaccgacaggccctagagacagctgtgaacctctctgtgaagcacagcctgcccctgctgccaggccgcactgtcttggtctatctgacagatgctaatgcagacaggctctgtccaaagagcaacccacaagggcccccgctgaactatgcactgctgttgattgggatgatgatcacgagggcggagcaggtggacgtcgtgctgtgtggaggtgacactctgaagactgcagtgcttaaggcagaagaaggcatcctgaagactgccatcaagctccaggctcaagtccaggagtttgatgaaaatgatggatggtccctgaatacttttgggaaatacctgctgtctctggctggccaaagggttcctgtggacagggtcatcctccttggccaaagcatggatgatggaatgataaatgtggccaaacagctttactggcagcgtgtgaattccaagtgcctctttgttggtatcctcctaagaagggtacaatacctgtcaacagatttgaatcccaatgatgtgacactctcaggctgtactgatgcgatactgaagttcattgcagagcatggggcctcccatcttctggaacatgtgggccaaatggacaaaatattcaagattccaccacccccaggaaagacaggggtccagtctctccggccactggaagaggacactccaagccccttggctcctgtttcccagcaaggatggcgcagcatccggcttttcatttcatccactttccgagacatgcacggggagcgggacctgctgctgaggtctgtgctgccagcactgcaggcccgagcggcccctcaccgtatcagccttcacggaatcgacctccgctggggcgtcactgaggaggagacccgtaggaacagacaactggaagtgtgccttggggaggtggagaacgcacagctgtttgtggggattctgggctcccgttatggatacattccccccagctacaaccttcctgaccatccacacttccactgggcccagcagtacccttcagggcgctctgtgacagagatggaggtgatgcagttcctgaaccggaaccaacgtctgcagccctctgcccaagctctcatctacttccgggattccagcttcctcagctctgtgccagatgcctggaaatctgactttgtttctgagtctgaagaggccgcatgtcggatctcagaactgaagagctacctaagcagacagaaagggataacctgccgcagatacccctgtgagtgggggggtgtggcagctggccggccctatgttggcgggctggaggagtttgggcagttggttctgcaggatgtatggaatatgatccagaagctctacctgcagcctggggccctgctggagcagccagtgtccatcccagacgatgacttggtccaggccaccttccagcagctgcagaagccaccgagtcctgcccggccacgccttcttcaggacacagtgcaacagctgatgctgccccacggaaggctgagcctggtgacggggcagtcaggacagggcaagacagccttcctggcatctcttgtgtcagccctgcaggctcctgatggggccaaggtggcaccattagtcttcttccacttttctggggctcgtcctgaccagggtcttgccctcactctgctcagacgcctctgtacctatctgcgtggccaactaaaagagccaggtgccctccccagcacctaccgaagcctggtgtgggagctgcagcagaggctgctgcccaagtctgctgagtccctgcatcctggccagacccaggtcctgatcatcgatggggctgataggttagtggaccagaatgggcagctgatttcagactggatcccaaagaagcttccccggtgtgtacacctggtgctgagtgtgtctagtgatgcaggcctaggggagacccttgagcagagccagggtgcccacgtgctggccttggggcctctggaggcctctgctcgggcccggctggtgagagaggagctggccctgtacgggaagcggctggaggagtcaccatttaacaaccagatgcgactgctgctggtgaagcgggaatcaggccggccgctctacctgcgcttggtcaccgatcacctgaggctcttcacgctgtatgagcaggtgtctgagagactccggaccctgcctgccactgtccccctgctgctgcagcacatcctgagcacactggagaaggagcacgggcctgatgtccttccccaggccttgactgccctagaagtcacacggagtggtttgactgtggaccagctgcacggagtgctgagtgtgtggcggacactaccgaaggggactaagagctgggaagaagcagtggctgctggtaacagtggagacccctaccccatgggcccgtttgcctgcctcgtccagagtctgcgcagtttgctaggggagggccctctggagcgccctggtgcccggctgtgcctccctgatgggcccctgagaacagcagctaaacgttgctatgggaagaggccagggctagaggacacggcacacatcctcattgcagctcagctctggaagacatgtgacgctgatgcctcaggcaccttccgaagttgccctcctgaggctctgggagacctgccttaccacctgctccagagcgggaaccgtggacttctttcgaagttccttaccaacctccatgtggtggctgcacacttggaattgggtctggtctctcggctcttggaggcccatgccctctatgcttcttcagtccccaaagaggaacaaaagctccccgaggctgacgttgcagtgtttcgcaccttcctgaggcagcaggcttcaatcctcagccagtacccccggctcctgccccagcaggcagccaaccagcccctggactcacctctttgccaccaagcctcgctgctctcccggagatggcacctccaacacacactacgatggcttaataaaccccggaccatgaaaaatcagcaaagctccagcctgtctctggcagtttcctcatcccctactgctgtggccttctccaccaatgggcaaagagcagctgtgggcactgccaatgggacagtttacctgttggacctgagaacttggcaggaggagaagtctgtggtgagtggctgtgatggaatctctgcttgtttgttcctctccgatgatacactctttcttactgccttcgacgggctcctggagctctgggacctgcagcatggttgtcgggtgctgcagactaaggctcaccagtaccaaatcactggctgctgcctgagcccagactgccggctgctagccaccgtgtgcttgggaggatgcctaaagctgtgggacacagtccgtgggcagctggccttccagcacacctaccccaagtccctgaactgtgttgccttccacccagaggggcaggtaatagccacaggcagctgggctggcagcatcagcttcttccaggtggatgggctcaaagtcaccaaggacctgggggcacccggagcctctatccgtaccttggccttcaatgtgcctgggggggttgtggctgtgggccggctggacagtatggtggagctgtgggcctggcgagaaggggcacggctggctgccttccctgcccaccatggctttgttgctgctgcgcttttcctgcatgcgggttgccagttactgacggctggagaggatggcaaggttcaggtgtggtcagggtctctgggtcggccccgtgggcacctgggttccctttctctctctcctgccctctctgtggcactcagcccagatggtgatcgggtggctgttggatatcgagcggatggcattaggatctacaaaatctcttcaggttcccagggggctcagggtcaggcactggatgtggcagtgtccgccctggcctggctaagccccaaggtattggtgagtggtgcagaagatgggtccttgcagggctgggcactcaaggaatgctcccttcagtccctctggctcctgtccagattccagaagcctgtgctaggactggccacttcccaggagctcttggcttctgcctcagaggatttcacagtgcagctgtggccaaggcagctgctgacgcggccacacaaggcagaagactttccctgtggcactgagctgcggggacatgagggccctgtgagctgctgtagtttcagcactgatggaggcagcctggccaccgggggccgggatcggagtctcctctgctgggacgtgaggacacccaaaacccctgttttgatccactccttccctgcctgtcaccgtgactgggtcactggctgtgcctggaccaaagataacctactgatatcctgctccagtgatggctctgtggggctctgggacccagagtcaggacagcggcttggtcagttcctgggtcatcagagtgctgtgagcgctgtggcagctgtggaggagcacgtggtgtctgtgagccgggatgggaccttgaaagtgtgggaccatcaaggcgtggagctgaccagcatccctgctcactcaggacccattagccactgtgcagctgccatggagccccgtgcagctggacagcctgggtcagagcttctggtggtaaccgtcgggctagatggggccacacggttatggcatccactcttggtgtgccaaacccacaccctcctgggacacagcggcccagtccgtgctgctgctgtttcagaaacctcaggcctcatgctgaccgcctctgaggatggttctgtacggctctggcaggttcctaaggaagcagatgacacatgtataccaaggagttctgcagccgtcactgctgtggcttgggcaccagatggttccatggcagtatctggaaatcaagctggggaactaatcttgtggcaggaagctaaggctgtggccacagcacaggctccaggccacattggtgctctgatctggtcctcggcacacaccttttttgtcctcagtgctgatgagaaaatcagcgagtggcaagtgaaactgcggaagggttcggcacccggaaatttgagtcttcacctgaaccgaattctacaggaggacttaggggtgctgacaagtctggattgggctcctgatggtcactttctcatcttggccaaagcagatttgaagttactttgcatgaagccaggggatgctccatctgaaatctggagcagctatacagaaaatcctatgatattgtccacccacaaggagtatggcatatttgtcctgcagcccaaggatcctggagttctttctttcttgaggcaaaaggaatcaggagagtttgaagagaggctgaactttgatataaacttagagaatcctagtaggaccctaatatcgataactcaagccaaacctgaatctgagtcctcatttttgtgtgccagctctgatgggatcctatggaacctggccaaatgcagcccagaaggagaatggaccacaggtaacatgtggcagaaaaaagcaaacactccagaaacccaaactccagggacagacccatctacctgcagggaatctgatgccagcatggatagtgatgccagcatggatagtgagccaacaccacatctaaagacacggcagcgtagaaagattcactcgggctctgtcacagccctccatgtgctacctgagttgctggtgacagcttcgaaggacagagatgttaagctatgggagagacccagtatgcagctgctgggcctgttccgatgcgaagggtcagtgagctgcctggaaccttggctgggcgctaactccaccctgcagcttgccgtgggagacgtgcagggcaatgtgtactttctgaattgggaatgaagatgtgccactcgggaataatgataccccttgtgctagagatgcaaagcctgaagacactggtagcttttaataattataaaattaataatttcttgataattataaaaatgaagtgtcaaaaaatctcaagtgtaggcctgcctgtgttctcatgtggatttagaacaggaggatattctatgtgtatgtatatgtacattctaatgtgtgtctcttcttattcaacattaatccttactagaaccacaagaaagtgaatgaaatctttagtaggtactcttttgaaactaggttntagaattcttgcatcactcgcgggccctaggaccctaggatgccattcttgccaggaggaggaatgagagtgatgttggccaacattcaatttgaacagagcatggaagacctttcagttcatcgggaaagaatgagggagggagaataagtcagtcatgcatcagggcatttagaaagagctatgtttctgtcacagagacagcccttttctcagaactacccagaggaggccgggcatggtggctcacgcttgtaatcccagcactttgggaggccgaggtgggcagatcacgaggtcaggagatcaagaccatcctggctaacatagtgaaaccctgtctctactaaaaaatacaaaaagttaaccaggcatgtagcggccgctctagaggatccaagctt

SEQ ID NO: 9056 - protein, 2627 aa, Homo sapiens
MEKLHGHVSAHPDILSLENRCLAMLPDLQPLEKLHQHVSTHSDILSLKNQCLATLPDLKTMEKPHGYVSAHPDILSLENQCLATLSDLKTMEKPHGHVSAHPDILSLENRCLATLSSLKSTVSASPLFQSLQISHMTQADLYRVNNSNCLLSEPPSWRAQHFSKGLDLSTCPIALKSISATETAQEATLGRWFDSEEKKGAETQMPSYSLSLGEEEEVEDLAVKLTSGDSESHPEPTDHVLQEKKMALLSLLCSTLVSEVNMNNTSDPTLAAIFEICRELALLEPEFILKASLYARQQLNVRNVANNILAIAAFLPACRPHLRRYFCAIVQLPSDWIQVAELYQSLAEGDKNKLVPLPACLRTAMTDKFAQFDEYQLAKYNPRKHRAKRHPRRPPRSPGMEPPFSHRCFPRYIGFLREEQRKFEKAGDTVSEKKNPPRFTLKKLVQRLHIHKPAQHVQALLGYRYPSNLQLFSRSRLPGPWDSSRAGKRMKLSRPETWERELSLRGNKASVWEELIENGKLPFMAMLRNLCNLLRVGISSRHHELILQRLQHAKSVIHSRQFPFRFLNAHDAIDALEAQLRNQALPFPSNITLMRRILTRNEKNRPRRRFLCHLSRQQLRMAMRIPVLYEQLKREKLRVHKARQWKYDGEMLNRYRQALETAVNLSVKHSLPLLPGRTVLVYLTDANADRLCPKSNPQGPPLNYALLLIGMMITRAEQVDVVLCGGDTLKTAVLKAEEGILKTAIKLQAQVQEFDENDGWSLNTFGKYLLSLAGQRVPVDRVILLGQSMDDGMINVAKQLYWQRVNSKCLFVGILLRRVQYLSTDLNPNDVTLSGCTDAILKFIAEHGASHLLEHVGQMDKIFKIPPPPGKTGVQSLRPLEEDTPSPLAPVSQQGWRSIRLFISSTFRDMHGERDLLLRSVLPALQARAAPHRISLHGIDLRWGVTEEETRRNRQLEVCLGEVENAQLFVGILGSRYGYIPPSYNLPDHPHFHWAQQYPSGRSVTEMEVMQFLNRNQRLQPSAQALIYFRDSSFLSSVPDAWKSDFVSESEEAARRISELKSYLSRQKGITCRRYPCEWGGVAAGRPYVGGLEEFGQLVLQDVWNMIQKLYLQPGALLEQPVSIPDDDLVQATFQQLQKPPSPARPRLLQDTVQRLMLPHGRLSLVTGQSGQGKTAFLASLVSALQAPDGAKVASLVFFHFSGARPDQGLALTLLRRLCTYLRGQLKEPGALPSTYRSLVWELQQRLLPKSAESLHPGQTQVLIIDGADRLVDQNGQLISDWIPKKLPRCVHLVLSVSSDAGLGETLEQSQGAHVLALGPLEASARARLVREELALYGKRLEESPFNNQMRLLLVKRESGRPLYLRLVTDHLRLFTLYEQVSERLRTLPATVPLLLQHILSTLEKEHGPDVLPQALTALEVTRSGLTVDQLHGVLSVWRTLPKGTKSWEEAVAAGNSGDPYPMGPFACLVQSLRSLLGEGPLERPGARLCLPDGPLRTAAKRCYGKRPGLEDTAHILIAAQLWKTCDADASGTFRSCPPEALGDLPYHLLQSGNRGLLSKFLTNLHVVAAHLELGLVSRLLEAHALYASSVPKEEQKLPEADVAVFRTFLRQQASILSQYPRLLPQQAANQPLDSPLCHQASLLSRRWHLQHTLRWLNKPRTMKNQQSSSLSLAVSSSPTAVAFSTNGQRAAVGTANGTVYLLDLRTWQEEKSVVSGCDGISACLFLSDDTLFLTAFDGLLELWDLQHGCRVLQTKAHQYQITGCCLSPDCRLLATVCLGGCLKLWDTVRGQLAFQHTYPKSLNCVAFHPEGQVIATGSWAGSISFFQVDGLKVTKDLGAPGASIRTLAFNVPGGVVAVGRLDSMVELWAWREGARLAAFPAHHGFVAAALFLHAGCQLLTAGEDGKVQVWSGSLGRPRGHLGSLSLSPALSVALSPDGDRVAVGYRADGIRIYKISSGSQGAQGQALDVAVSALAWLSPKVLVSGAEDGSLQGWALKECSLQSLWLLSRFQKPVLGLATSQELLASASEDFTVQLWPRQLLTRPHKAEDFPCGTELRGHEGPVSCCSFSTDGGSLATGGRDRSLLCWDVRTPKTPVLIHSFPACHRDWVTGCAWTKDNLLISCSSDGSVGLWDPESGQRLGQFLGHQSAVSAVAAVEEHVVSVSRDGTLKVWDHQGVELTSIPAHSGPISHCAAAMEPRAAGQPGSELLVVTVGLDGATRLWHPLLVCQTHTLLGHSGPVRAAAVSETSGLMLTASEDGSVRLWQVPKEADDTCIPRSSAAVTAVAWAPDGSMAVSGNQAGELILWQEAKAVATAQAPGHIGALIWSSAHTFFVLSADEKISEWQVKLRKGSAPGNLSLHLNRILQEDLGVLTSLDWAPDGHFLILAKADLKLLCMKPGDAPSEIWSSYTENPMILSTHKEYGIFVLQPKDPGVLSFLRQKESGEFEERLNFDINLENPSRTLISITQAKPESESSFLCASSDGILWNLAKCSPEGEWTTGNMWQKKANTPETQTPGTDPSTCRESDASMDSDASMDSEPTPHLKTRQRRKIHSGSVTALHVLPELLVTASKDRDVKLWERPSMQLLGLFRCEGSVSCLEPWLGANSTLQLAVGDVQGNVYFLNWE

SEQ ID NO: 9057 - DNA, 3098 bp, Rattus norvegicus
  ref <308>: DATABASE ACCESSION NUMBER: EMBL / U89529
  ref <309>: DATABASE ENTRY DATE: 2000-03-04
aagttcccactccagacttctgcgagaacccgtgaggaagcagcgagaaccgggggtttgcaagccagagaaggatgcggactccgggagcaggaacagcctctgtggcctcattggggctgctttggcttctgggacttccgtggacctggagcgcggcggcggcgttcggtgtgtacgtgggtagcggtggctggcgatttctgcgtatcgtctgcaagacggcgaggcgagacctctttggcctctctgttctgatccgcgtgcggctagagctacgacgacaccggcgagcaggagacacgatcccacgcatcttccaggccgtggcccagcgacagccggagcgcctggcgctggtagatgcgagtagcggtatctgctggaccttcgcacagctagacacctactccaatgctgtggccaatctgttcctccagctgggctttgcgccaggcgatgtggtggctgtgttcctggaaggccggcccgagttcgtgggactgtggctgggcctggccaaggccggtgtagtggctgcgcttctcaatgtcaacctgaggcgggagccccttgccttctgcttgggcacatcagctgccaaggccctcatttatggcggggagatggcagcggcggtggcggaggtgagtgagcagctggggaagagcctgctcaagttctgctctggagatctggggcctgagagcgtcctgcctgacacgcagcttctggaccccatgcttgctgaggcgcccaccacacccctggcacaggccccaggcaagggcatggatgatcggctattttacatctatacttctgggaccaccggacttcctaaggcggccattgtggtgcacagcaggtactaccgcatcgcagccttcggccaccattcctacagcatgcgggccaacgatgtgctctatgactgcctacctctctaccactcagcagggaacatcatgggcgtgggacagtgtatcatctacgggttaacggtggtactgcgcaagaagttctccgccagccgcttctgggacgactgtgtcaaatataattgcacggtagtgcagtacatcggtgaaatatgccgctacctgctaaggcagccggttcgcgatgtagagcggcggcaccgcgtgcgcctggccgtgggtaacggactgcggccagccatctgggaggagttcacgcagggtttcggtgtgcgacagattggcgagttctacggcgccaccgaatgcaactgcagcattgccaacatggacggcaaggtcggctcctgcggcttcaacagccgtatcctcacgcatgtgtaccccatccgtctggtcaaggtcaacgaggacacgatggagccactgagggactcccaaggcctctgcatcccgtgccagcccggggaacctgggcttctcgtgggccagatcaaccagcaagaccctctgcggcgcttcgatggctatgttagtgacagcgccaccaacaagaagattgcccacagcgtgttccgaaagggggacagcgcctacctttcaggtgacgtgctagtgatggacgagctggggtacatgtacttccgtgaccgcagcggggataccttccgatggcgcggcgagaacgtatccaccacggaggtggaagccgtgctgagccgcctgttgggccagacggacgtggctgtgtatggagtggctgtgccaggagtggaggggaaaagcggcatggcggccattgcagacccccacaaccagctggaccctaactcaatgtaccaggaattgcagaaggttcttgcatcctatgcccagcccatcttcctgcgtcttctgccccaagtggatacaacaggcaccttcaagatccagaagacccgactacagcgtgaaggctttgacccccgccagacctcagaccggctcttctttctagacctgaaacagggacgctacctacccctggatgagagagtccatgcccgcatctgcgcaggcgacttctcactctgagcctggtgagtgggatggccctggacttgtgagaccagggagccggacacccctgttcaggtgtttctcctgcctggccacgtggccagcagcacctgtgggtgcaggaaactggaacctgagtggccgggtgtccctttcctacaacccaccatgcacacatctagcctctgccttggtctttttctccatctctttcctccgtgcccagcaggagccccacagacacattggctgctgtgtcctgcagtgggaccggtgtctaggggtccatgctgcaggctgtgacccgcactggtgcccacctcccttccccattgtgccttaggttcctccactgtgcgccggtgaagcaagtggggacccacatagctgttgtccctgctgagggttggtagcaaatgcaccctcatgtcagctgggagacacatgcagtctcccactgacccccaatcaactgaagatactgttttgtattattgttttgagatagggtctcactgtggaggccaagctggcctcaggctcaccactctactgcctccgggcaccagcctgcagtttgatgacatgtatgcactattgttctaagggtcttctgagtccctgctttcccctcatgtcctaaaaccttccagaactgactctgatcacttggatgtagctagtgttggccctgcccacgtgtgtcaattcaggggtccccaggcatcatctctggaggccctaaccttggcaaagcttggatgtcctcacatcacagcaggagacccaggaaggttgctgtggtgtctcttgggcacccctggcggcagccgtggacatgcttccctgctgtgatagcccaaactgttgcctatgacatttgaggtctacccttctggctgccatggtccccattgagatctttggtgactcacctcagccaccaagccaggcctctgccttccttcagctctaagggcatgaagggtgtggacagagcagccacaggctgcccacagtcacccacatgcaagtgttatttccttgtttgttttaaaaaaataaacatgctgagccttgaaaaaaaaaaaaaaaaaa

SEQ ID NO: 9058 - protein, 646 aa, Rattus norvegicus
  ref <308>: DATABASE ACCESSION NUMBER: SWISS-Prot / P97849
  ref <309>: DATABASE ENTRY DATE: 2002-06-15
MRTPGAGTASVASLGLLWLLGLPWTWSAAAAFGVYVGSGGWRFLRIVCKTARRDLFGLSVLIRVRLELRRHRRAGDTIPRIFQAVAQRQPERLALVDASSGICWTFAQLDTYSNAVANLFLQLGFAPGDVVAVFLEGRPEFVGLWLGLAKAGVVAALLNVNLRREPLAFCLGTSAAKALIYGGEMAAAVAEVSEQLGKSLLKFCSGDLGPESVLPDTQLLDPMLAEAPTTPLAQAPGKGMDDRLFYIYTSGTTGLPKAAIVVHSRYYRIAAFGHHSYSMRANDVLYDCLPLYHSAGNIMGVGQCIIYGLTVVLRKKFSASRFWDDCVKYNCTVVQYIGEICRYLLRQPVRDVERRHRVRLAVGNGLRPAIWEEFTQGFGVRQIGEFYGATECNCSIANMDGKVGSCGFNSRILTHVYPIRLVKVNEDTMEPLRDSQGLCIPCQPGEPGLLVGQINQQDPLRRFDGYVSDSATNKKIAHSVFRKGDSAYLSGDVLVMDELGYMYFRDRSGDTFRWRGENVSTTEVEAVLSRLLGQTDVAVYGVAVPGVEGKSGMAAIADPHNQLDPNSMYQELQKVLASYAQPIFLRLLPQVDTTGTFKIQKTRLQREGFDPRQTSDRLFFLDLKQGRYLPLDERVHARICAGDFSL

SEQ ID NO: 9059 - DNA, 794 bp, Homo sapiens
  ref <308>: DATABASE ACCESSION NUMBER: EMBL / BG828409
  ref <309>: DATABASE ENTRY DATE: 2001-05-30
gaaatgaaagaaagaaaagaaaaagagggaagagttaaggccagacagggacagggatggaaggagacagaggctgaaaagcagggagaggaggcagacacaggggcaccaaggcagcagagaggcacgggttcctctgaggttccagtttctcagtccaggatgggccgtgccaggtacagctcggccaggtgggtgtgtactaggcggccacccctgggcagcgctgtctggctcaagctggcctctcccaccaggcccagagtttgtggccagtagaggaacagcttcagagggcgaaggcgcccgagcagatgcgagtgtagactgcctcatttaagggcaggtagtggccctgcttcaggtccaggaagaagagccggtctgaggtctggcgtgggtcaaagccctctcgctgcagcctcgtcttctggatcttgaaggtgcctggaacagccaccccatagacggccacgtctgtctggcccagcaggcggctcagcacgccctccacctcggtggtggagacgttctcccctcgccagcggaaggtgtccccgctacggtcctggaagtacatgtagcccagctcatccatcactagcacgtcacctgagaggtaggcgctgtcgcccttgctgaagacgctgtgggcgatcttcttgctggtggcgctctcgctgacatagccatcgaagccggcgcagcgggtcctgttggcttgatctgacccacaacggaggccaggctccccggcctggcaagggactgcagaggccctgggcatcccgcac

SEQ ID NO: 9060 - protein, 643 aa, Homo sapiens
MLLGASLVGVLLFSKLVLKLPWTQVGFSLLFLYLGSGGWRFIRVFIKTIRRDIFGGLVLLKVKAKVRQCLQERRTVPILFASTVRRHPDKTALIFEGTDTHWTFRQLDEYSSSVANFLQARGLASGDVAAIFMENRNEFVGLWLGMAKLGVEAALINTNLRRDALLHCLTTSRARALVFGSEMASAICEVHASLDPSLSLFCSGSWEPGAVPPSTEHLDPLLKDAPKHLPSCPDKGFTDKLFYIYTSGTTGLPKAAIVVHSRYYRMAALVYYGFRMRPNDIVYDCLPLYHSAGNIVGIGQCLLHGMTVVIRKKFSASRFWDDCIKYNCTIVQYIGELCRYLLNQPPREAENQHQVRMALGNGLRQSIWTNFSSRFHIPQVAEFYGATECNCSLGNFDSQVGACGFNSRILSFVYPIRLVRVNEDTMELIRGPDGVCIPCQPGEPGQLVGRIIQKDPLRRFDGYLNQGANNKKIAKDVFKKGDQAYLTGDVLVMDELGYLYFRDRTGDTFRWKGENVSTTEVEGTLSRLLDMADVAVYGVEVPGTEGRAGMAAVASPTGNCDLERFAQVLEKELPLYARPIFLRLLPELHKTGTYKFQKTELRKEGFDPAIVKDPLFYLDAQKGRYVPLDQEAYSRIQAGEEKL

SEQ ID NO: 9061 - DNA, 1114 bp, Rattus norvegicus
  misc_feature (1)..(1114): n=a, c, g or t
  ref <308>: DATABASE ACCESSION NUMBER: EMBL / U89745
  ref <309>: DATABASE ENTRY DATE: 2000-03-04
tcagtnatcggccgaattcgcggccgctccggcctccactgttttgtcagtcagttagggggtgggcccaaccttagagatgggggcccggccttcactgttctgttattcagagggtggggcctgacctccacttttctgttattcagggggcagggcctgacctccacttttctgttattcagggggcagggtctgacctccactgttctgtcagtcatttggggggcggggcctggtggagctataatgcctgttcctgaggtggccctgcccagtccagcactggactaaccacaggccaagtgctgagtaactaagacccaggcctgctgggtgaggggttccgagaactcatgaacctctgtcctgcctctgagggactttgaagattgttgccctgcagtgtccctagcagttaaacccagccgccatgttcaagaggtttccccttagctgctgtgcctctctgggctgggcgggtggtttaaagcatgcatcaccaaggagccagtgtgtcctttgcttggctggacccagcctctgcttctgctccgtcctgggaatgcatctccttatatcactttcctctttcagaaccagaaggacctgggcctgcctgaaagctgggccgtccttgtttgtgctcctgccggggcccagtctctggaaggtggccttgagttaggcatccttggttgaatcctgtcccactgaacaggtgttaactttgaaccacactcactctgagccttggcttccctttctgtaaaatgggggtnactgagccaaggntgcttgtgggaggnacacacaggcntgaggntggccctgtgagcntgtgcctttccttccctccctgtgaggtcttggggaggagccntgctggtgcacatgtccttatccctctcbcggataatacacacatttgtaggkncgggcgcattnttacacacacacacacacacacacacacacacacacacacacaccccantnatcagtgtctkgtgttcatntcccagntacacacattccctgtgcccacccacactcacacaggatnccttgctctttaaactacaaccccacacagtcccctgcacaccccaaa

SEQ ID NO: 9062 - protein, 97 aa, Rattus norvegicus
  ref <308>: DATABASE ACCESSION NUMBER: SWISS-Prot / AAB49895
  ref <309>: DATABASE ENTRY DATE: 1997-05-01
SVIGRIRGRSGLHCFVSQLGGGPNLRDGGPAFTVLLFRGWGLTSTFLLFRGQGLTSTFLLFRGQGLTSTVLSVIWGAGPGGAIMPVPEVALPSPALD

SEQ ID NO: 9063 - DNA, 1504 bp, Rattus norvegicus
  ref <308>: DATABASE ACCESSION NUMBER: EMBL / U89905
  ref <309>: DATABASE ENTRY DATE: 2000-03-04
gctgcgtggcgtcagggttctggagctggcaggcctggccccagggccgttctgcgggatgatcctggcggacttcggcgccgaggtggtgctcgtggacagactgggctccgtgaaccaccccagtcacctggcccgaggcaagcgctcgctggcgctggacctgaagcggtctccgggagccgcggtgttgcggcgcatgtgcgcacgcgcggacgtgttgctggagcccttccgttgcggtgtcatggagaaactccagcttgggccagagactctacggcaggacaatccaaagctcatctatgccaggctgagtggatttggccagtcgggaattttctccaaagtagctggccatgacatcaactatgtggctttgtcaggtgtcctgtcaaagattggcaggagcggtgagaacccataccctcccctgaacctcctggccgactttggtggcggtggcctcatgtgcacattgggcattttgctggctctcttcgaacgcacgcggtctggcctagggcaggtcattgatgcgaacatggtggaaggaacggcatacttaagtactttcctgtggaaaactcaggccatgggtctgtgggcacagcctcgagggcaaaacctgttagatggcggggcacctttctacacaacctacaagaccgcagatggggagttcatggctgtaggtgcaatagaaccccagttctacacactgctgcttaaaggacttggacttgagtctgaggaactccccagccagatgagcatagaagattggccagaaatgaagaagaaatttgcagatgtgtttgcaaggaagactaaggcagagtggtgccagatctttgacgggacagatgcatgtgtgaccccagtgctgactcttgaggaggccctccaccaccagcacaacagagaacggggctccttcatcactgatgaggagcagcatgcatgcccccgtcctgcaccccagctttccagaacccctgctgttccttctgccaaaagggacccttctgtgggagagcacactgtagaggtgcttaaagactatggattcagtcaggaagagatccatcagctgcactcggatagaatcattgaaagtaataagctaaaagccaacctctgactcaggttcacagctcaagtgaatctgaaggctgtatctgtactggagaaggatgcccaccactgtccgtatggaaatgtgaatgaacagtaatgaagtaatccaaatattccaatcaagacacaacgaaagactgattacagagaaatgactgtgctctcacactgctcatccgagcctctgattgaggagtatttttgtgtgtgtactgatattaacttgtggcagttttctgcctttcagcttacttggtgaagtgcattcactgattaaaacccttttgtaaatgcaactctgataatatattaaatgaactaatataactttaataaataaagcttttttttccttgaaaaaaaa

SEQ ID NO: 9064 - protein, 381 aa, Rattus norvegicus
  ref <308>: DATABASE ACCESSION NUMBER: SWISS-Prot / P70473
  ref <309>: DATABASE ENTRY DATE: 2002-06-15
ALRGVRVLELAGLAPGPFCGMILADFGAEVVLVDRLGSVNHPSHLARGKRSLALDLKRSPGAAVLRRMCARADVLLEPFRCGVMEKLQLGPETLRQDNPKLIYARLSGFGQSGIFSKVAGHDINYVALSGVLSKIGRSGENPYPPLNLLADFGGGGLMCTLGILLALFERTRSGLGQVIDANMVEGTAYLSTFLWKTQAMGLWAQPRGQNLLDGGAPFYTTYKTADGEFMAVGAIEPQFYTLLLKGLGLESEELPSQMSIEDWPEMKKKFADVFARKTKAEWCQIFDGTDACVTPVLTLEEALHHQHNRERGSFITDEEQHACPRPAPQLSRTPAVPSAKRDPSVGEHTVEVLKDYGFSQEEIHQLHSDRIIESNKLKANL

SEQ ID NO: 9065 - DNA, 2946 bp, Homo sapiens
  ref <308>: DATABASE ACCESSION NUMBER: EMBL / BC009471
  ref <309>: DATABASE ENTRY DATE: 2001-07-13
ctgggaagcgccatggcactgcagggcatctcggtcatggagctgtccggcctggccccgggcccgttctgtgctatggtcctggctgacttcggggcgcgtgtggtacgcgtggaccggcccggctcccgctacgacgtgagccgcttgggccggggcaagcgctcgctagtgctggacctgaagcagccgcggggagccgccgtgctgcggcgtctgtgcaagcggtcggatgtgctgctggagcccttccgccgcggtgtcatggagaaactccagctgggcccagagattctgcagcgggaaaatccaaggcttatttatgccaggctgagtggatttggccagtcaggaagcttctgccggttagctggccacgatatcaactatttggctttgtcaggtggaaggaacagcatatttaagttcttttctgtggaaaactcagaaatcgagtctgtgggaagcacctcgaggacagaacatgttggatggtggagcacctttctatacgacttacaggacagcagatggggaattcatggctgttggagcaatagaaccccagttctacgagctgctgatcaaaggacttggactaaagtctgatgaacttcccaatcagatgagcatggatgattggccagaaatgaagaagaagtttgcagatgtatttgcaaagaagacgaaggcagagtggtgtcaaatctttgacggcacagatgcctgtgtgactccggttctgacttttgaggaggttgttcatcatgatcacaacaaggaacggggctcgtttatcaccagtgaggagcaggacgtgagcccccgccctgcacctctgctgttaaacaccccagccatcccttctttcaaaagggatcctttcataggagaacacactgaggagatacttgaagaatttggattcagccgcgaagagatttatcagcttaactcagataaaatcattgaaagtaataaggtaaaagctagtctctaacttccaggcccacggctcaagtgaatttgaatactgcatttacagtgtagagtaacacataacattgtatgcatggaaacatggaggaacagtattacagtgtcctaccactctaatcaagaaaagaattacagactctgattctacagtgatgattgaattctaaaaatggttatcattagggcttttgatttataaaactttgggtacttatactaaattatggtagttattctgccttccagtttgcttgatatatttgttgatattaagattcttgacttatattttgaatgggttctagtgaaaaaggaatgatatattcttgaagacatcgatatacatttatttacactcttgattctacaatgtagaaaatgaggaaatgccacaaattgtatggtgataaaagtcacgtgaaacagagtgattggttgcatccaggccttttgtcttggtgttcatgatctccctctaagcacattccaaactttagcaacagttatcacactttgtaatttgcaaagaaaagtttcacctgtattgaatcagaatgccttcaactgaaaaaaacatatccaaaataatgaggaaatgtgttggctcactacgtagagtccagagggacagtcagttttagggttgcctgtatccagtaactcggggcctgtttccccgtgggtctctgggctgtcagctttcctttctccatgtgtttgatttctcctcaggctggtagcaagttctggatcttatacccaacacacagcaacatccagaaataaagatctcaggaccccccagcaagtcgttttgtgtctccttggactgagttaagttacaagcctttcttatacctgtctttgacaaagaagacgggattgtctttacataaaaccagcctgctcctggagcttccctggactcaacttcctaaaggcatgtgaggaaggggtagattccacaatctaatccgggtgccatcagagtagagggagtagagaatggatgttgggtaggccatcaataaggtccattctgcgcagtatctcaactgccgttcaacaatcgcaagaggaaggtggagcaggtttcttcatcttacagttgagaaaacagagactcagaagggcttcttagttcatgtttcccttagcgcctcagtgattttttcatggtggcttaggccaaaagaaatatctaaccattcaatttataaataattaggtccccaacgaattaaatattatgtcctaccaacttattagctgcttgaaaaatataatacacataaataaaaaaatatatttttcatttctatttcattgttaatcacaactacttactaaggagatgtatgcacctattggacactgtgcaacttctcacctggaatgagattggacactgctgccctcattttctgctccatgttggtgtccatatagtacttgattttttatcagatggcctggaaaacccagtctcacaaaaatatgaaattatcagaaggattatagtgcaatcttatgttgaaagaatgaactacctcactagtagttcacgtgatgtctgacagatgttgagtttcattgtgtttgtgtgttcaaatttttaaatattctgagatactcttgtgaggtcactctaatgccctgggtgccttggcacagttttagaaataccagttgaaaatatttgctcaggaatatgcaactaggaaggggcagaatcagaatttaagctttcatattctagccttcagtcttgttcttcaaccattttcaggaactttcccataaggttatgttttccagcccaggcatggaggatcacttgaggccaagagttcgagaccagcctggggaacttggctggacctccgtttctacgaaataaaaataaaaaaattatccaggaaaaaaaaaaaaaaaaaaaaaaaaaaa

SEQ ID NO: 9066 - protein, 382 aa, Homo sapiens
  ref <308>: DATABASE ACCESSION NUMBER: SWISS-Prot / Q9UHK6
  ref <309>: DATABASE ENTRY DATE: 2002-06-15
MALQGISVVELSGLAPGPFCAMVLADFGARVVRVDRPGSRYDVSRLGRGKRSLVLDLKQPRGAAVLRRLCKRSDVLLEPFRRGVMEKLQLGPEILQRENPRLIYARLSGFGQSGSFCRLAGHDINYLALSGVLSKIGRSGENPYAPLNLLADFAGGGLMCALGIIMALFDRTRTGKGQVIDANMVEGTAYLSSFLWKTQKSSLWEAPRGQNMLDGGAPFYTTYRTADGEFMAVGAIEPQFYELLIKGLGLKSDELPNQMSMDDWPEMKKKFADVFAKKTKAEWCQIFDGTDACVTPVLTFEEVVHHDHNKERGSFITSEEQDVSPRPAPLLLNTPAIPSFKRDPFIGEHTEEILEEFGFSREEIYQLNSDKIIESNKVKASL

SEQ ID NO: 9067 - DNA, 1504 bp, Rattus norvegicus; identical to SEQ ID NO: 9063
  ref <308>: DATABASE ACCESSION NUMBER: EMBL / U89905
  ref <309>: DATABASE ENTRY DATE: 2000-03-04

SEQ ID NO: 9068 - protein, 381 aa, Rattus norvegicus; identical to SEQ ID NO: 9064
  ref <308>: DATABASE ACCESSION NUMBER: SWISS-Prot / P70473
  ref <309>: DATABASE ENTRY DATE: 2002-06-15

SEQ ID NO: 9069 - DNA, 2946 bp, Homo sapiens; identical to SEQ ID NO: 9065
  ref <308>: DATABASE ACCESSION NUMBER: EMBL / BC009471
  ref <309>: DATABASE ENTRY DATE: 2001-07-13

SEQ ID NO: 9070 - protein, 382 aa, Homo sapiens; identical to SEQ ID NO: 9066
  ref <308>: DATABASE ACCESSION NUMBER: SWISS-Prot / Q9UHK6
  ref <309>: DATABASE ENTRY DATE: 2002-06-15

SEQ ID NO: 9071 - DNA, 5033 bp, Rattus norvegicus
  ref <308>: DATABASE ACCESSION NUMBER: EMBL / U90312
  ref <309>: DATABASE ENTRY DATE: 1998-01-05
cacgaggcgccctcgggcaggaccccgccccggctcccctgtgctcccggcgcccatggcgctgagcaaagggctgcgactgctggcgcggctggaccccaccggcccgagcagcgtgctgctggaggcgcggggccgcggcgactgtctactctttgaggccggcgcggtggccacgctggctccggaagagaaggaagtcattaaaggactgtatgggaagccgacggatgcctatggctgcctcggggagctgagtttaaaatccggtggcgtccccttgagctttctggtgttggtgacaggctgcacgtcagtgggcagaattccagatgcagagatctacaaaatcactggcactgagttttaccccctgcaggaagaggccaaggaagaggaccgcctgccagccttgaagaaaatcctgagttcaggggtgttctatttcgcatggcccaatgatggcgcctgcttcgatctgaccatcagggctcagaaacagggtgatgactgctctgaatgggggacctccttcttctggaaccagctattgcatgtgcctctgcggcagcaccaggtgaactgtcatgactggttgctgaaagtcatctgtggggtggtgaccatccgcacggtttatgcctcccacaagcaggccaaggcctgtctcatctctcgcatcagctgtgaacgcgcaggtgctcgcttcctcacccggggtgtgaacgacgatggccacgtgtccaactttgtggagacagagcaggcgatttacatggatgatggagtgtcgtcctttgtccagatccgaggctccgttccgctgttctgggagcagccagggctccaggttggctcccatcatctgagactgcacagaggcctagaggccaacgcccctgcttttgaaaggcacatggtgcttctgaaggagcagtacgggcagcaggtggtggtgaacctgctgggaagcagaggcggtgaggaggtgctcaacagagccttcaagaagttgctctgggcttcttgccacgcaggcgacacgcctatgataaattttgacttccatcagtttgccaaaggtaggaagctagagaaattggagaacctgttgagacctcagttaaaactacactgggatgactttggcgtatttgcgaagggcgagaatgtaagtccacggtttcagaaaggcactctgcggatgaactgtctcgactgtctggacagaaccaacactgtacagtgcttcattgctcttgaggtgcttcatctgcagcttgagagcctagggctgaattccaagcccatcactgaccgcttcgtggagtccttcaaagccatgtggtctctgaatgggcatggcctgagcaaggtgttcacagggagcagggccctggaaggaaaggccaaggtggggaagctgaaggatggggctagatccatgtctcgtaccatccagtccaacttcttcgacggggtgaagcaggaggccatcaagctactgctagttggagatgtctacaatgaagagtctacagacaaaggcaggatgctgctggacaacacggcccttctgggtttggggtcaaataaacaaaacagtctttcaggcatgctggatggaaaagcaacacccaggatcctgaaggccatgacagaacgccagtcagaattcacaaatttcaagcggatccagattgctatggggacctggaatgtgaacggaggaaaacaattccgtagcaatctcctggggaccactgaactcactgactggctcctggatgcaccccagctctcaggagcagtggactctcaggacgatggcggtcccgctgacatatttgccgtcgggtttgaggagatggtggagctgagtgcaggaaatattgtcaatgccagcaccaccaacaggaagatgtggggtgagcagctccagaaagccatctcccgatcccatcggtacatcctcttgacctcagcacagctggtgggcgtctgtctttacatctttgtacgtccgtaccacgtcccgttcatcagggatgtggccatcgacaccgtgaagaccggtatggggggaaaggcagggaataagggcgccgtgggtatccgctttcagttccacagcactagcttctgcttcatctgcagtcacctgacggctgggcagtctcaggtgaaggagaggaacgaagactaccgggagatcacgcacaagctctccttcccttcggggagaaacatattttcacacgattatgtgttttggtgtggcgatttcaactaccgcatcgatcttacttacgaagaagtcttctattttgttaaacgccaagactggaagaaacttatggaatttgatcagttacagctacagaaatcaagtgggaaaatttttaaagactttcatgaaggaaccattaacttcggacccacctacaagtatgacgttggatcggctgcctatgacacaagtgacaagtgccggaccccagcctggacagacagggtgctgtggtggaggaagaagcatccgtacgataagacagctggcgaactcaaccttctagacagtgatctagacggtgatgccaacatcagacatacctggtctccgggcactctcaagtactacggccgtgccgagctgcaggcatctgatcacagacctgtgctggccatcgtagaggtggaggttcaagaggtcgatgtgggagcccgggagagagtcttccaggaagtgtcctctgtccaaggcccgctggacgccactgttattgtaaaccttcagtctccaacccttgaagagagaaatgaatttccagaggacctgcgcacagaacttatgcagactttggggaattatgggacgattattctggtcaggatcaaccaagggcagatgctggtgacatttgcagacagccactcagctctcagtgtgctggatgtggatggtatgaaggtgaaaggcagggccgtgaagattcgaccaaagaccaaagattggctagaaggcttgagagaggagctcattcggaagcgggacagcatggcccctgtgtctcccaccgccaactcctgcttgttggaggagaactttgacttcacaagtctggactatgagtcagaaggggatgttcttgaagatgatgaagactacttagcggatgagtttggtcagcctgtagtctcagacagtgagcttggaggagacgactcttctgataccatgagcgcctcgacacctgccagcaagtctcccgcactggctaaaaagaagcaacatccaacgtacaaagctggcttaatggtgaagaagtctgcctcagatgcgtctatctcctccggaacccacgggcaatattccatcttgcagaccgcgaaacttcttccaggagcacctcagcaaccgcccaaggctcgaactggaataagtaaaccttacaacgtcaaacagatcaaaaccaccaatgctcaggaggcggaagcagctatccggtgtctcctggaagctggcggaggtgtcccagagtcagccccgggtgccacgcccctgagaaaccaagggtcttctaagccagaggcctccctggggcctccagtcctaccgcgccggcctgttccaagggttcccactatgaagaaaccaactttgaggagaacaggaaagatcgttttctgctctagctcacaagcttctcaaccttgctcactgctgcaaagacatgagtttgtaaggacagtagccgcccagagactgacacccgtagatgcttccggatcttccgtttgatctcagttctgggagcaggccacttgcccatgttaccagaagaacagtgtgaacagcagcctgtccattttacaatggcttcccaggaaatgaaccttgagacccctcctccaataacagctcccatcccgcctgttcccaaaccaagaacatttcagcctgggagaggtgttgagaggaggccgagtggtggcaagccagaaccggatgacgctcctcctgtgacaggcgctgtggagttatcgtctccagaggccccagaggccccgtccctggctcccaaggtgcctcctaggaggaagaagtctgcaccagcagccttccacctgcaggtcctgcagagcaacagccaacttctgcagggcctcacatgctccagcagttctccgtccccaccaaagcctgacacccccctgctctatccgcaaatggcacttggcacttcatctgctataagtcccgaaactgatggccccagagtgacggagcccgaggcagcctcttttcatggcgattacccagatcccttctggagccttctccaccaccccaagctgttgaataataatacctggctgtccaagagctctgagcctttagacttggggtccaggacccctgagaggacacacacagactcagcgcaggtcaatgcatcagtggttgagagggggcttccaccagaccatgggggtaaagacttcagtcactggatggccgccagtaacaaagacaagaggacaacattaggcgtttgacccacaggcaagaacatggcctgttggctctgtagatgctctcatttcaaacgctcaccttcctcatgtgggcattgcttgacctggtcaaaagggatgttgatgtaaaggcacactgaaaccctttgtttatctgtcactctgtgtagtgaatgaaaactgtctcccattcagtacagttatccagccacccaaacgttccattcaaggtctgtgcattttaagcttgctctcaggacactgggaaatgtgctgttgcattcgggatatggattttaaagggaagaaatctagattcccaagacgctctcatctgcggaattttaagtggttgttcaatatatgtttgtgtgccatttgcttgttggttttgtttgtgtttttacagatttgggataagtggttaggttcataaaagatgacatcaaaagcagtcgggaccttaagagctgttgtgacccacttgaaaccac

SEQ ID NO: 9072 - protein, 1248 aa, Rattus norvegicus
  ref <308>: DATABASE ACCESSION NUMBER: SWISS-Prot / O55207
  ref <309>: DATABASE ENTRY DATE: 2002-06-15
MALSKGLRLLARLDPTGPSSVLLEARGRGDCLLFEAGAVATLAPEEKEVIKGLYGKPTDAYGCLGELSLKSGGVPLSFLVLVTGCTSVGRIPDAEIYKITGTEFYPLQEEAKEEDRLPALKKILSSGVFYFAWPNDGACFDLTIRAQKQGDDCSEWGTSFFWNQLLHVPLRQHQVNCHDWLLKVICGVVTIRTVYASHKQAKACLISRISCERAGARFLTRGVNDDGHVSNFVETEQAIYMDDGVSSFVQIRGSVPLFWEQPGLQVGSHHLRLHRGLEANAPAFERHMVLLKEQYGQQVVVNLLGSRGGEEVLNRAFKKLLWASCHAGDTPMINFDFHQFAKGRKLEKLENLLRPQLKLHWDDFGVFAKGENVSPRFQKGTLRMNCLDCLDRTNTVQCFIALEVLHLQLESLGLNSKPITDRFVESFKAMWSLNGHGLSKVFTGSRALEGKAKVGKLKDGARSMSRTIQSNFFDGVKQEAIKLLLVGDVYNEESTDKGRMLLDNTALLGLGSNKQNSLSGMLDGKATPRILKAMTERQSEFTNFKRIQIAMGTWNVNGGKQFRSNLLGTTELTDWLLDAPQLSGAVDSQDDGGPADIFAVGFEEMVELSAGNIVNASTTNRKMWGEQLQKAISRSHRYILLTSAQLVGVCLYIFVRPYHVPFIRDVAIDTVKTGMGGKAGNKGAVGIRFQFHSTSFCFICSHLTAGQSQVKERNEDYREITHKLSFPSGRNIFSHDYVFWCGDFNYRIDLTYEEVFYFVKRQDWKKLMEFDQLQLQKSSGKIFKDFHEGTINFGPTYKYDVGSAAYDTSDKCRTPAWTDRVLWWRKKHPYDKTAGELNLLDSDLDGDANIRHTWSPGTLKYYGRAELQASDHRPVLAIVEVEVQEVDVGARERVFQEVSSVQGPLDATVIVNLQSPTLEERNEFPEDLRTELMQTLGNYGTIILVRINQGQMLVTFADSHSALSVLDVDGMKVKGRAVKIRPKTKDWLEGLREELIRKRDSMAPVSPTANSCLLEENFDFTSLDYESEGDVLEDDEDYLADEFGQPVVSDSELGGDDSSDTMSASTPASKSPALAKKKQHPTYKAGLMVKKSASDASISSGTHGQYSILQTAKLLPGAPQQPPKARTGISKPYNVKQIKTTNAQEAEAAIRCLLEAGGGVPESAPGATPLRNQGSSKPEASLGPPVLPRRPVPRVPTMKKPTLRRTGKIVFCSSSQASQPCSLLQRHEFVRTVAAQRLTPVDASGSSV

SEQ ID NO: 9073 - DNA, 6799 bp, Homo sapiens
  ref <308>: DATABASE ACCESSION NUMBER: EMBL / AL157424
  ref <309>: DATABASE ENTRY DATE: 2000-02-18
ctagatataatgggaggtgctttatagaaagtgcagcatatcctttgtctgattccaaacaaatgtagaagtctacgctagctagtagtaatggcagctgggaggtgcaggttctctccacccaggctcattttccacgctttgggtcatgggggacagctggtcctggactgtggcactaagaaagcatgactcctgccccgtcttcccttgaggggcagaacagggcagagtctgcacctgtgcccgtgcccagcatcacgcccaccccgctgcctttgcaggcacatggtgcttctgaaggagcagtacgggcagcaggtggtcgtgaaccttctgggaagcagaggcggagaggaggtgctcaacagagccttcaagaagctgctctgggcttcttgccacgcgggcgacacgcctatgatcaattttgacttccatcagtttgccaaaggtgggaagctagagaaattggagaccctcttgaggccacagttaaagctgcactgggaagacttcgatgtgttcacaaagggggagaacgtcagtccacggtgaggctcgctgcgcactgtgccgcgtcttctgctggggggaagcgtcagtccacgttttcagaaaggcactttgcggatgaactgtcttgactgcctggaccgaaccaacactgtgcagagcttcatcgcgctcgaggtcctgcatctgcagctcaagaccctggggctgagttcaaaacccatcgttgaccgctttgtggagtccttcaaagccatgtggtctctgaatggccacagcctgagcaaggtgttcacaggcagcagagccctggaagggaaggccaaggtggggaagctgaaggatggagcccggtccatgtctcgaaccatccagtccaacttcttcgacggggtgaagcaggaggccatcaagctgctgctggttggggacgtctacggcgaggaggtggcagacaaagggggcatgctgctggacagcacggcgctcctggtgactcccaggatcctgaaagctatgactgagcgtcagtccgaattcacaaatttcaagcggatccggattgctatggggacctggaacgtgaacggaggaaagcagttccggagcaacgtgctcaggacggcggagctgacagactggctgctcgactcgccccagctctcgggagctaccgactcccaggatgacagcagcccagctgacatatttgctgtggggtttgaagagatggtggaattgagcgcagggaatattgtcaatgccagtactaccaacaagaagatgtggggtgaacagcttcagaaagccatctcacgctctcatagatacattctgttgacttcggcacagctggtgggcgtctgtctttatatctttgtacgtccataccatgtcccgttcatcagggacgtagccatcgacacagtgaagacgggcatggggggcaaggcggggaacaagggcgccgtcggcatccgcttccagttccacagcaccagcttctgcttcatatgtagtcacctgacggccgggcagtcccaggtgaaggagcggaatgaagactacaaggagatcacccagaaactctgcttcccaatggggagaaatgttttttctcatgattatgtattttggtgtggcgatttcaactaccgcattgatcttacttatgaagaagtcttctattttgttaaacgccaagactggaagaaacttctggaatttgatcaactacagctacagaaatcaagtggaaaaatttttaaggactttcacgaaggagccattaactttggacccacctacaagtatgacgttggctcagccgcctacgatacaagcgacaaatgccgcacccccgcctggacagacagggtgctgtggtggaggaagaaacatccctttgataaaacagctggagaactcaaccttctagacagtgatctagatgttgacaccaaagtcagacacacctggtctcctggtgccctgcagtattatggtcgtgcggagctacaagcgtctgatcacagacctgtgctggcgatcgtggaggtggaagttcaggaagtcgatgtgggtgctcgggagagggttttccaggaagtgtcctccttccagggccccctggatgccactgttgtagtaaaccttcaatcaccgaccttagaagagaaaaacgagtttccagaggacctgcgtactgagctcatgcagaccttggggagttatgggacaattgttcttgtcaggatcaaccaagggcagatgctggtaacttttgcagacagtcactcggctctcagtgtcctggacgtggacggtatgaaggtgaaaggcagagcagtgaagattagaccgaagaccaaggactggctgaaaggtttgcgagaggagatcattcggaaacgagacagcatggcccccgtgtctcccactgccaactcctgtttgctggaggaaaactttgacttcacaagtttggactatgagtcagaaggggatattcttgaagacgatgaagactacttggtggatgaattcaatcagcctggggtctcggacagtgaactcgggggagacgacctctctgatgtccccggccccacagcactggctcctcccagcaagtcacctgctctcaccaaaaagaagcagcatccaacgtacaaagatgacgcggacctggtggagctcaagcgggagctggaagccgtcggggagttccgccaccgttctccgagcaggtctctgtcggtccccaaccggcctcggccacctcaaccccccgcagagacccccccctccaaccggtttaatggtgaaaaagtcggcttcagatgcgtccatctcctccggcacccatgggcagtattcaattttgcagacggcaagacttctaccaggagcacctcagcaacctcccaaggctcggactggaataagtaaaccttataatgtcaagcagatcaaaaccaccaatgcccaggaggcagaagcagcaaatccggtgtctcctggaagccagaggaggtgcctccgaagaagccctaagtgccgtggccccaagggaccttgaagcatcctctgaaccagagcccacaccgggggcagccaaaccagagaccccacaggcgcccccactccttccccgtcggcccccacccagagttcctgccatcaagaagccaaccttgagaaggacaggaaagcccctgtcaccggaagaacagtttgagcaacagactgtccattttacaatcgggcccccggagacaagcgttgaggcccctcctgtcgtgacagcccctcgagtccctcctgttcccaaaccaagaacatttcagcctgggaaagctgcagagaggccaagccacaggaagccagcatcagacgaagcccctcctggggcaggagcctctgtgccaccacctctggaggcgccgcctcttgtgcccaaggtacccccgaggaggaagaagtcagcccccgcagccttccacctgcaggtcctgcagagcaacagccagcttctccagggcctcacttacaatagcagtgacagcccctctgggcacccacctgcgcgggcaccgtcttcccacaaggggactttctcagcacttcatctgctacaagccccgacagcgatggcaccaaagcgatgaagccagaggcagccccacttcttggtgattatcaggaccccttctggaaccttcttcaccaccctaaactgttgaataacacttggctttctaagagctcagaccctttggactcaggaaccaggagccccaaaagagatcccatagacccagtgtcagctggcgcttcagctgccaaggcagagctgccaccagatcatgaacacaaaaccttaggtcactgggtgacaatcagtgaccaagaaaagaggacagcactgcaggtgtttgacccactggcaaaaacatgactgagcagctttgaaggctgcagtcctatagaatgcataccttcctccctctagacatccctccaccagaagagacatctatttaaaggcacactggccaaaacgtttgtgcatctgtcactctcgtgtagtttacaaaaatcgtgtctcttattcagtaagatggttactcagccaccaaaatatatttcactcaaggcttgtacatctgaagtttgctcttcaaggaatgggaaccttcctgttaaattcggtgtatggattttaagaaaggaatctagccaatgaggtccaagaagttctcacccattgaatttttaaatggctgttcagttcatgttgtacgtgatggagatttgtcttttgttttatttgcattttacagatttggtataacattttggggagccacctgaaggttgatgtataaagtaaggattagagaaagaggtcgttgtgaccattagtagctgtcctggcccacttaaacaaggttacaaaaaatcagagtcggaagcagccaaataggtcaacctaatgactagactgtacattcccatgagccttcatgtttaagtgtgtacatgtgcgttaaccttgatgatgcgtgaatcccgagggagccggtggcatacaccgttagcttaaccttagcttaaactagctgaaggctcctgtgccatgtcttagacattgcatgccctatcaattactataatcctgagccatggtgtgctactgaaaccaatttttatccaccatctagtccttattaaatgaaacctcacggatcctttgttccgcttatattccatgcataccacataaaagcacacagtgcgaaaactcttgctgatacgcgatattgattctcattgttagaatatggagagtgtttcagcctcgtctgtccggctggagcttcgggatggaaagtgctatgtgtccctgcatataagaatcaccaggccagtgtttctgggtttgcttgtctatatgtttgtctatattttttgcctatacatttttcccacgtttccaacagcacttctcacctattcaataactgaaaaagacattaccatagtgctttacatttttaaagtaatgttacaaggtctggaatccatttggagcagataccgtgttttcgctatttaataagaagttcagtagtgaaatcttactgtaccgcctgttgtatctgggagcctcgtacagaggctcgcacagcagtgatcaggtgtcatcccttacgtgactgggggatgtctgtcctaaaagctgactgctaggatagtaaggatcatcttgcctgggctatgccactgtcttgttaccaattagacatctggaatttcataattagttttcattgtcactgtcaagatatattgcagattacttaaatatggccatcaaaacaaaagttacaacacgtatctcttttcatctgaaaactaatacctggaaaaggataaaaaaaaaaaaaggaatccgtgacccacagagctagacagataagatgcatagttgaccagtcataaaaggcggtgtttaggtgatcaggatgccgttggtggcatttacgtgctttatatgatttttacctccgtaacaaacacaagaaataaacagaatggtccttaacagagtttgggggagagagcaagatgggttccttggagaagctgatttgccaagatgcacatcgctattaacagccagagtcataaatgaaatgaaattgaagaattcattcaaatgctcttttccctataacctcttttctcaccaaaaaggagataaatttgaaaacagataaatgtaacaaccagtcaaagaagcaggggaaaagtaagctcctccaaagttgcttgcagtgctggaaatagatctcatttttaggttttctcttcgttccagataccaaataaatgggacagagaataaaatttttgttaaaatatgtgctcatctcctaagtagctcttcagagtctgaccgtaagtaaaaacacacagaattgtgttgactgggggaggtgaatcacaaaaaagttacgaggagtttaagagttaaatattatttgatcgtggctgtcaaatttagtgaacaacatagattggatttggagttggtagtaggtatggttctcataccagaattctcttaaaaaaaaaaaaaaggacaattggaattgccttatttatttttaaaatcaatgcttactagttggtaggattcccaggtcagcagcagggttgattaaataatcttgacaatgagcagctgccatcttgggggattttcattctgtggttttttaaatgtttcgtctttgatgctaccatccagggcttcttattgtgaccttgtagcctattttgttcctgctgttctctaacatggtgcagttcacgcagactggtttaggtacttcacaactcaccattgtctctctgaccccaagcctagtcccttttacatcaccatcttctcagacttcttgcctattcttaaaatatgttttggttaatgattgaattaggacatcagcttaagcaattcctgtaacggtttaacgttgttgaagttcaaggcacataataaaattctccctgatgtgtgtgtaagtataaacaaagtaatgtatcaaagcgttcactttataatgaagtcatttcattgggaaggaaagctgcaaagattattgggggactagtgattaataaaatcctgtaatatttttgaagtgaaaatttgtactgaaattgtacatgatacctattaaatgtttttgtcttttttcaaaaaaaaaaa

SEQ ID NO: 9074 - protein, 1443 aa, Homo sapiens
  ref <308>: DATABASE ACCESSION NUMBER: SWISS-Prot / O15056
  ref <309>: DATABASE ENTRY DATE: 2002-06-15
YGKLTDAYGCLGELRLKSGGTSLSFLVLVTGCTSVGRIPDAEIYKITATDFYPLQEEAKEEERLIALKKILSSGVFYFSWPNDGSRFDLTVRTQKQGDDSSEWGNSFFWNQLLHVPLRQHQVSCCDWLLKIICGVVTIRTVYASHKQAKACLVSRVSCERTGTRFHTRGVNDDGHVSNFVETEQMIYMDDGVSSFVQIRGSVPLFWEQPGLQVGSHHLRLHRGLEANAPAFDRHMVLLKEQYGQQVVVNLLGSRGGEEVLNRAFKKLLWASCHAGDTPMINFDFHQFAKGGKLEKLETLLRPQLKLHWEDFDVFTKGENVSPRFQKGTLRMNCLDCLDRTNTVQSFIALEVLHLQLKTLGLSSKPIVDRFVESFKAMWSLNGHSLSKVFTGSRALEGKAKVGKLKDGARSMSRTIQSNFFDGVKQEAIKLLLVGDVYGEEVADKGGMLLDSTALLVTPRILKAMTERQSEFTNFKRIRIAMGTWNVNGGKQFRSNVLRTAELTDWLLDSPQLSGATDSQDDSSPADIFAVGFEEMVELSAGNIVNASTTNKKMWGEQLQKAISRSHRYILLTSAQLVGVCLYIFVRPYHVPFIRDVAIDTVKTGMGGKAGNKGAVGIRFQFHSTSFCFICSHLTAGQSQVKERNEDYKEITQKLCFPMGRNVFSHDYVFWCGDFNYRIDLTYEEVFYFVKRQDWKKLLEFDQLQLQKSSGKIFKDFHEGAINFGPTYKYDVGSAAYDTSDKCRTPAWTDRVLWWRKKHPFDKTAGELNLLDSDLDVDTKVRHTWSPGALQYYGRAELQASDHRPVLAIVEVEVQEVDVGARERVFQEVSSFQGPLDATVVVNLQSPTLEEKNEFPEDLRTELMQTLGSYGTIVLVRINQGQMLVTFADSHSALSVLDVDGMKVKGRAVKIRPKTKDWLKGLREEIIRKRDSMAPVSPTANSCLLEENFDFTSLDYESEGDILEDDEDYLVDEFNQPGVSDSELGGDDLSDVPGPTALAPPSKSPALTKKKQHPTYKDDADLVELKRELEAVGEFRHRSPSRSLSVPNRPRPPQPPQRPPPPTGLMVKKSASDASISSGTHGQYSILQTARLLPGAPQQPPKARTGISKPYNVKQIKTTNAQEAEAAIRCLLEARGGASEEALSAVAPRDLEASSEPEPTPGAAKPETPQAPPLLPRRPPPRVPAIKKPTLRRTGKPLSPEEQFEQQTVHFTIGPPETSVEAPPVVTAPRVPPVPKPRTFQPGKAAERPSHRKPASDEAPPGAGASVPPPLEAPPLVPKVPPRRKKSAPAAFHLQVLQSNSQLLQGLTYNSSDSPSGHPPAAGTVFPQGDFLSTSSATSPDSDGTKAMKPEAAPLLGDYQDPFWNLLHHPKLLNNTWLSKSSDPLDSGTRSPKRDPIDPVSAGASAAKAELPPDHEHKTLGHWVTISDQEKRTALQVFDPLAKT

SEQ ID NO: 9075 - DNA, 1050 bp, Rattus norvegicus
  ref <308>: DATABASE ACCESSION NUMBER: EMBL / U90610
  ref <309>: DATABASE ENTRY DATE: 2000-03-04
atggaaatatacacttcggataactactccgaagaagtagggtctggagactatgactccaacaaggaaccctgcttccgggatgaaaacgaaaacttcaacaggatcttcctgcccaccatctattttatcatcttcttgactggcatagtgggcaatgggttggtaatcctggtcatgggttaccagaagaagctgaggagcatgacagacaagtaccggctgcacctgtccgtggctgacctcctctttgtcatcacactccccttctgggcagtggacgccatggctgactggtactttgggaaatttttatgtaaggctgtgcatatcatctacaccgtcaacctttacagcagtgttctcatcctggccttcatcagcctggaccgctaccttgccattgtccacgccaccaacagccagagcgcgaggaagctgctggctgaaaaggccgtctatgtgggtgtctggatccccgccctcctcctgactatccctgacatcatcttcgccgatgtcagccagggggacggcaggtacatctgtgaccgcctttaccccgacagcctgtggatggtggtgttccagttccagcacatcatggtgggtctcatcctgccgggcatcgtcatcctgtcctgttactgcatcatcatctccaagctgtcacactccaagggccaccagaagcgcaaggccctcaagactacggtcatccttatcctggctttctttgcctgctggctaccgtattacgtggggatcagcatcgattccttcatccttttggaggtcatcaagcaaggatgtgagttcgagagcgtcgtgcacaagtggatctccatcacggaggccctcgccttcttccactgttgcctgaaccccatcctctacgccttcctcggggccaaattcaagagctccgcgcagcatgcactcaattccatgagcagaggctccagcctcaagatcctttccaaagggaaacggggtggacactcttccgtctccacagagtcagaatcctcaagttttcactccagctaa

SEQ ID NO: 9076 - protein, 349 aa, Rattus norvegicus
  ref <308>: DATABASE ACCESSION NUMBER: SWISS-Prot / O08565
  ref <309>: DATABASE ENTRY DATE: 2001-10-16
MEIYTSDNYSEEVGSGDYDSNKEPCFRDENENFNRIFLPTIYFIIFLTGIVGNGLVILVMGYQKKLRSMTDKYRLHLSVADLLFVITLPFWAVDAMADWYFGKFLCKAVHIIYTVNLYSSVLILAFISLDRYLAIVHATNSQSARKLLAEKAVYVGVWIPALLLTIPDIIFADVSQGDGRYICDRLYPDSLWMVVFQFQHIMVGLILPGIVILSCYCIIISKLSHSKGHQKRKALKTTVILILAFFACWLPYYVGISIDSFILLEVIKQGCEFESVVHKWISITEALAFFHCCLNPILYAFLGAKFKSSAQHALNSMSRGSSLKILSKGKRGGHSSVSTESESSSFHSS

SEQ ID NO: 9077 - DNA, 1670 bp, Homo sapiens
  ref <308>: DATABASE ACCESSION NUMBER: EMBL / L06797
  ref <309>: DATABASE ENTRY DATE: 1999-07-01
cggcacgaggcaagtgacgccgagggcctgagtgctccagtagccaccgcatctggagaaccagcggttaccatggaggggatcagtatatacacttcagataactacaccgaggaaatgggctcaggggactatgactccatgaaggaaccctgtttccgtgaagaaaatgctaatttcaataaaatcttcctgcccaccatctactccatcatcttcttaactggcattgtgggcaatggattggtcatcctggtcatgggttaccagaagaaactgagaagcatgacggacaagtacaggctgcacctgtcagtggccgacctcctctttgtcatcacgcttcccttctgggcagttgatgccgtggcaaactggtactttgggaacttcctatgcaaggcagtccatgtcatctacacagtcaacctctacagcagtgtcctcatcctggccttcatcagtctggaccgctacctggccatcgtccacgccaccaacagtcagaggccaaggaagctgttggctgaaaaggtggtctatgttggcgtctggatccctgccctcctgctgactattcccgacttcatctttgccaacgtcagtgaggcagatgacagatatatctgtgaccgcttctaccccaatgacttgtgggtggttgtgttccagtttcagcacatcatggttggccttatcctgcctggtattgtcatcctgtcctgctattgcattatcatctccaagctgtcacactccaagggccaccagaagcgcaaggccctcaagaccacagtcatcctcatcctggctttcttcgcctgttggctgccttactacattgggatcagcatcgactccttcatcctcctggaaatcatcaagcaagggtgtgagtttgagaacactgtgcacaagtggatttccatcaccgaggccctagctttcttccactgttgtctgaaccccatcctctatgctttccttggagccaaatttaaaacctctgcccagcacgcactcacctctgtgagcagagggtccagcctcaagatcctctccaaaggaaagcgaggtggacattcatctgtttccactgagtctgagtcttcaagttttcactccagctaacacagatgtaagagacttttttttatacgataaataacttttttttaagttacacatttttcagatataaaagactgaccaatattgtacagtttttattgcttgttggatttttgctcttgtgtttctttagtttttcgtgaaggtttaattgacttatttatataaattttttttgtttcatattgatgtgtgtctaggcaggacctgtggccaagttcttagttgctgtatgtctcgtggtaggactgtagaaaagggaactgaacattccagagcgtgtagtgaatcacgtaaagctagaaatgatccccagctgtttatgcatagataatctctccattcccgtggaacgtttttcctgttcttaagacgtgattttgctgtagaagatggcacttataaccaaagcccaaagtggtatagaaatgctggtttttcagttttcaggagtgggttgatttcagcacctacagtgtacagtcttgtattaagttgttaataaaagtacatgttaaacttaaaaaaaaaaaaaaaaa

SEQ ID NO: 9078 - protein, 352 aa, Homo sapiens
  ref <308>: DATABASE ACCESSION NUMBER: SWISS-Prot / P30991
  ref <309>: DATABASE ENTRY DATE: 2002-06-15
MEGISIYTSDNYTEEMGSGDYDSMKEPCFREENANFNKIFLPTIYSIIFLTGIVGNGLVILVMGYQKKLRSMTDKYRLHLSVADLLFVITLPFWAVDAVANWYFGNFLCKAVHVIYTVNLYSSVLILAFISLDRYLAIVHATNSQRPRKLLAEKVVYVGVWIPALLLTIPDFIFANVSEADDRYICDRFYPNDLWVVVFQFQHIMVGLILPGIVILSCYCIIISKLSHSKGHQKRKALKTTVILILAFFACWLPYYIGISIDSFILLEIIKQGCEFENTVHKWISITEALAFFHCCLNPILYAFLGAKFKTSAQHALTSVSRGSSLKILSKGKRGGHSSVSTESESSSFHSS

SEQ ID NO: 9079 - DNA, 1050 bp, Rattus norvegicus; identical to SEQ ID NO: 9075
  ref <308>: DATABASE ACCESSION NUMBER: EMBL / U90610
  ref <309>: DATABASE ENTRY DATE: 2000-03-04

SEQ ID NO: 9080 - protein, 349 aa, Rattus norvegicus; identical to SEQ ID NO: 9076
  ref <308>: DATABASE ACCESSION NUMBER: SWISS-Prot / O08565
  ref <309>: DATABASE ENTRY DATE: 2001-10-16

SEQ ID NO: 9081 - DNA, 1670 bp, Homo sapiens; identical to SEQ ID NO: 9077
  ref <308>: DATABASE ACCESSION NUMBER: EMBL / L06797
  ref <309>: DATABASE ENTRY DATE: 1999-07-01

SEQ ID NO: 9082 - protein, 352 aa, Homo sapiens; identical to SEQ ID NO: 9078
  ref <308>: DATABASE ACCESSION NUMBER: SWISS-Prot / P30991
  ref <309>: DATABASE ENTRY DATE: 2002-06-15

SEQ ID NO: 9083 - DNA, 4413 bp, Rattus norvegicus
  misc_feature (1)..(4413): n=a, c, g or t
  ref <308>: DATABASE ACCESSION NUMBER: EMBL / U90725
  ref <309>: DATABASE ENTRY DATE: 2000-07-07
ggcgtcttgttcctgtttcgccacagttcctaccttatgagcttggattcctcacgctaataaaagaggagcagtaaaagctggcaggctgacagaggcaacctcaggacggactttctggctactgaccattttgctgtgtcttactaggattgtgtgtggacgtgagatcaaccatgagctccgttgcagttttgacccaagagagttttgctgaacatcgaagtgggctggttccacaacaaatcatagttgccacattaaattcagaagaagaaagtgaccctccaacctacaaggatgccttccctccactgcctgagaaagcagcttgcttggaaagtgcccaagaacctgctggagcctggagtaacaagatccggcccatcaaggcctctgtcatcactcaggtgtttcatgtacccctggaggagagaaaatataaggacatgaaccagtttggagaaggtgaacaagcaaaaatctgccttgagatcatgcaaaggactggtgctcacctggagctctctctggctaaagaccaaggtctctccatcatggtctcagggaagctggatgcagtcatgaaagcccggaaagacattgttgctagactacagacacaggcctcagccactgttcccattcctaaagagcaccaccgctttgttattggcaaaaacggagaaaaactacaagacttagaactgaaaactgctaccaaaatccagatcccacgcccagatgaccccagtaatcagatcaagatcactggcaccaaagaaggnatcgagaaagctcgccatgaggtccttctgatctctgctgagcaggacaagcgtgccgtaaagaggctagaagtggagaaggccttccaccccttcatcgctgggccgtacaatagacttgtgggtgaaatcatgcaggaaacagggacgcgaatcaacatccctccacccagtgttaaccgtacagaaatcgtcttcactggagaaaaggaacagctggctcaggctgtggctcgtattaagaagatttatgaggaaaagaagaagaagactacgaccattgcggtagaggtgaagaaatctcaacacaagtatgtcatcgggccgaagggcaactcactgcaagagatcctggaacgtactggagtctccgttgagatcccgccctcagacagcatctccgagactgtgatacttagaggcgagcctgaaaagctgggacaggcattgactgaagtctatgccaaggccaacagttttacagtgtcctcagtctctgccccttcctggcttcaccgtttcatcattggtaagaaagggcagaacctggccaaaatcactcaccaaatgccaaaggttcacattgagttcacagaaggtgaggacaagatcaccctggagggccccacagaagatgtgaatgttgcccaggaacagattgaaggaatggtcaaagacctgattaatcggatggactatgtagaaatcaacattgaccataaattccacagacacctcattgggaagagtggagccaacatcaacagaatcaaagaccagtacaaagtgtctgtgcgcatcccccctgacagcgagaagagtaacctgatccgaattgagggagacccacaaggtgtgcaacaggccaagcgggagctgctggagcttgcttctcgcatggaaaatgagcgcaccaaggatctaatcattgagcaaagatttcatcgcacaatcattgggcagaaaggtgaacggattcgagaaattcgtgacaaattcccagaggtgatcatcaactttccggatccagcacaaaagagtgagattgttcaactcagaggccccaagaatgaggtggagaaatgtaccaagtacatgcagaaaatggttgcagatctggtggaaaatagctattcaatttctgtaccgatcttcaaacagtttcacaagaatatcattgggaaaggaggtgcaaacattaaaaagattcgtgaagagagcaacaccaagattgaccttcctgccgagaacagcaactcggagaccattgtcatcactggcaagcgagccaactgtgaagccgcccggagccggatcctgtccatccagaaagatctggccaacatagctgaggtggaggtctcaatccctgccaaactacacaactctctcattggcaccaagggtcgtctgatccgctccatcatggaggaatgtggtggcgtccatattcactttcctgtggaaggttctggtagtgacactgttgtcatcaggggtccttcctcagatgtggagaaggccaagaagcagcttctgcacctggctgaggagaagcaaaccaagagttttactgtggatatccgggccaagccagaataccacaaattcctcattggcaaagggggaggtaaaatccgcaaggtgcgcgacagtactggagcccgcattatatttccggctgctgaggataaggaccaggacctgataacaatcataggaaaggaagatgctgtccgtgaggcacaaaaggagctggaagcattgatccagaacctggataatgtggttgaagactacatgctggtggaccccagacaccaccgccattttgttatccgaagaggacaggtattacgagagattgctgaagaatatggcggggtgatggtcagcttcccacgctctggcacacagagtgacaaagtcactctcaagggtgccaaagactgtgtggaggcagccaagaagcgaattcaggaaatcattgaggatctggaagctcaagtaacgctggaatgtgctataccccagaagtttcatcgttcggtcatgggtcccaaaggttcaagaatccagcagatcactcgggactacaatgttcaaattaagttcccagacagagaggaaaacccagttcacagtgtagagccttccatccaggagaatggagatgaggctggagagggcagagaggccaaggagaccgacccgggatctcccaggaggtgtgacatcatagttatctctggccggaaagagaaatgtgaggctgccaaggaagccctggaggcactggttccagtcaccatcgaggtagaggtaccctttgatcttcaccgctacatcattgggcagaaaggaagtggaatccgcaagatgatggatgagtttgaggtgaatatacatgtgccagcccccgaactgcagtcacacaccattgccatcactggccttgcagcaaatttggacagggctaaggcggggctactggatcgagtaaaggagctgcaggctgagcaggaagatcgggctttaaggagttttaagctgagtgtcactgtagaccccaaataccatcccaaaattatcgggggaaaaggggcagtgatcacacagatccgattggaacatgatgtgaacatccaatttcctgataaggacgatgggaatcagccccaggaccaaatcaccatcacagggtatgagaagaacactgaagctgcccgtgatgctatcctgaaaattgtgggtgagcttgagcagatggtttctgaggatgttcccttggatcaccgtgtgcatgcccgaatcattggtgccagaggcaaagccatccggaaaatcatggatgagttcaaggtggacattcgcttcccacagagcggagctccagaccctaactgcgtcactgtgacaggactcccggagaatgtggaggaagctatcgaccatatcctcaacctagaagaggaatatctggctgatgtggtggacagtgaggcgctgcaagtttacatgaagcccccagcacatgaagagtccaaggcaccatccaaaggctttgtggtgcgagatgctccctggacctccaacagcagtgagaaggctcctgatatgagcagctctgaagaaattcccacctttggggctcaagtggcccccaagaccctcccgtggggccccaaacgataatgatcaaaaagaaactttccagcctgctgcccaaacccaaccacacaatggtttgtctcaatctgactcagcagctggaccctcgtaaattgttgatgctccccctccccgaagtctcgcagcaaagcctggtgggctggccttctgtggctgcttcccctggcctggtcagcacccgcaggctcagggtctgctcctgacgctgtgctctgggaaagtgcacgccactgcgtgaaacactaagcaaggtaatcgagcatttcgtgatcacagactccagcttcctggtccacccagcatgtagtcagcattctgactttcacagcagagttccacagcggctaggagttgacttccttgtgtcatgacctcaggaaataaatttccttgactttataaaagccaaaaaaaaaaaaaaaaaaaaaaaaaa

SEQ ID NO: 9084 - protein, 1268 aa, Rattus norvegicus
  ref <308>: DATABASE ACCESSION NUMBER: SWISS-Prot / AAD09246
  ref <309>: DATABASE ENTRY DATE: 2003-02-01
MSSVAVLTQESFAEHRSGLVPQQIIVATLNSEEESDPPTYKDAFPPLPEKAACLESAQEPAGAWSNKIRPIKASVITQVFHVPLEERKYKDMNQFGEGEQAKICLEIMQRTGAHLELSLAKDQGLSIMVSGKLDAVMKARKDIVARLQTQASATVPIPKEHHRFVIGKNGEKLQDLELKTATKIQIPRPDDPSNQIKITGTKEGIEKARHEVLLISAEQDKRAVKRLEVEKAFHPFIAGPYNRLVGEIMQETGTRINIPPPSVNRTEIVFTGEKEQLAQAVARIKKIYEEKKKKTTTIAVEVKKSQHKYVIGPKGNSLQEILERTGVSVEIPPSDSISETVILRGEPEKLGQALTEVYAKANSFTVSSVSAPSWLHRFIIGKKGQNLAKITHQMPKVHIEFTEGEDKITLEGPTEDVNVAQEQIEGMVKDLINRMDYVEINIDHKFHRHLIGKSGANINRIKDQYKVSVRIPPDSEKSNLIRIEGDPQGVQQAKRELLELASRMENERTKDLIIEQRFHRTIIGQKGERIREIRDKFPEVIINFPDPAQKSEIVQLRGPKNEVEKCTKYMQKMVADLVENSYSISVPIFKQFHKNIIGKGGANIKKIREESNTKIDLPAENSNSETIVITGKRANCEAARSRILSIQKDLANIAEVEVSIPAKLHNSLIGTKGRLIRSIMEECGGVHIHFPVEGSGSDTVVIRGPSSDVEKAKKQLLHLAEEKQTKSFTVDIRAKPEYHKFLIGKGGGKIRKVRDSTGARIIFPAAEDKDQDLITIIGKEDAVREAQKELEALIQNLDNVVEDYMLVDPRHHRHFVIRRGQVLREIAEEYGGVMVSFPRSGTQSDKVTLKGAKDCVEAAKKRIQEIIEDLEAQVTLECAIPQKFHRSVMGPKGSRIQQITRDYNVQIKFPDREENPVHSVEPSIQENGDEAGEGREAKETDPGSPRRCDIIVISGRKEKCEAAKEALEALVPVTIEVEVPFDLHRYIIGQKGSGIRKMMDEFEVNIHVPAPELQSHTIAITGLAANLDRAKAGLLDRVKELQAEQEDRALRSFKLSVTVDPKYHPKIIGGKGAVITQIRLEHDVNIQFPDKDDGNQPQDQITITGYEKNTEAARDAILKIVGELEQMVSEDVPLDHRVHARIIGARGKAIRKIMDEFKVDIRFPQSGAPDPNCVTVTGLPENVEEAIDHILNLEEEYLADVVDSEALQVYMKPPAHEESKAPSKGFVVRDAPWTSNSSEKAPDMSSSEEIPTFGAQVAPKTLPWGPKR

SEQ ID NO: 9085 - DNA, 4354 bp, Homo sapiens
  ref <308>: DATABASE ACCESSION NUMBER: EMBL / M64098
  ref <309>: DATABASE ENTRY DATE: 1999-07-02
gaattcggggggcgagtaagccagcggcaggaccagcgggcgggggccacaacaaaagctggcaggctgacagaggcggcctcaggacggaccttctggctactgaccgttttgctgtggttttcccggattgtgtgtaggtgtgagatcaaccatgagttccgttgcagttttgacccaagagagttttgctgaacaccgaagtgggctggttccgcaacaaatcaaagttgccactctaaattcagaagaggagagcgaccctccaacctacaaggatgccttccctccacttcctgagaaagctgcttgcctggaaagtgcccaggaacccgctggagcctgggggaacaagatccgacccatcaaggcttctgtcatcactcaggtgttccatgtacccctggaggagagaaaatacaaggatatgaaccagtttggagaaggtgaacaagcaaaaatctgccttgagatcatgcagagaactggtgctcacttggagctgtctttggccaaagaccaaggcctctccatcatggtgtcaggaaagctggatgctgtcatgaaagctcggaaggacattgttgctagactgcagactcaggcctcagcaactgttgccattcccaaagaacaccatcgctttgttattggcaaaaatggagagaaactgcaagacttggagctaaaaactgcaaccaaaatccagatcccacgcccagatgaccccagcaatcagatcaagatcactggcaccaaagagggcatcgagaaagctcgccatgaagtcttactcatctctgccgagcaggacaaacgtgctgtggagaggctagaagtagaaaaggcattccaccccttcatcgctgggccgtataatagactggttggcgagatcatgcaggagacaggcacgcgcatcaacatccccccacccagcgtgaaccggacagagattgtcttcactggagagaaggaacagttggctcaggctgtggctcgcatcaagaagatttatgaggagaagaaaaagaagactacaaccattgcagtggaagtgaagaaatcccaacacaagtatgtcattgggcccaagggcaattcattgcaggagatccttgagagaactggagtttccgttgagatcccaccctcagacagcatctctgagactgtaatacttcgaggcgaacctgaaaagttaggtcaggcgttgactgaagtctatgccaaggccaatagcttcaccgtctcctctgtcgccgccccttcctggcttcaccgtttcatcattggcaagaaagggcagaacctggccaaaatcactcagcagatgccaaaggttcacatcgagttcacagagggcgaagacaagatcaccctggagggccctacagaggatgtcaatgtggcccaggaacagatagaaggcatggtcaaagatttgattaaccggatggactatgtggagatcaacatcgaccacaagttccacaggcacctcattgggaagagcggtgccaacataaacagaatcaaagaccagtacaaggtgtccgtgcgcatccctcctgacagtgagaagagcaatttgatccgcatcgagggggacccacagggcgtgcagcaggccaagcgagagctgctggagcttgcatctcgcatggaaaatgagcgtaccaaggatctaatcattgagcaaagatttcatcgcacaatcattgggcagaagggtgaacggatccgtgaaattcgtgacaaattcccagaggtcatcattaactttccagacccagcacaaaaaagtgacattgtccagctcagaggacctaagaatgaggtggaaaaatgcacaaaatacatgcagaagatggtggcagatctggtggaaaatagctattcaatttctgttccgatcttcaaacagtttcacaagaatatcattgggaaaggaggcgcaaacattaaaaagattcgtgaagaaagcaacaccaaaatcgaccttccagcagagaatagcaattcagagaccattatcatcacaggcaagcgagccaactgcgaagctgcccggagcaggattctgtctattcagaaagacctggccaacatagccgaggtagaggtctccatccctgccaagctgcacaactccctcattggcaccaagggccgtctgatccgctccatcatggaggagtgcggcggggtccacattcactttcccgtggaaggttcaggaagcgacaccgttgttatcaggggcccttcctcggatgtggagaaggccaagaagcagctcctgcatctggcggaggagaagcaaaccaagagtttcactgttgacatccgcgccaagccagaataccacaaattcctcatcggcaaggggggcggcaaaattcgcaaggtgcgcgacagcactggagcacgtgtcatcttccctgcggctgaggacaaggaccaggacctgatcaccatcattggaaaggaggacgccgtccgagaggcacagaaggagctggaggccttgatccaaaacctggataatgtggtggaagactccatgctggtggaccccaagcaccaccgccacttcgtcatccgcagaggccaggtcttgcgggagattgctgaagagtatggcggggtgatggtcagcttcccacgctctggcacacagagcgacaaagtcaccctcaagggcgccaaggactgtgtggaggcagccaagaaacgcattcaggagatcattgaggacctggaagctcaggtgacattagaatgtgctataccccagaaattccatcgatctgtcatgggccccaaaggttccagaatccagcagattactcgggatttcagtgttcaaattaaattcccagacagagaggagaacgcagttcacagtacagagccagttgtccaggagaatggggacgaagctggggaggggagagaggctaaagattgtgaccccggctctccaaggaggtgtgacatcatcatcatctctggccggaaagaaaagtgtgaggctgccaaggaagctctggaggcattggttcctgtcaccattgaagtagaggtgccctttgaccttcaccgttacgttattgggcagaaaggaagtgggatccgcaagatgatggatgagtttgaggtgaacatacatgtcccggcacctgagctgcagtctgacatcatcgccatcacgggcctcgctgcaaatttggaccgggccaaggctggactgctggagcgtgtgaaggagctacaggccgagcaggaggaccgggctttaaggagttttaagctgagtgtcactgtagaccccaaataccatcccaagattatcgggagaaagggggcagtaattacccaaatccggttggagcatgacgtgaacatccagtttcctgataaggacgatgggaaccagccccaggaccaaattaccatcacagggtacgaaaagaacacagaagctgccagggatgctatactgagaattgtgggtgaacttgagcagatggtttctgaggacgtcccgctggaccaccgcgttcacgcccgcatcattggtgcccgcggcaaagccattcgcaaaatcatggacgaattcaaggtggacattcgcttcccacagagcggagccccagaccccaactgcgtcactgtgacggggctcccagagaatgtggaggaagccatcgaccacatcctcaatctggaggaggaatacctagctgacgtggtggacagtgaggcgctgcaggtatacatgaaacccccagcacacgaagaggccaaggcaccttccagaggctttgtggtgcgggacgcaccctggaccgccagcagcagtgagaaggctcctgacatgagcagctctgaggaatttcccagctttggggctcaggtggctcccaagaccctcccttggggccccaaacgataatgatcaaaaagaacagaaccctctccagcctgctgacccgaacccaaccacacaatggtttgtctcaatctgacccagcggctggaccctccgtaaattgttgagcgctcttccccttcccgaggtccgcagggagcctagcgcctggctgtgtgtgcggccgctcctccaggcctggccgtgcccgctcaggacctgctccactgtttaacaataaaccaaggtcatgagcattcgagctaagataacagactccagctcctggtccacccggcatgtcagtcagcactctggccttcatcacgagagctccgcagccgtggctaggattccacttcctgtgtcatgacctcaggaaataaacgtccttgactttataaaagccccgaattc

SEQ ID NO: 9086 - protein, 1268 aa, Homo sapiens
  ref <308>: DATABASE ACCESSION NUMBER: SWISS-Prot / Q00341
  ref <309>: DATABASE ENTRY DATE: 2002-06-15
MSSVAVLTQESFAEHRSGLVPQQIKVATLNSEEESDPPTYKDAFPPLPEKAACLESAQEPAGAWGNKIRPIKASVITQVFHVPLEERKYKDMNQFGEGEQAKICLEIMQRTGAHLELSLAKDQGLSIMVSGKLDAVMKARKDIVARLQTQASATVAIPKEHHRFVIGKNGEKLQDLELKTATKIQIPRPDDPSNQIKITGTKEGIEKARHEVLLISAEQDKRAVERLEVEKAFHPFIAGPYNRLVGEIMQETGTRINIPPPSVNRTEIVFTGEKEQLAQAVARIKKIYEEKKKKTTTIAVEVKKSQHKYVIGPKGNSLQEILERTGVSVEIPPSDSISETVILRGEPEKLGQALTEVYAKANSFTVSSVAAPSWLHRFIIGKKGQNLAKITQQMPKVHIEFTEGEDKITLEGPTEDVNVAQEQIEGMVKDLINRMDYVEINIDHKFHRHLIGKSGANINRIKDQYKVSVRIPPDSEKSNLIRIEGDPQGVQQAKRELLELASRMENERTKDLIIEQRFHRTIIGQKGERIREIRDKFPEVIINFPDPAQKSDIVQLRGPKNEVEKCTKYMQKMVADLVENSYSISVPIFKQFHKNIIGKGGANIKKIREESNTKIDLPAENSNSETIIITGKRANCEAARSRILSIQKDLANIAEVEVSIPAKLHNSLIGTKGRLIRSIMEECGGVHIHFPVEGSGSDTVVIRGPSSDVEKAKKQLLHLAEEKQTKSFTVDIRAKPEYHKFLIGKGGGKIRKVRDSTGARVIFPAAEDKDQDLITIIGKEDAVREAQKELEALIQNLDNVVEDSMLVDPKHHRHFVIRRGQVLREIAEEYGGVMVSFPRSGTQSDKVTLKGAKDCVEAAKKRIQEIIEDLEAQVTLECAIPQKFHRSVMGPKGSRIQQITRDFSVQIKFPDREENAVHSTEPVVQENGDEAGEGREAKDCDPGSPRRCDIIIISGRKEKCEAAKEALEALVPVTIEVEVPFDLHRYVIGQKGSGIRKMMDEFEVNIHVPAPELQSDIIAITGLAANLDRAKAGLLERVKELQAEQEDRALRSFKLSVTVDPKYHPKIIGRKGAVITQIRLEHDVNIQFPDKDDGNQPQDQITITGYEKNTEAARDAILRIVGELEQMVSEDVPLDHRVHARIIGARGKAIRKIMDEFKVDIRFPQSGAPDPNCVTVTGLPENVEEAIDHILNLEEEYLADVVDSEALQVYMKPPAHEEAKAPSRGFVVRDAPWTASSSEKAPDMSSSEEFPSFGAQVAPKTLPWGPKR

SEQ ID NO: 9087 - DNA, 4413 bp, Rattus norvegicus; identical to SEQ ID NO: 9083
  misc_feature (1)..(4413): n=a, c, g or t
  ref <308>: DATABASE ACCESSION NUMBER: EMBL / U90725
  ref <309>: DATABASE ENTRY DATE: 2000-07-07

SEQ ID NO: 9088 - protein, 1268 aa, Rattus norvegicus; identical to SEQ ID NO: 9084
  ref <308>: DATABASE ACCESSION NUMBER: SWISS-Prot / AAD09246
  ref <309>: DATABASE ENTRY DATE: 2003-02-01

SEQ ID NO: 9089 - DNA, 4354 bp, Homo sapiens; identical to SEQ ID NO: 9085
  ref <308>: DATABASE ACCESSION NUMBER: EMBL / M64098
  ref <309>: DATABASE ENTRY DATE: 1999-07-02

SEQ ID NO: 9090 - protein, 1268 aa, Homo sapiens; identical to SEQ ID NO: 9086
  ref <308>: DATABASE ACCESSION NUMBER: SWISS-Prot / Q00341
  ref <309>: DATABASE ENTRY DATE: 2002-06-15

SEQ ID NO: 9091 - DNA, 1759 bp, Rattus norvegicus
  ref <308>: DATABASE ACCESSION NUMBER: EMBL / U90829
  ref <309>: DATABASE ENTRY DATE: 1999-01-28
ctacttacgcggctctgctgatcgtggggcaagcgcggccatggctcagcaagggaagatactcaaggagcaaaagtacgaccggcagctgaggttgtggggtgatcatggtcaagaagctttggaatctgctcacgtttgcttgataaatgccacagctacaggaacggaaattcttaaaaacttggtactgccaggtataggatcatttacaattatcgatggaaatcaggtcagcggagaagatgttggaaacaattttttccttcaaaaatgcagtattggcaagaatcgagctcaagctgccatggaattcttacaagagctaaatagcgatgtctctggaagttttgtggaagagagtccagaaaaccttctagacaatgatccttcatttttctgtaggtttactattgtggttgcaactcagcttcttgaaagtacattactacgtttagcagatgtcctctggaattcccagatccctcttttgatctgtaggacatatggcctagttggttatatgaggattattataaaagaacatccagtaatagaatctcatccagataatgcattggaggacctacgactagataagccatttcctgaactgagagaacattttcagtcttatgacttggaccatatggaaaaaaaggaccatagccatactccatggattgtgatcatagctaaatatttagcccagtggtatagtgagacaaatggacgaattcctaaaagttataaagaaaaagaggacttcagagaattgataagacaagggattttaaagaatgagaatggagctccagaagatgaagagaattttgaagaagctattaaaaatgtgaacacagcactaaatacaactcagatcccaagcagtattgaagatatatttaatgatgatcgctgcataaatatcaccaaacagaccccatctttttggattttagctcgtgccttaaaggaatttgtggccaaggagggtcaaggaaatttacctgttcgaggcacaattcctgatatgattgcagattcaaacaaatacataaaattgcagaatgtttatcgtgagaaagcaaagaaagatgctgctgctgtaggtaatcatgttgccaaattgcttcagtcttgtggccaggcaccagagtccatttcagagaaagaattaaaactgctttgtagcaattctgcatttcttcgagtggtaagatgtcggtctttagctgaagagtatggtttgcatacagtcaacaaagatgaaattatttctagcatggacaatccggataatgagatagtcctgtacctaatgttgcgggctgttgatcgatttcataagcagcatggcagatacccaggagtatctaactatcaagttgaagaagatatagggaagttgaagtcctgtcttactggcttccttcaggaatatgggttgtctgtaatggtgaaggacgattatgtccatgaattttgccggtacggagctgctgagccacacaccgttgctgcattcctgggaggagctgctgctcaagaagttatcaaaataatcaccaaacaatttgtaatttttaacaatacttatatttatagtggtatgtcacaaacttctgcaactttccaattgtagaataagcaccccgtgtaatatgttaatggttgaaactgtaattgtcttcctgttgtgctttactttgtaaacatctgtttagggacagaagttaagttgtttccttaataaaat

SEQ ID NO: 9092 - protein, 534 aa, Rattus norvegicus
  ref <308>: DATABASE ACCESSION NUMBER: SWISS-Prot / AAD09247
  ref <309>: DATABASE ENTRY DATE: 2002-06-01
MAQQGKILKEQKYDRQLRLWGDHGQEALESAHVCLINATATGTEILKNLVLPGIGSFTIIDGNQVSGEDVGNNFFLQKCSIGKNRAQAAMEFLQELNSDVSGSFVEESPENLLDNDPSFFCRFTIVVATQLLESTLLRLADVLWNSQIPLLICRTYGLVGYMRIIIKEHPVIESHPDNALEDLRLDKPFPELREHFQSYDLDHMEKKDHSHTPWIVIIAKYLAQWYSETNGRIPKSYKEKEDFRELIRQGILKNENGAPEDEENFEEAIKNVNTALNTTQIPSSIEDIFNDDRCINITKQTPSFWILARALKEFVAKEGQGNLPVRGTIPDMIADSNKYIKLQNVYREKAKKDAAAVGNHVAKLLQSCGQAPESISEKELKLLCSNSAFLRVVRCRSLAEEYGLHTVNKDEIISSMDNPDNEIVLYLMLRAVDRFHKQHGRYPGVSNYQVEEDIGKLKSCLTGFLQEYGLSVMVKDDYVHEFCRYGAAEPHTVAAFLGGAAAQEVIKIITKQFVIFNNTYIYSGMSQTSATFQL

SEQ ID NO: 9093 - DNA, 1823 bp, Homo sapiens
  ref <308>: DATABASE ACCESSION NUMBER: EMBL / U50939
  ref <309>: DATABASE ENTRY DATE: 1999-06-30
gaattccgcgcttgtggagctggtggcggcgctccgcaggggctcggctgttttccgcgcggcaggcgcggccatggcgcagctgggaaagctgctcaaggagcagaagtacgaccggcagctgaggttgtggggtgatcatgggcaagaggctttagaatctgctcatgtttgcctaataaatgcaacagccacaggaactgaaattcttaaaaacttggtactaccaggtattggttcgtttacaattattgatggaaatcaggtcagcggagaagatgctggaaacaatttcttccttcaaagaagcagtatcggcaagaaccgagctgaagctgccatggaattcttacaagaattaaatagcgatgtctctggaagttttgtggaagagagtccagaaaaccttctagacaatgatccctcatttttctgtaggtttactgttgtagttgcaactcagcttcctgaaagcacttcactacgcttagcagatgtcctctggaattcccagattcctcttttgatctgtaggacatatggactagttggttatatgaggatcattataaaagaacatccagtaatagaatctcatccagataatgcattagaggatctacgactagataagccatttcctgaactgagagaacattttcagtcctatgatttggatcatatggaaaaaaaggaccacagtcatactccatggattgtgatcatagctaaatatttagcacagtggtatagtgaaacaaatggacgaatacctaaaacgtataaagaaaaagaggacttcagagatttgattagacaaggaattctaaaaaatgaaaatggggctccagaagatgaagagaattttgaagaagctattaaaaatgtgaacacagcactaaatacaactcagatcccaagcagtattgaagatatatttaatgatgatcgctgcataaatatcaccaaacagactccatcattttggattttagctcgtgccttaaaggaatttgtggccaaagagggtcaaggaaatttacctgttcgaggcacaattcctgatatgattgcagattcaggcaaatatataaaactgcaaaacgtttaccgtgaaaaagcaaagaaagatgctgccgctgtgggtaatcatgttgccaaattgctgcagtccattggccaggcaccagagtccatttcagagaaagaattaaaattactctgcagcaattctgcatttcttcgagtggtaagatgtcgatccttagctgaagaatatggtttggatacaattaacaaggatgaaattatttctagcatggacaatccagataatgaaatagtgttgtacttaatgttacgggctgttgatagatttcataaacaacagggtagatatccaggagtatctaactatcaagttgaagaagatataggaaagttgaagtcttgtctcactggcttccttcaggaatatggtttatctgtaatggtgaaagatgattatgtccacgaattttgccgatatggagctgctgagccacataccattgctgcattcttggggggagctgctgctcaagaggtcatcaaaataatcaccaaacaatttgtaatttttaataatacttacatttacagtggcatgtcacaaacttcagcaactttccagttgtagagtaagcaagcaccttaagtagtgtgttaatgattgaaactgtaattgccttcgggttgtgctttagtctgtaaaattctaaaggagagctgctaaattgttttcttaataaacatttttctcatttgtaaaaaaaaaggaattc

SEQ ID NO: 9094 - protein, 534 aa, Homo sapiens
  ref <308>: DATABASE ACCESSION NUMBER: Refseq / NP_003896
  ref <309>: DATABASE ENTRY DATE: 2002-11-05
MAQLGKLLKEQKYDRQLRLWGDHGQEALESAHVCLINATATGTEILKNLVLPGIGSFTIIDGNQVSGEDAGNNFFLQRSSIGKNRAEAAMEFLQELNSDVSGSFVEESPENLLDNDPSFFCRFTVVVATQLPESTSLRLADVLWNSQIPLLICRTYGLVGYMRIIIKEHPVIESHPDNALEDLRLDKPFPELREHFQSYDLDHMEKKDHSHTPWIVIIAKYLAQWYSETNGRIPKTYKEKEDFRDLIRQGILKNENGAPEDEENFEEAIKNVNTALNTTQIPSSIEDIFNDDRCINITKQTPSFWILARALKEFVAKEGQGNLPVRGTIPDMIADSGKYIKLQNVYREKAKKDAAAVGNHVAKLLQSIGQAPESISEKELKLLCSNSAFLRVVRCRSLAEEYGLDTINKDEIISSMDNPDNEIVLYLMLRAVDRFHKQQGRYPGVSNYQVEEDIGKLKSCLTGFLQEYGLSVMVKDDYVHEFCRYGAAEPHTIAAFLGGAAAQEVIKIITKQFVIFNNTYIYSGMSQTSATFQL

SEQ ID NO: 9095 - DNA, 1759 bp, Rattus norvegicus; identical to SEQ ID NO: 9091
  ref <308>: DATABASE ACCESSION NUMBER: EMBL / U90829
  ref <309>: DATABASE ENTRY DATE: 1999-01-28

SEQ ID NO: 9096 - protein, 534 aa, Rattus norvegicus; identical to SEQ ID NO: 9092
  ref <308>: DATABASE ACCESSION NUMBER: SWISS-Prot / AAD09247
  ref <309>: DATABASE ENTRY DATE: 2002-06-01

SEQ ID NO: 9097 - DNA, 1823 bp, Homo sapiens; identical to SEQ ID NO: 9093
  ref <308>: DATABASE ACCESSION NUMBER: EMBL / U50939
  ref <309>: DATABASE ENTRY DATE: 1999-06-30

SEQ ID NO: 9098 - protein, 534 aa, Homo sapiens; identical to SEQ ID NO: 9094
  ref <308>: DATABASE ACCESSION NUMBER: Refseq / NP_003896
  ref <309>: DATABASE ENTRY DATE: 2002-11-05

SEQ ID NO: 9099 - DNA, 1759 bp, Rattus norvegicus; identical to SEQ ID NO: 9091
  ref <308>: DATABASE ACCESSION NUMBER: EMBL / U90829
  ref <309>: DATABASE ENTRY DATE: 1999-01-28

SEQ ID NO: 9100 - protein, 534 aa, Rattus norvegicus; identical to SEQ ID NO: 9092
  ref <308>: DATABASE ACCESSION NUMBER: SWISS-Prot / AAD09247
  ref <309>: DATABASE ENTRY DATE: 2002-06-01

SEQ ID NO: 9101 - DNA, 1823 bp, Homo sapiens; identical to SEQ ID NO: 9093
  ref <308>: DATABASE ACCESSION NUMBER: EMBL / U50939
  ref <309>: DATABASE ENTRY DATE: 1999-06-30

SEQ ID NO: 9102 - protein, 534 aa, Homo sapiens; identical to SEQ ID NO: 9094
  ref <308>: DATABASE ACCESSION NUMBER: Refseq / NP_003896
  ref <309>: DATABASE ENTRY DATE: 2002-11-05

SEQ ID NO: 9103 - DNA, 1759 bp, Rattus norvegicus; identical to SEQ ID NO: 9091
  ref <308>: DATABASE ACCESSION NUMBER: EMBL / U90829
  ref <309>: DATABASE ENTRY DATE: 1999-01-28

SEQ ID NO: 9104 - protein, 534 aa, Rattus norvegicus; identical to SEQ ID NO: 9092
  ref <308>: DATABASE ACCESSION NUMBER: SWISS-Prot / AAD09247
  ref <309>: DATABASE ENTRY DATE: 2002-06-01

SEQ ID NO: 9105 - DNA, 1823 bp, Homo sapiens; identical to SEQ ID NO: 9093
  ref <308>: DATABASE ACCESSION NUMBER: EMBL / U50939
  ref <309>: DATABASE ENTRY DATE: 1999-06-30

SEQ ID NO: 9106 - protein, 534 aa, Homo sapiens; identical to SEQ ID NO: 9094
  ref <308>: DATABASE ACCESSION NUMBER: Refseq / NP_003896
  ref <309>: DATABASE ENTRY DATE: 2002-11-05

SEQ ID NO: 9107 - DNA, 1686 bp, Rattus norvegicus
  ref <308>: DATABASE ACCESSION NUMBER: EMBL / U91561
  ref <309>: DATABASE ENTRY DATE: 1998-06-19
cctaagttgcttgtctgggccactggcaaattcttccttcccaggctagacacacaggctgagcaattggttccgaacccagaggaacccaggcgacgctaggtcacgtggccgactgcttacatgacctgcgggctgctgagcgtcactgtgacgttcaggagacctgcgaagtggcccggctacttccgtcacctgtgctgtcggggtgctgtcatggacctgggaccgatgcgcaagagttaccgcggggaccgagaggcatttgaggaggctcatctgacctctctggatcccatgaagcagtttgcttcctggttcgaggaggctgttcaatgtccagatataggagaagccaatgctatgtgtctggctacctgcaccagagacggaaaaccctctgcccgcatgctgctgctgaagggctttggcaaggatggcttccgcttcttcactaactacgagagtcggaaggggaaagagctggactctaacccctttgcctctcttgtcttctattgggagcccctgaaccgtcaggtgcgtgtggaaggcccagtgaagaaactgccggagaaggaggctgagaactacttccattcccggcccaagagcagccagattggggctgtggtcagtcgccagagttctgtgatccccgatcgggagtacctgagaaagaaaaatgaggaactggggcagctctaccgggaacaagaggtgcccaagccagagtactggggtggctacatcctatatccccaagtgatggagttctggcaaggccaaaccaaccgcctgcatgaccgtattgtcttccgtcgaggcctggcaacaggagactcccctctgggacccatgacccaccacggggaggaagactgggtgtatgagagacttgcaccttgacactggactccagaatgttgggggatcatcatagggaagagtgggggaagggaaggaaaaaaatggaagccaggtataccttctgtgtgtgtgtgtgtatgtgagacattgggtttaaacctcgctcacactaggtaacactttaccactgagataaagtcccagcattttttcttactaccttttattttaagactaagttgcttagtctggccctgaactcactgtgtatacatcccagacaagtcttggctttgagttcctcccctcagtcccttgagtagcagtattataggcttgtgccaccaggcccagttctagtcctgtttttaagaagcccattgcctttgttttttttttttttttttttcttcggggctggggactgaacccaggaccttcggcttcctaggcaagcgctctaccactgagccaaatccccaacccgcccattgcctttgcctttgttaacccttctacctgcatttctccaggactcaccctcaagttctctgaactcgggatcggtttagtggctggaacagagcgcagtagtgttgtagagagtcacaagtagcaaagagtctcataattattcccttgattttgctcctggtttggggggacgcccgtcttgggagctgcagctggtctaactctgtttccagtaacagactaatcaggccgcagatatacaagggctcgctggctatggaaaggagccagaccatgtttgctgtgactcagacaaaccattatatgttctggttggccttg

SEQ ID NO: 9108 - protein, 261 aa, Rattus norvegicus
  ref <308>: DATABASE ACCESSION NUMBER: SWISS-Prot / AAC23707
  ref <309>: DATABASE ENTRY DATE: 2002-06-01
MTCGLLSVTVTFRRPAKWPGYFRHLCCRGAVMDLGPMRKSYRGDREAFEEAHLTSLDPMKQFASWFEEAVQCPDIGEANAMCLATCTRDGKPSARMLLLKGFGKDGFRFFTNYESRKGKELDSNPFASLVFYWEPLNRQVRVEGPVKKLPEKEAENYFHSRPKSSQIGAVVSRQSSVIPDREYLRKKNEELGQLYREQEVPKPEYWGGYILYPQVMEFWQGQTNRLHDRIVFRRGLATGDSPLGPMTHHGEEDWVYERLAP

SEQ ID NO: 9109 - DNA, 2396 bp, Homo sapiens
  ref <308>: DATABASE ACCESSION NUMBER: Refseq / NM_018129
  ref <309>: DATABASE ENTRY DATE: 2002-11-05
aaatccttccttccccggggtagaagtccagggtgagaaattggttccgaactcaaaggaacccagtgccgggccacagccgggtcacgtggccggcggccccccatgacgtgctggctgcggggcgtcacggcgacgttcgggcgacctgccgagtggccaggctacctcagtcacctgtgtggtcgcagtgctgccatggacctgggacccatgcgcaagagttaccgcggggaccgagaggcatttgaggagactcatctgacctcccttgacccagtgaaacagtttgctgcctggtttgaggaggctgttcagtgtcctgacataggggaagccaatgccatgtgtctggctacctgcaccagagatggaaaaccctctgctcgcatgttgctgctgaagggcttcgggaaagatggcttccgcttcttcactaacttcgagagtcgaaaaggaaaagagctggactctaatccctttgcttcccttgtcttctactgggagccacttaaccgtcaggtgcgtgtggaaggccctgtgaagaaactgcctgaggaggaggctgagtgctacttccactcccgccccaagagcagccagattggggctgtggtcagccaccagagttctgtgatccctgatcgggagtatctgagaaagaaaaatgaggaactggaacagctctaccaggatcaagaggtgcccaagccaaaatcctggggtggctatgtcctgtaccctcaggtgatggagttctggcaaggtcaaaccaaccgcctgcatgaccggatagtctttcggcggggcctacccacaggagattcccctttggggcccatgacccaccgcggggaggaagactggctctatgagagacttgcaccttaactctgggacctgctggcccagagtggagctagggctaggtgtcaagagagggtgtgggattgggacccaggcccttctttctaaactcaacccatttccctccctaccccttatcttcaggactcttcagagctaatcctctaagttctctgtactcagttggttctcagttagctggttaagtggagtgtaatggtggcgtagagaatcacaaatggaaaataattccataattatttttttgaccttgcctatgattgattaggatagctccctctaggggtagcagccggtgtgactccctttctggtgacagacagggccccagcagccctgtctgttaccatgtgagtcatactggccaaagcttagtcctagcatatgcacctgagccaacctggccaatcagattgttttgtcaataatttgaaatttgaactggagagatccagaaccttgggagtcattaaagccaagtcattcatagcagccaggaaacaataggaaccaaaagcctctgcctgctgctattgcaattcccaggatctctccttccctggatccctccctcccaggtctgggctgtgcagttcctccccctgccttaaaacaccccactatctctgtaaagtctctctctctctttttttttttttacttaatctagctagaatctatttctgttgattacaacttaactaactcatttacggataggactttttttttttctttttttcttttttcttttctttttttttttgagatggagtctcactctgtcacccaggctggagtgcagtggtgtgatcttggctcactgcaacctctgcctcccaggttcaagcaattctcctgcctcagcctcccaagtagctgggactacaggcacacgccaccacacccaactaatttttgtatttttagtagagatggggtttcaccatgttggccaggattgtctccatctcttgaccttgtgatccacccacctcagcctcccaaagtgctgggattacaggcatgagccaccacacccagcgagacggggtttcattatgttggccaggctggtctccaactcctgacctaaagtgatctgcccgccttggcctcccaaagtgctgggattacagacatgagccaccacgcttggccgggatagtatatttttatagcacttcccctactgattgctgccttctctgtggctacaagggacccacagaattacagggaagttacagggaagcaggtttcatctcaatattgggagggatttcaaacaatcacacctgcctgagaaggagtgggctgtcactaggaatttttattcccagtccgtcaggaattttgtagaagggcttcatgtgctggtaccaataggacaggaagattttaatcagctttactatctatgtttttttatggaaactgtgtgtatgtatacatacattttccaaaaagaaaaattaaatgattatagagattatgtttttcagact

SEQ ID NO: 9110 - protein, 261 aa, Homo sapiens
  ref <308>: DATABASE ACCESSION NUMBER: Refseq / NP_060599
  ref <309>: DATABASE ENTRY DATE: 2002-11-05
MTCWLRGVTATFGRPAEWPGYLSHLCGRSAAMDLGPMRKSYRGDREAFEETHLTSLDPVKQFAAWFEEAVQCPDIGEANAMCLATCTRDGKPSARMLLLKGFGKDGFRFFTNFESRKGKELDSNPFASLVFYWEPLNRQVRVEGPVKKLPEEEAECYFHSRPKSSQIGAVVSHQSSVIPDREYLRKKNEELEQLYQDQEVPKPKSWGGYVLYPQVMEFWQGQTNRLHDRIVFRRGLPTGDSPLGPMTHRGEEDWLYERLAP

SEQ ID NO: 9111 - DNA, 1686 bp, Rattus norvegicus; identical to SEQ ID NO: 9107
  ref <308>: DATABASE ACCESSION NUMBER: EMBL / U91561
  ref <309>: DATABASE ENTRY DATE: 1998-06-19

SEQ ID NO: 9112 - protein, 261 aa, Rattus norvegicus; identical to SEQ ID NO: 9108
  ref <308>: DATABASE ACCESSION NUMBER: SWISS-Prot / AAC23707
  ref <309>: DATABASE ENTRY DATE: 2002-06-01

SEQ ID NO: 9113 - DNA, 2396 bp, Homo sapiens; identical to SEQ ID NO: 9109
  ref <308>: DATABASE ACCESSION NUMBER: Refseq / NM_018129
  ref <309>: DATABASE ENTRY DATE: 2002-11-05

SEQ ID NO: 9114 - protein, 261 aa, Homo sapiens; identical to SEQ ID NO: 9110
  ref <308>: DATABASE ACCESSION NUMBER: Refseq / NP_060599
  ref <309>: DATABASE ENTRY DATE: 2002-11-05

SEQ ID NO: 9115 - DNA, 1686 bp, Rattus norvegicus; identical to SEQ ID NO: 9107
  ref <308>: DATABASE ACCESSION NUMBER: EMBL / U91561
  ref <309>: DATABASE ENTRY DATE: 1998-06-19

SEQ ID NO: 9116 - protein, 261 aa, Rattus norvegicus; identical to SEQ ID NO: 9108
  ref <308>: DATABASE ACCESSION NUMBER: SWISS-Prot / AAC23707
  ref <309>: DATABASE ENTRY DATE: 2002-06-01

SEQ ID NO: 9117 - DNA, 2396 bp, Homo sapiens; identical to SEQ ID NO: 9109
  ref <308>: DATABASE ACCESSION NUMBER: Refseq / NM_018129
  ref <309>: DATABASE ENTRY DATE: 2002-11-05

SEQ ID NO: 9118 - protein, 261 aa, Homo sapiens; identical to SEQ ID NO: 9110
  ref <308>: DATABASE ACCESSION NUMBER: Refseq / NP_060599
  ref <309>: DATABASE ENTRY DATE: 2002-11-05

SEQ ID NO: 9119 - DNA, 1686 bp, Rattus norvegicus; identical to SEQ ID NO: 9107
  ref <308>: DATABASE ACCESSION NUMBER: EMBL / U91561
  ref <309>: DATABASE ENTRY DATE: 1998-06-19

SEQ ID NO: 9120 - protein, 261 aa, Rattus norvegicus; identical to SEQ ID NO: 9108
  ref <308>: DATABASE ACCESSION NUMBER: SWISS-Prot / AAC23707
  ref <309>: DATABASE ENTRY DATE: 2002-06-01

SEQ ID NO: 9121 - DNA, 2396 bp, Homo sapiens; identical to SEQ ID NO: 9109
  ref <308>: DATABASE ACCESSION NUMBER: Refseq / NM_018129
  ref <309>: DATABASE ENTRY DATE: 2002-11-05

SEQ ID NO: 9122 - protein, 261 aa, Homo sapiens; identical to SEQ ID NO: 9110
  ref <308>: DATABASE ACCESSION NUMBER: Refseq / NP_060599
  ref <309>: DATABASE ENTRY DATE: 2002-11-05

SEQ ID NO: 9123 - DNA, 3840 bp, Rattus norvegicus
  ref <308>: DATABASE ACCESSION NUMBER: EMBL / U92072
  ref <309>: DATABASE ENTRY DATE: 1999-03-25
gccgggcggctgcgctgagcagaggccgagcccgggacgcgccgagggactgcggggctgcgggtcatggatgcggcggcagcggcgcgggacggcgggagcccggccgcgaccaggtgaggaggcggcgtccggcgccactgcagccgcagcggcctcggaggaagagggctcgccgccgcgcgcccgcccgccgtcgctgcccttcctgttgggattatcttctgctccccgctgcttcttcgctccccgcggtcgaagccgcctctaggcttcagcggctcggactccttggcagccggtgcctctgctacctgggcctcgtagctgggagacccttgggcgagaccatgaggaaattcaacatcaggaaggtgctggacggcctgaccgcaggctcgtcctcggcctcgcaacagcagcaacagcagcagcacccgcctgggaaccgggagcccgagatccaggagacgctccagtccgagcacttccaactctgcaagactgttcgccatggatttccctatcagccctcagccctggcctttgatcccgttcagaagatcctggcggtaggaacccagactggtgctttaaggctctttggtcgtccaggggtggaatgttattgccagcacgacagcggagcggcagtgattcaactccagttcctgattaatgagggagcccttgtgagtgccttggctgatgacaccttacacttgtggaatttacgtcagaaaaggcctgctgtgctacattcactcaaattttgcagagaaagggttacattttgccatctgcctttccagagtaagtggctctatgtgggcacggaacgaggtaatatacatattgtcaatgtggagtccttcacactctcaggctacgtcattatgtggaataaagccatcgaactgtcatctaaatctcacccaggacctgttgtccatataagtgataatcccatggacgaggggaagcttctgattggctttgaatctggaacagtagtcttatgggaccttaagtcaaagaaggctgactacagatacacttacgacgaggctattcactctgtggcttggcatcatgaaggaaaacagtttatttgcagtcattctgatggtacattgaccatatggaatgtgaggtcccctactaaacctgtacagaccatcactcctcacggaaaacagttaaaggatgggaagaaacccgagccgtgcaagcctatcctcaaggtggagttcaagacaacaagatcgggggaaccttttattattttgtcgggaggcttatcatatgataccgtgggaagaagaccttgcttaacagtgatgcatgggaaaagcacggcagtgctggaaatggactattcaattgtcgactttctcacactctgtgaaacgccatatccaaatgattttcaggagccgtatgctgtggttgttctcctggagaaggatttagtgctgatagacctggcacagaatggataccctatatttgagaatccctaccctttgagtatacacgagtcccctgttacatgttgtgaatattttgctgattgtcctgtggaccttattcctgcactttattctgttggagctagacagaaacgtcaaggttacagcaaaaaggaatggcccatcaatggtggtaattggggcttgggtgctcaaagttacccagaaataattattacagggcatgctgatggctcaattaaattctgggatgcttctgcaataactctacaagtactgtataaattaaaaacatctaaagtatttgaaaagtcaagaaataaagatgacagacagaacaccgacattgtagatgaagatccatatgccattcagatcatctcctggtgcccagagagcagaatgctgtgcatagccggagtgtcggctcatgtcatcatttatagattcagcaagcaggaagtggttacagaagtcatcccgatgcttgaagtccgactgttatatgaaataaatgatgtggaaacgccggagggtgagcagccaccccctttgtccactcccgtgggcagctccacctctcagcccatcccccctcagtctcatccgtctaccagcagcagctcatcggacgggcttcgagataatgtaccgtgtttaaaagttaaaaactcaccacttaaacagtctcccggctatcaaacagagctagtcatccagttggtgtgggtgggtggagaacccccgcagcagatcaccagcctagcactcaactcttcctacggattggtggttttcggcaactccaatggcattgcaatggttgactacctccagaaagcagtgctgctcaacctcagcaccattgaactatacggctcaaatgatccttatcggagagaaccgaggtcgccccgcaaatctcgacagccttcaggagcgggcctgtgtgatattaccgaaggaactgtcgtcccagaggatcgctgcaaatctccgacttccgcaaagatgtcaaggaaattaagcttgccaactgatctaaagcctgatttagatgtgaaagacaattccttcagcagatctcggagttcaagtgtgaccagcattgacaaagagtcccgggaagccatttctgctcttcatttctgtgagactttcacaaggaaggcagactcctccccctccccgtgcctgtgggtgggaaccacagtgggaactgcctttgtcatcacgctgaatctccccctggggcctgagcagagactgcttcagccagtgattgtgtctccaagcggtactatattgaggttaaaaggtgcgatcttgagaatggcatttctggatgccgcgggctgcttaatgccacctgcatacgaaccctggacagagcacaacgttcctgaagaaaaagacgaaaaggagaaattgaaaaagcggcgacctgtctcagtgtccccctcctcttctcaggaaattagtgaaaaccagtacgcagtgatatgttctgaaaagcaagcaaaggtcatctcactgccaacccagaactgtgcatacaagcagaacatcactgagacgtccttcgtgctccgtggagacattgtcgccctgagtaacagtgtctgcctcgcctgcttctgtgccaacggccacattatgactttcagtttgccgagcttgaggcctctgctggatgtctactacctgccccttaccaacatgcggatagccaggacattctgcttcgccaacagtgggcaagccttataccttgtttcacctaccgaaatccagagactcacctacagtcaggagacgtgtgaaaaccttcaggagatgcttggtgagctcttcacgcctgtagaaacaccagaagcaccaaacagagggttcttcaaaggcttatttggaggtggtgcacaatctcttgatagagaagaactgtttggagagtcatcctcgggaaaggcgtcaaggagccttgcacagcacatcccgggtcctggcgggatcgaaggtgtgaagggagccgcgtcgggagtggtgggagaactggcccgagccaggctggccctcgacgaaagaggacagaagctcagcgacttggaagagaggactgcagccatgatgtccagtgcagactcgttttccaaacatgctcatgagatgatgctgaaatacaaagataagaagtggtaccagttctgacaagtagcactcagtaagtccagcttcaaccagaaggaaaaagacgtttccttgttgaggtcactgatgtatttgggaaagataacataaaagggatgcacactgctgacagcgtctttcccagcacaatcatgcactt

SEQ ID NO: 9124 - protein, 1116 aa, Rattus norvegicus
  ref <308>: DATABASE ACCESSION NUMBER: SWISS-Prot / AAD04756
  ref <309>: DATABASE ENTRY DATE: 2003-02-01
MRKFNIRKVLDGLTAGSSSASQQQQQQQHPPGNREPEIQETLQSEHFQLCKTVRHGFPYQPSALAFDPVQKILAVGTQTGALRLFGRPGVECYCQHDSGAAVIQLQFLINEGALVSALADDTLHLWNLRQKRPAVLHSLKFCRERVTFCHLPFQSKWLYVGTERGNIHIVNVESFTLSGYVIMWNKAIELSSKSHPGPVVHISDNPMDEGKLLIGFESGTVVLWDLKSKKADYRYTYDEAIHSVAWHHEGKQFICSHSDGTLTIWNVRSPTKPVQTITPHGKQLKDGKKPEPCKPILKVEFKTTRSGEPFIILSGGLSYDTVGRRPCLTVMHGKSTAVLEMDYSIVDFLTLCETPYPNDFQEPYAVVVLLEKDLVLIDLAQNGYPIFENPYPLSIHESPVTCCEYFADCPVDLIPALYSVGARQKRQGYSKKEWPINGGNWGLGAQSYPEIIITGHADGSIKFWDASAITLQVLYKLKTSKVFEKSRNKDDRQNTDIVDEDPYAIQIISWCPESRMLCIAGVSAHVIIYRFSKQEVVTEVIPMLEVRLLYEINDVETPEGEQPPPLSTPVGSSTSQPIPPQSHPSTSSSSSDGLRDNVPCLKVKNSPLKQSPGYQTELVIQLVWVGGEPPQQITSLALNSSYGLVVFGNSNGIAMVDYLQKAVLLNLSTIELYGSNDPYRREPRSPRKSRQPSGAGLCDITEGTVVPEDRCKSPTSAKMSRKLSLPTDLKPDLDVKDNSFSRSRSSSVTSIDKESREAISALHFCETFTRKADSSPSPCLWVGTTVGTAFVITLNLPLGPEQRLLQPVIVSPSGTILRLKGAILRMAFLDAAGCLMPPAYEPWTEHNVPEEKDEKEKLKKRRPVSVSPSSSQEISENQYAVICSEKQAKVISLPTQNCAYKQNITETSFVLRGDIVALSNSVCLACFCANGHIMTFSLPSLRPLLDVYYLPLTNMRIARTFCFANSGQALYLVSPTEIQRLTYSQETCENLQEMLGELFTPVETPEAPNRGFFKGLFGGGAQSLDREELFGESSSGKASRSLAQHIPGPGGIEGVKGAASGVVGELARARLALDERGQKLSDLEERTAAMMSSADSFSKHAHEMMLKYKDKKWYQF

SEQ ID NO: 9125 - DNA, 314 bp, Homo sapiens
  ref <308>: DATABASE ACCESSION NUMBER: EMBL / AI025874
  ref <309>: DATABASE ENTRY DATE: 2000-03-03
cggattgtcctgtggaccttattcctgcactttattctgttggagctagacagaaacgtcaaggttacagcaaaaaggaatggcccatcagcggaggtaattggggcttgggtgctcaaagttacccagaaataattattacagggcatgctgatgggtcagttaagttctgggatgcttctgcaataactctacaagtattatataagctaaagacatctaaagtatttgaaaagtcaagaaataaagatgacaggccaaacacagacattgtagatgaagatccatatgccattcagatcatctcctggtgt

SEQ ID NO: 9126 - protein, 1186 aa, Homo sapiens
  ref <308>: DATABASE ACCESSION NUMBER: Refseq / XP_045911
  ref <309>: DATABASE ENTRY DATE: 2002-08-01
MKKFNFRKVLDGLTASSPGSGSSSGSNSGGGAGSGSVHPAGTAGVLREEIQETLTSEYFQICKTVRHGFPHQPTALAFDPVQKILAIGTRTGAIRILGRPGVDCYCQHESGAAVLQLQFLINEGALVSASSDDTLHLWNLRQKRPAILHSLKFNRERITYCHLPFQSKWLYVGTERGNTHIVNIESFILSGYVIMWNKAIELSTKTHPGPVVHLSDSPRDEGKLLIGYENGTVVFWDLKSKRAELRVYYDEAIHSIDWHHEGKQFMCSHSDGSLTLWNLKSPSRPFQTTIPHGKSQREGRKSESCKPILKVEYKTCKNSEPFIIFSGGLSYDKACRRPSLTIMHGKAITVLEMDHPIVEFLTLCETPYPNEFQEPYAVVVLLEKDLIVVDLTQSNFPIFENPYPMDIHESPVTCTAYFADCPPDLILVLYSIGVKHKKQGYSNKEWPISGGAWNLGAQTYPEIIITGHADGSIKFWDASAITLQMLYKLKTSKVFEKQKVGEGKQTCEIVEEDPFAIQMIYWCPESRIFCVSGVSAYVIIYKFSRHEITTEIVSLEVRLQYDVEDIITPEPETSPPFPDLSAQLPSSRSLSGSTNTVASEGVTKDSIPCLNVKTRPVRMPPGYQAELVIQLVWVDGEPPQQITSLAVSSAYGIVAFGNCNGLAVVDFIQKTVLLSMGTIDLYRSSDLYQRQPRSPRKNKQFIADNFCMRGLSNFYPDLTKRIRTSYQSLTELNDSPVPLELERCKSPTSDHVNGHCTSPTSQSCSSGKRLSSADVSKVNRWGPGRPPFRKAQSAACMEISLPVTTEENRENSYNRSRSSSISSIDKDSKEAITALYFMDSFARKNDSTISPCLFVGTSLGMVLIISLNLPLADEQRFTEPVMVLPSGTFLSLKGAVLTFSCMDRMGGLMQPPYEVWRDPNNIDENEKSWRRKVVMNSSSASQEIGDHQYTIICSEKQAKVFSLPSQTCLYVHNITETSFILQANVVVMCSSACLACFCANGHIMIMSLPSLRPMLDVNYLPLTDMRIARTFCFTNEGQALYLVSPTEIQRLTYSQEMCDNLQDMLGDLFTPIETPEAQNRGFLKGLFGGSGQTFDREELFGEASAGKASRSLAQHIPGPGSIEGMKGAAGGVMGELTRARIALDERGQRLGELEEKTAGMMTSAEAFSKHAHELMLKYKDKKWYQF

SEQ ID NO: 9127 - DNA, 2854 bp, Rattus norvegicus
  ref <308>: DATABASE ACCESSION NUMBER: EMBL / U92279
  ref <309>: DATABASE ENTRY DATE: 2000-03-04
gcacttctgtgtgctgacacatccttggagccttcagactgagccagactccaggctcctcgctgggcacaaggaggctcctgctagacacttcctgtggcagagaaaagaggtagtgagctggtgtttcaggatgtaagggcccggaggagcagagcgagctctctccactgcttgcccgccaccctgagagtgctggtcggtgtttccacaatccttgtggtgggtggccccccgtggaggggacctgtgagcaacggaggcatgccagggaagcccaagcacttgggtgtccccaacgggcgcatggtcctggctgtctctgatggagaactgaccagcacatcaggttcccaggcccagggtgagggcagaggcagctccctcagcatccacagcctccccagtggccccagcagccccttctccactgatgagcagcctgtggccagctgggcccagtcctttgagcggctgctgcaagacccacggggtctggcttacttcactgagttcctgaagaaggaattcagcgccgagaatgtaactttctggcaagcctgcgagcgtttccaacagatcccagccagcgacaccaaacagctagctcaggaggcccacaacatctaccatgagttcctgtccagccaggcactgagcccagtgaacatcgaccgacaggcctggcttagtgaggaggtgctggcccagcccaggcccgatatgttccgagcacagcagcttcagatcttcaatttgatgaagttcgacagctacgcgcgcttcgtcaaatccccgctgtaccaagagtgcctgctggccgaggccgagggacgccccctgcgggaacctggatcctcacacctcgggagcccggacactgcgaggaagaagccaaagctgaagcctggaaagtcactgccgctcggtgtggaagagttggggcagctgccgcttgctgagggccgccctctccgcaagtcctttcgtagagagatgccgggtggagctgtgaattcggccctgcgacgagagtctcagggatccctgaattcttccgcgagtctggacctgggcttccttgcctttgtgagcagcaaatccgagagccaccgaaagagccttggaagtggagagggtgagagcgaaagccggcccgggaagtactgctgcgtgtatctacctgatggcacggcctccttggccctggctcgacctggcctcaccatccgtgacatgctggcaggcatctgtgagaagagaggcctctctctacctgacattaaggtctacctggtgggcaaagaacagaaggccctggtcctggatcaggactgcaccgtgctggcagaccaggaagtgcgactggaaaacaggatcaccttccagctggagttggtcggcctggagcgtgtggtacggatctctgctaagcccaccaagcgtctgcaggaggcgctgcagcctatcttggccaagcacggcctgagcctggatcaggtggtcctacacaggccaggagagaagcagctagtggatttggagaatctagtgagctcagtggcttcacagacactggttttggacactcttccagatgcaaagacaagggaagccagcagcatacctccctgccgcagccagggatgcctccctagaacccagaccaaggacagtcaccttcctccactgtcctccagtttgtcggtagaagatgccagtggttctactgggaaacgacagacctgcgacattgaaggcctagtggagctgctgaatcgtgtgcagagcagcggggcccatgaccagaggggacttcttcgcaaagaggacctggtccttccagaatttctgcagcttccttcccaaagaccaggttctcaggaggctccaccatagactgaatcaactattcagcccagggagggcccttcagactccaccatccactcggtcctctgacacctgtgtaacaatccaggctgtctgcatggtgcctgggcaaaccaagcatgccacgggtctgtgctgcatgccctgtctgtaccaggagtgtctttggtccctttctgctgtgggcaggcccacagaaagggccaggaaggggtggctacttgttctctcataggtttacctaccaattcctcacagtaggccatcaaggggaggtgggccttgtcccttggcataagcatactgaacatgaagaggtgactttggcagtgtcagcctccttgacttgttctaggctttagcagggggcaggaaggaggggctggcccctccttaaagagttggtgtaagaaagacctgggtgtactactgggcaacccctccctccatccacagattttgctgtacatatggattttatggttggcttggggcagctgggtttgtcctggatgtatgatactgttataataataattattattattcagccacgaggtgtcttttttttgtctttttttttcggagctgggaaccgaacccagggccttgcgcttgttaggcaagcgctctaccactgagctaaatccccaaccccatgaggtgtctttcttgtatgccactctgccctgtgtagtctcactaccccactgcctctgtgccaggccaggaagttttggggaaccttagtgtatacctcctcacttcttgttttcagaatctctctccccaaggcataggatatagaaggcaggggggggggagcagaatggagagggagagagcgccaccccccaccccctactgttcttggccatcacccagctgctccacaatgtccatgggagatgaatgtatcctttttgtttctgttctgtttctgttggtgatacaatgtatc

SEQ ID NO: 9128 - protein, 544 aa, Rattus norvegicus
  ref <308>: DATABASE ACCESSION NUMBER: SWISS-Prot / O08773
  ref <309>: DATABASE ENTRY DATE: 2001-10-16
MPGKPKHLGVPNGRMVLAVSDGELTSTSGSQAQGEGRGSSLSIHSLPSGPSSPFSTDEQPVASWAQSFERLLQDPRGLAYFTEFLKKEFSAENVTFWQACERFQQIPASDTKQLAQEAHNIYHEFLSSQALSPVNIDRQAWLSEEVLAQPRPDMFRAQQLQIFNLMKFDSYARFVKSPLYQECLLAEAEGRPLREPGSSHLGSPDTARKKPKLKPGKSLPLGVEELGQLPLAEGRPLRKSFRREMPGGAVNSALRRESQGSLNSSASLDLGFLAFVSSKSESHRKSLGSGEGESESRPGKYCCVYLPDGTASLALARPGLTIRDMLAGICEKRGLSLPDIKVYLVGKEQKALVLDQDCTVLADQEVRLENRITFQLELVGLERVVRISAKPTKRLQEALQPILAKHGLSLDQVVLHRPGEKQLVDLENLVSSVASQTLVLDTLPDAKTREASSIPPCRSQGCLPRTQTKDSHLPPLSSSLSVEDASGSTGKRQTCDIEGLVELLNRVQSSGAHDQRGLLRKEDLVLPEFLQLPSQRPGSQEAPP

SEQ ID NO: 9129 - DNA, 822 bp, Homo sapiens
  ref <308>: DATABASE ACCESSION NUMBER: EMBL / AF037194
  ref <309>: DATABASE ENTRY DATE: 1998-01-06
tcgtgtgagcccagtgaacatcgaccgtcaggcctggcttggcgaggaggtgctggccgagccccggccggacatgtttcgggcacagcagcttcagatcttcaacttgatgaagttcgacagctatgcgcgcttcgtcaagtccccgctgtaccgcgagtgcctgctagccgaagccgagggacgccctctgcgggaacctggctcctcgcgcctcggcagccctgacgccacgaggaagaagccgaagctgaagcccgggaagtcgctgccgctgggtgtggaggagttggggcagctgccacccgttgagggtcctgggggccgccctctccgcaagtccttccgccgggagctgggcgggactgcaaacgccgccttgcgccgagagtctcagggctccctcaactcctccgccagcctggaccttggcttcctagccttcgtcagcagcaaatctgagagccaccggaagagccttgggagcacggagggtgaaagtgaaagccggccagggaagtactgctgtgtgtacctgcccgatggcacagcctccttggccctggccagacctggcctcaccatccgagacatgctggcagggatctgtgagaaacgaggcctctctctacctgacatcaaggtctacctggtgggcaatgaacaggtgggaacgtgacctggctccaactctaacctccttcctgatcctgaccccaactccatttctgtctctgctcagtcatggctccaaccccaattcaagttctaaacccaactccaaagcaccctcagcaccaactttcactcactcagacatcc

SEQ ID NO: 9130 - protein, 594 aa, Homo sapiens
  ref <308>: DATABASE ACCESSION NUMBER: SWISS-Prot / O43566
  ref <309>: DATABASE ENTRY DATE: 2002-06-15
MPGKPKHLGVPNGRMVLAVSDGELSSTTGPQGQGEGRGSSLSIHSLPSGPSSPFPTEEQPVASWALSFERLLQDPLGLAYFTEFLKKEFSAENVTFWKACERFQQIPASDTQQLAQEARNIYQEFLSSQALSPVNIDRQAWLGEEVLAEPRPDMFRAQQLQIFNLMKFDSYARFVKSPLYRECLLAEAEGRPLREPGSSRLGSPDATRKKPKLKPGKSLPLGVEELGQLPPVEGPGGRPLRKSFRRELGGTANAALRRESQGSLNSSASLDLGFLAFVSSKSESHRKSLGSTEGESESRPGKYCCVYLPDGTASLALARPGLTIRDMLAGICEKRGSLYLTSSLPGGNEQKALVLDQDCTVLADQEVRLENRITFELELTALERVVRISAKPTKRLQEALQPILEKHGLSPLEVVLHRPGEKQPLDLGKLVSSVAAQRLVLDTLPGVKISKARDKSPCRSQGCPPRTQDKATHPPPASPSSLVKVPSSATGKRQTCDIEGLELLNRVQSSGAHDQRGLLRKEDLVLPEFLQLPAQGPAPRRPTTDQISSPAHRGILELHHRLSPLTATQQSRTAAWHPAGRACHGSALHALSVP

SEQ ID NO: 9131 - DNA, 4665 bp, Rattus norvegicus
  ref <308>: DATABASE ACCESSION NUMBER: EMBL / U92564
  ref <309>: DATABASE ENTRY DATE: 2000-03-04
attgcttgcttcctaggggccagggctgttctgagcacgtcacaccaatccaagcttcacaaacacctatgggcagttgaagagggggaggcctcggacttctcgctggcctgggattcctctgtggcagcagcgggaggcctagaaggagagtcagagtgtgatcggaaatccagccgtgcgctggaagacaggaacagcgtgacaagtcaagaggagagaaacgaggacgatgaagatgtggaagatgagtcaatttacacctgcgatcactgtcagcaggacttcgagtctctggcagacctgacggaccaccgggcccaccgctgtcctggagatggtgatgacgacccacagctctcctgggtggcttcatctccctccagcaaggatgttgcgtcacccacgcagatgatcggcgatggttgtgaccttggcctcggcgaggaggaaggcggcaccggcctgccgtacccttgccagttctgcgacaagtccttcatccgcctgagctacttgaagaggcatgaacagatccacagcgacaagctgccgttcaagtgcaccttctgcagccgcctcttcaaacacaagaggagccgggaccggcacatcaagctgcacacaggcgacaagaagtaccactgccacgagtgcgaggcggctttctcccgcagggaccacctcaagatccacctgaagacccacagctccagcaagccgttcaagtgcagcgtgtgcaaacgcgggttctcctccaccagctccctgcagagccacatgcaggcccacaagaagaataaggaacacctggctaagtcagagaaggaagccaagaaggacgacttcatgtgtgactactgcgaggacacctttagccagacagaagagctggagaagcatgtgcttaccctccacccgcagctctcagagaaggcggacctccagtgtatccactgccccgaggtctttgtcgacgagagcacgctgctggcccacatccaccaagctcacgccaaccagaaacacaagtgccccatgtgccctgagcagttctcctccgtggagggtgtgtactgccacctggacagccaccggcagcctgattccagcaatcacagtgtcagccccgaccccgtgctgggcagtgtggcttccatgagcagtgctacacctgactcgacgcccgaccccgtgctgggcagtgtggcttccatgagcagtgctacacctgactcgagcgcctctgtggagcgcgggtccacgccagactccaccttgaagccgctgagggggcagaagaagatgcgggatgacgggcagagctggtccaaggttgtctacagctgcccctactgttctaagcgggactttaccagcctggctgtgctagagattcatctgaagaccattcacgcggacaaacctcagcagagtcacacgtgtcagatttgcctggactccatgcccacgctctacaacctcaacgagcatgtgcgcaagctgcacaagagccacgcttaccccgtcatgcaattcggcaacatctccgccttccactgcaactactgccccgagatgttcgcggacatcaacagcctgcaggagcacatccgagtctcgcactgtggccccaatgccaacccccccgacgggaacaatgctttcttctgtaaccagtgttctatgggctttctcactgaatcctccctcacagagcacatccaacaggcacactgcagtgtggggagcaccaagctggagtctcccgttatccagcccacacagtccttcatggaggtctactcctgcccttactgtaccaactcccctatctttggctccatcctgaagctcactaagcacatcaaagagaaccacaagaacatcccgttggcacacagcaagaagtccaaggcggagcagagtccggtctcctctgacgtcgaggtgtcttccccgaaacgacagcgcctctcggggagtgccaactccatctctaacggcgagtacccctgcaatcagtgcgacctcaagttctccaacttcgagagcttccagacccacttgaagctgcacctggagctgctgctccggaagcaggcctgcccccagtgcaaagaggacttcgactctcaggagtccctcctgcagcatctgaccgtgcactacatgaccacgtccacccactacgtctgcgagagctgtgacaagcagttctcctcagtggacgacctgcagaagcacctgctggacatgcacacctttgtgctataccactgcaccctgtgtcaggaggtcttcgactctaaggtgtccatccaggtgcacctggccgtgaagcacagcaacgagaagaagatgtaccgttgcaccgcctgcaactgggacttccgcaaggaggctgacctgcaggtgcacgtcaagcacagtcacctcggcaacccggccaaggcccacaagtgcatcttctgtggtgagaccttcagcaccgaggtggagctccagtgccacatcaccacgcacagcaagaagtacaattgcaggttctgcagcaaagccttccacgccgtcctcctgctggagaagcaccttcgggagaagcattgtgtgtttgacccagctgcagagaatggcacggccaacggggtgccccccacctccaccaagaaggcagagcccgccgacctgcagggcatgctgctcaagaaccctgaggcaccgaacagccacgaggccagtgaggacgatgtggatgcatcagagcccatgtacggctgtgacatctgtggtgcagcctacaccatggaggtgctgctgcagaaccaccgactccgggatcataacatccggcccggagaggacgatggctcacgcaagaaggcagagttcataaagggcagccacaagtgtaacgtgtgctctcggactttcttctcggagaacgggctccgggaacacctgcagacgcaccggggccctgccaagcactacatgtgtcccatctgtggcgagcgcttcccctcgctgctgacgctcactgagcacaaggtgacccacagcaagagtctggacacaggcacctgtcgcatctgcaaaatgcccctgcagagtgaggaggagtttatcgagcactgccagatgcaccccgacttgcggaactccctcactggtttccgctgtgtggtctgtatgcagactgtcacctcaaccctggagctcaagatccatggcacctttcacatgcagaagctggctggcagctcagctgcttcctcccccaatggccaggggctgcagaagctctacaagtgcgccctgtgcctcaaagagttccgtagcaagcaggacctggtcaggcttgacgtcaatgggctgccctatggcctatgtgccggctgcatggcccgtagtgccaatggacaggtgggtggcctggccccacccgaacctgccgaccggccctgcgctggcctccgctgccctgaatgtaacgtgaagtttgagagtgctgaggacctggagagccacatgcaggtggaccaccgtgatcttaccccagagaccagtgggccccggaaaggtgcccagacgtcaccagtgccccggaagaagacgtaccagtgcatcaagtgccagatgaccttcgagaacgagagagagatccagatccacgtcgccaaccacatgatcgaggaaggcatcaaccatgagtgtaagctgtgcaaccagatgttcgactccccagccaagctcctttgtcacctcatcgaacacagcttcgagggcatgggtggtactttcaagtgccccgtgtgcttcacagtcttcgtccaggccaacaagctgcaacagcacatcttcgccgtgcacgggcaggaggacaaaatctacgactgctcgcagtgcccacagaagtttttcttccagacagagttgcagaaccacacgatgagccagcacgcacagtgagggacctcgcgacaggacacctctccgcagaaggcttgccggagacgccgtggggagggccatttgaacattacatccaatcaaagtgtcatttgcaacccagatgtaaaactctaatgatttggccatgaggcgctgctattataagcagctggaaatgaatattaatggcagagattaaaagtattccatgctcagtgttttttattgtcctgctacagctagtgtgcttttagagttttcgccgcagactacatttctagtgttagagaaacctgcttttttgaggctattgtcctttgttccttcatgtattatattgatagttttttttaaaggattagtgtgattttttttgcttcttttctatttctttctttcttgtttttctttctcccccttcagttaactactttttaattgaaattctaggtaattgtgcatcgtgatgtgattgcttggctattgtctgaatatttccttttaattttttaattaaagactaatgctttgattggatttgccagttcaccggacagtgattaaaactctgtaatgaaaataatcggtttccgtgcaactggatggtctgcttttaaatgtgacttgatctgactgcagtaactagttcagctcaataaagggaatccatgcgttcacccccaaaaaaaaaaaaaaaaaaaaaaaaaaaaa

SEQ ID NO: 9132 - protein, 1186 aa, Rattus norvegicus
  ref <308>: DATABASE ACCESSION NUMBER: SWISS-Prot / AAB58646
  ref <309>: DATABASE ENTRY DATE: 2003-02-01
MIGDGCDLGLGEEEGGTGLPYPCQFCDKSFIRLSYLKRHEQIHSDKLPFKCTFCSRLFKHKRSRDRHIKLHTGDKKYHCHECEAAFSRRDHLKIHLKTHSSSKPFKCSVCKRGFSSTSSLQSHMQAHKKNKEHLAKSEKEAKKDDFMCDYCEDTFSQTEELEKHVLTLHPQLSEKADLQCIHCPEVFVDESTLLAHIHQAHANQKHKCPMCPEQFSSVEGVYCHLDSHRQPDSSNHSVSPDPVLGSVASMSSATPDSTPDPVLGSVASMSSATPDSSASVERGSTPDSTLKPLRGQKKMRDDGQSWSKVVYSCPYCSKRDFTSLAVLEIHLKTIHADKPQQSHTCQICLDSMPTLYNLNEHVRKLHKSHAYPVMQFGNISAFHCNYCPEMFADINSLQEHIRVSHCGPNANPPDGNNAFFCNQCSMGFLTESSLTEHIQQAHCSVGSTKLESPVIQPTQSFMEVYSCPYCTNSPIFGSILKLTKHIKENHKNIPLAHSKKSKAEQSPVSSDVEVSSPKRQRLSGSANSISNGEYPCNQCDLKFSNFESFQTHLKLHLELLLRKQACPQCKEDFDSQESLLQHLTVHYMTTSTHYVCESCDKQFSSVDDLQKHLLDMHTFVLYHCTLCQEVFDSKVSIQVHLAVKHSNEKKMYRCTACNWDFRKEADLQVHVKHSHLGNPAKAHKCIFCGETFSTEVELQCHITTHSKKYNCRFCSKAFHAVLLLEKHLREKHCVFDPAAENGTANGVPPTSTKKAEPADLQGMLLKNPEAPNSHEASEDDVDASEPMYGCDICGAAYTMEVLLQNHRLRDHNIRPGEDDGSRKKAEFIKGSHKCNVCSRTFFSENGLREHLQTHRGPAKHYMCPICGERFPSLLTLTEHKVTHSKSLDTGTCRICKMPLQSEEEFIEHCQMHPDLRNSLTGFRCVVCMQTVTSTLELKIHGTFHMQKLAGSSAASSPNGQGLQKLYKCALCLKEFRSKQDLVRLDVNGLPYGLCAGCMARSANGQVGGLAPPEPADRPCAGLRCPECNVKFESAEDLESHMQVDHRDLTPETSGPRKGAQTSPVPRKKTYQCIKCQMTFENEREIQIHVANHMIEEGINHECKLCNQMFDSPAKLLCHLIEHSFEGMGGTFKCPVCFTVFVQANKLQQHIFAVHGQEDKIYDCSQCPQKFFFQTELQNHTMSQHAQ

SEQ ID NO: 9133 - DNA, 4248 bp, Homo sapiens
  ref <308>: DATABASE ACCESSION NUMBER: EMBL / AB018303
  ref <309>: DATABASE ENTRY DATE: 2002-05-12
atggaggatgaatcaatttacacctgcgatcactgtcagcaggacttcgagtctctggcagacctgacggaccaccgggcccaccgctgtcctggagatggtgatgacgacccacaactctcctgggtggcctcgtctccctccagcaaggatgttgcgtcacccacgcagatgatcggagatggttgtgacctcggcctcggcgaggaggaagggggcacgggcctgccatacccttgccagttctgcgacaagtccttcatccgcttgagctacttgaagaggcacgagcagatccacagcgacaagctgccgttcaagtgcacctactgcagccgcctcttcaagcacaagaggagccgcgaccggcacatcaagctgcatacgggcgacaagaagtatcactgccacgagtgcgaggcagccttctcccgcagcgaccacctcaagatccacctgaagacccacagctccagcaagcccttcaagtgcactgtgtgcaagcgcggcttctcctccaccagctcgctgcagagccacatgcaggcccacaaaaagaacaaggagcatctggccaagtcggagaaggaagccaagaaggacgacttcatgtgcgactactgcgaggacaccttcagccagacggaggagctggagaagcacgtgctcacccgccacccgcagctgtccgagaaggcggacctgcagtgcattcactgccctgaggtcttcgtcgacgagaacacactgctcgcccatatccaccaagcccacgccaaccagaaacacaagtgccccatgtgccctgagcagttctcctcagtggaaggtgtctactgccacctggacagccaccggcagcccgactccagcaaccacagtgtcagtcccgaccctgtactgggcagcgtggcctccatgagcagcgccacacccgactccagcgcctctgtggagcgtggctccaccccggactccaccttgaagccgctgcgggggcagaagaagatgcgggatgacgggcagggctggaccaaggtggtctatagctgcccctattgttccaagcgggactttaacagcctggccgtgctggagatccacctgaagaccatccacgcggacaagccccagcagagccacacatgtcagatctgcctggactccatgcccaccctctacaacctcaacgagcacgttcgcaagctgcacaagaaccatgcctaccctgtgatgcagtttggcaacatctctgccttccactgcaactactgccccgagatgttcgccgacatcaatagcctgcaggagcacatccgcgtctcccactgcggccccaacgccaacccctctgacggtaataatgctttcttctgcaaccagtgctccatgggtttccttactgagtcctccctcaccgagcacatccagcaggcccactgcagtgtgggcagtgccaaactagagtctccggtggtgcagcccacgcagtccttcatggaggtctattcctgcccctactgcaccaactcccccatctttggctccatcctgaaactcaccaagcacatcaaggagaaccacaagaacattccactggcccacagcaagaagtccaaggccgagcagagcccagtctcgtccgatgtggaggtgtcttccccgaagcggcagcggctctcagcaagcgccaactccatctccaatggggagtatccttgcaatcaatgcgacctcaagttctccaactttgagagcttccagacccacctgaagctgcacctggagctgctgctgcggaagcaagcgtgcccccagtgcaaagaggactttgactcccaggagtccctcctgcagcacctgacagtgcattacatgaccacgtcgacccactatgtgtgcgagagctgcgacaagcaattttcctcggtggatgacctgcagaagcacctgctggacatgcacacctttgtgttgtaccactgcaccctgtgtcaggaggtcttcgactccaaggtgtccatccaggtgcacctggcggtgaagcacagcaatgagaagaagatgtaccgctgcacggcctgcaactgggacttccgcaaggaggctgacctgcaggtgcacgtcaaacacagccacctgggcaacccggccaaggctcacaagtgcatcttctgtggggagaccttcagcaccgaggtggagctgcagtgccacatcaccacacacagcaagaagtataactgtaagttctgcagcaaggccttccacgccatcatcctgctggagaagcacctgcgggagaagcactgtgtgtttgatgctgcgaccgagaacggcacggccaatggggtacccccaatggccaccaagaaagctgagcctgctgacctgcagggcatgctgcttaagaaccctgaggcacctaacagccatgaggccagcgaggatgacgtggacgcgtcggagcccatgtacggctgtgacatctgcggggcggcctacaccatggaggtgctgctgcagaatcaccggctgcgggaccacaatatccggccgggcgaggatgatggctcacgcaagaaggctgagtttatcaagggcagtcacaagtgcaacgtttgttcacggactttcttctcggagaacgggctacgggagcacctgcagacgcaccggggccctgccaagcactacatgtgtcccatctgtggtgagcgcttcccttcgctgctgacgctcaccgaacacaaggtgacccacagcaagagcctggacacgggcacctgtcgcatctgcaagatgcccctgcagagcgaggaggagtttattgagcactgccagatgcaccctgacctgcgcaactcactcacgggcttccgctgtgtggtctgcatgcagacagtcacttccacgcttgagctcaagatccatggcaccttccacatgcagaagctggcgggcagctcagcggcgtcctcccccaatggccaggggctgcagaagctctacaagtgcgccctgtgcctcaaggagttccgcagcaagcaggacctggtgaagcttgacgtcaatgggctgccctacggcctctgcgccggctgcatggcccgcagcgccaacggacaggtgggtggcctggccccgcccgagcccgccgaccggccctgtgccggcctccgttgccccgagtgcagtgtcaagtttgagagtgccgaagacctggagagccacatgcaggtggaccaccgtgacctcacgccggagaccagtgggccccggaaaggcacccagacatcgccagtgccccggaaaaagacataccagtgcatcaagtgccagatgaccttcgagaacgagagagagatccaaatccacgttgccaaccacatgattgaggaaggcatcaaccacgagtgtaagctgtgcaaccagatgttcgactccccggccaagctcctctgtcacctcattgagcacagcttcgagggcatgggcggcaccttcaaatgccccgtgtgtttcacagtcttcgtccaggccaacaagttgcagcagcacatctttgccgtgcacgggcaggaggacaagatctacgactgctcacagtgccctcagaagttcttcttccagaccgagctgcagaaccacacgatgagccagcacgcacagtgagggatcgctcaacaggacacctctccgcagaaggcttgccggagacgccgtggggagggccatttgaacattacatccaatcaaagtgtcatttgcaacccagatgtaaaactctaatgatttggccatgaggcgctgctattataagcagctggaaatgaatattaatggcagagattaaaagtattccatgctcagtattttttattgtcctgctacagctagtgtgcttttagactttccgccgcagactacatttctagagttagagaaacctgctttttaaggctattgtcctttgttccttcatgtattatattgatagtttttaaaaaagaattagtgtgattttttttctttgcttcttttttttctttcttgtttttcttcccccccacccccccacccccttcggttaactactttttaattgcaattctaggtaattgtgcatcgtgatgtgattgcttggctattgtctgaatatttccttttaattttttaattaaagactaatgctttgattggatttgccagttcaccggacagtgattaaaactatgtaatgaatat

SEQ ID NO: 9134 - protein, 1224 aa, Homo sapiens
  ref <308>: DATABASE ACCESSION NUMBER: SWISS-Prot / BAA34480
  ref <309>: DATABASE ENTRY DATE: 2002-06-13
MEDESIYTCDHCQQDFESLADLTDHRAHRCPGDGDDDPQLSWVASSPSSKDVASPTQMIGDGCDLGLGEEEGGTGLPYPCQFCDKSFIRLSYLKRHEQIHSDKLPFKCTYCSRLFKHKRSRDRHIKLHTGDKKYHCHECEAAFSRSDHLKIHLKTHSSSKPFKCTVCKRGFSSTSSLQSHMQAHKKNKEHLAKSEKEAKKDDFMCDYCEDTFSQTEELEKHVLTRHPQLSEKADLQCIHCPEVFVDENTLLAHIHQAHANQKHKCPMCPEQFSSVEGVYCHLDSHRQPDSSNHSVSPDPVLGSVASMSSATPDSSASVERGSTPDSTLKPLRGQKKMRDDGQGWTKVVYSCPYCSKRDFNSLAVLEIHLKTIHADKPQQSHTCQICLDSMPTLYNLNEHVRKLHKNHAYPVMQFGNISAFHCNYCPEMFADINSLQEHIRVSHCGPNANPSDGNNAFFCNQCSMGFLTESSLTEHIQQAHCSVGSAKLESPVVQPTQSFMEVYSCPYCTNSPIFGSILKLTKHIKENHKNIPLAHSKKSKAEQSPVSSDVEVSSPKRQRLSASANSISNGEYPCNQCDLKFSNFESFQTHLKLHLELLLRKQACPQCKEDFDSQESLLQHLTVHYMTTSTHYVCESCDKQFSSVDDLQKHLLDMHTFVLYHCTLCQEVFDSKVSIQVHLAVKHSNEKKMYRCTACNWDFRKEADLQVHVKHSHLGNPAKAHKCIFCGETFSTEVELQCHITTHSKKYNCKFCSKAFHAIILLEKHLREKHCVFDAATENGTANGVPPMATKKAEPADLQGMLLKNPEAPNSHEASEDDVDASEPMYGCDICGAAYTMEVLLQNHRLRDHNIRPGEDDGSRKKAEFIKGSHKCNVCSRTFFSENGLREHLQTHRGPAKHYMCPICGERFPSLLTLTEHKVTHSKSLDTGTCRICKMPLQSEEEFIEHCQMHPDLRNSLTGFRCVVCMQTVTSTLELKIHGTFHMQKLAGSSAASSPNGQGLQKLYKCALCLKEFRSKQDLVKLDVNGLPYGLCAGCMARSANGQVGGLAPPEPADRPCAGLRCPECSVKFESAEDLESHMQVDHRDLTPETSGPRKGTQTSPVPRKKTYQCIKCQMTFENEREIQIHVANHMIEEGINHECKLCNQMFDSPAKLLCHLIEHSFEGMGGTFKCPVCFTVFVQANKLQQHIFAVHGQEDKIYDCSQCPQKFFFQTELQNHTMSQHAQ

SEQ ID NO: 9135 - DNA, 4665 bp, Rattus norvegicus; identical to SEQ ID NO: 9131
  ref <308>: DATABASE ACCESSION NUMBER: EMBL / U92564
  ref <309>: DATABASE ENTRY DATE: 2000-03-04

SEQ ID NO: 9136 - protein, 1186 aa, Rattus norvegicus; identical to SEQ ID NO: 9132
  ref <308>: DATABASE ACCESSION NUMBER: SWISS-Prot / AAB58646
  ref <309>: DATABASE ENTRY DATE: 2003-02-01

SEQ ID NO: 9137 - DNA, 4248 bp, Homo sapiens; identical to SEQ ID NO: 9133
  ref <308>: DATABASE ACCESSION NUMBER: EMBL / AB018303
  ref <309>: DATABASE ENTRY DATE: 2002-05-12

SEQ ID NO: 9138 - protein, 1224 aa, Homo sapiens; identical to SEQ ID NO: 9134
  ref <308>: DATABASE ACCESSION NUMBER: SWISS-Prot / BAA34480
  ref <309>: DATABASE ENTRY DATE: 2002-06-13

SEQ ID NO: 9139 - DNA, 4665 bp, Rattus norvegicus; identical to SEQ ID NO: 9131
  ref <308>: DATABASE ACCESSION NUMBER: EMBL / U92564
  ref <309>: DATABASE ENTRY DATE: 2000-03-04

SEQ ID NO: 9140 - protein, 1186 aa, Rattus norvegicus; identical to SEQ ID NO: 9132
  ref <308>: DATABASE ACCESSION NUMBER: SWISS-Prot / AAB58646
  ref <309>: DATABASE ENTRY DATE: 2003-02-01

SEQ ID NO: 9141 - DNA, 4248 bp, Homo sapiens; identical to SEQ ID NO: 9133
  ref <308>: DATABASE ACCESSION NUMBER: EMBL / AB018303
  ref <309>: DATABASE ENTRY DATE: 2002-05-12

SEQ ID NO: 9142 - protein, 1224 aa, Homo sapiens; identical to SEQ ID NO: 9134
  ref <308>: DATABASE ACCESSION NUMBER: SWISS-Prot / BAA34480
  ref <309>: DATABASE ENTRY DATE: 2002-06-13

SEQ ID NO: 9143 - DNA, 4665 bp, Rattus norvegicus; identical to SEQ ID NO: 9131
  ref <308>: DATABASE ACCESSION NUMBER: EMBL / U92564
  ref <309>: DATABASE ENTRY DATE: 2000-03-04

SEQ ID NO: 9144 - protein, 1186 aa, Rattus norvegicus; identical to SEQ ID NO: 9132
  ref <308>: DATABASE ACCESSION NUMBER: SWISS-Prot / AAB58646
  ref <309>: DATABASE ENTRY DATE: 2003-02-01

SEQ ID NO: 9145 - DNA, 4248 bp, Homo sapiens; identical to SEQ ID NO: 9133
  ref <308>: DATABASE ACCESSION NUMBER: EMBL / AB018303
  ref <309>: DATABASE ENTRY DATE: 2002-05-12

SEQ ID NO: 9146 - protein, 1224 aa, Homo sapiens; identical to SEQ ID NO: 9134
  ref <308>: DATABASE ACCESSION NUMBER: SWISS-Prot / BAA34480
  ref <309>: DATABASE ENTRY DATE: 2002-06-13

SEQ ID NO: 9147 - DNA, 1619 bp, Rattus norvegicus
  ref <308>: DATABASE ACCESSION NUMBER: EMBL / U93197
  ref <309>: DATABASE ENTRY DATE: 2000-03-04
ggttcgagagtcggttgaacaacaggctgatagttttaaagcgactcgcttcaacctggagacagagtggaagaacaactacccccgcctgcgggagctcgacaggaatgaactatttgaaaaggctaaaaatgagatcctcgatgaagtcatcagtctgagccaggttactccaaagcactgggaggagatccttcagcagtccctgtgggaacgagtgtcaacgcatgtgatcgagaacatctacctcccagctgcccagaccatgaactcaggaacattcaacaccacagtggacatcaagcttaaacagtggactgacaagcagcttcctaataaagcagtcgaggttgcttgggagaccctacaagacgaattttcccgcttcatgacagaacccaaaggaaaggaacacgatgacatatttgacaaacttaaggaggctgtgaaggaggagagtatcaagcggcacaaatggaacgacttcgcagaagacagcttgagggtcatccagcacaacgctctggaggaccggtccatatcagataagcaacagtgggacgcagccatctacttcatggaagaggcacttcaaggtcgtctcaaggatactgaaaatgctattgaaaacatgatcgggccagactggaaaaagaggtggatatactggaagaatcggacccaagagcagtgtgttcacaatgaaaccaagaatgaattggaaaagatgctgaaggttaatgatgaacacccagcttatcttgcaagtgatgagattaccacagtccggaagaacctggaatctcgaggagtcgaagtcgatccaagcctgattaaggatacttggcatcaagtctatagaagacatttcctaaaaacagctctaaatcactgtaacctttgtcggagaggtttttattactaccagaggcattttatagactctgagctggagtgcaacgacgtggtcctgttctggcgaatacagcgcatgctcgctatcactgccaacacgctgaggcagcagctgacaaacaccgaagttaggcggctagagaaaaacgttaaagaggtattagaagattttgctgaagacggcgagaagaaggttaaattgcttactggcaaacgagttcagctggcagaagatctcaagaaagttagagaaattcaagaaaaacttgatgctttcattgaagctcttcaccaggagaagtagacggtgtcaaaatcctgctcatgttaacacctctgcatacatttgaagaacgaaaacttcagagtcttgtcctgcctccttttctccagttctacccttttcagtgcaaaataaagtcatagggtaaaagtaatgtatgtgtggtacaggcacttaacccgcagctgccgtgtgagcagaagaacactggaaatggcaactaccttctgtgtgcttgtgctgacaggaaacactgggaaaacatagttggccttgaggcttagtcctcaaagataaggaggtggctctctcgggccttatctgtggtggcactaatgcgactcgttatgggtgttatcagacatttagtggtagttgctttggaataaaatggtactattttaaaaaaaaaaaaaaaaaa

SEQ ID NO: 9148 - protein, 317 aa, Rattus norvegicus
  ref <308>: DATABASE ACCESSION NUMBER: SWISS-Prot / AAB51724
  ref <309>: DATABASE ENTRY DATE: 2001-12-01
MNSGTFNTTVDIKLKQWTDKQLPNKAVEVAWETLQDEFSRFMTEPKGKEHDDIFDKLKEAVKEESIKRHKWNDFAEDSLRVIQHNALEDRSISDKQQWDAAIYFMEEALQGRLKDTENAIENMIGPDWKKRWIYWKNRTQEQCVHNETKNELEKMLKVNDEHPAYLASDEITTVRKNLESRGVEVDPSLIKDTWHQVYRRHFLKTALNHCNLCRRGFYYYQRHFIDSELECNDVVLFWRIQRMLAITANTLRQQLTNTEVRRLEKNVKEVLEDFAEDGEKKVKLLTGKRVQLAEDLKKVREIQEKLDAFIEALHQEK

SEQ ID NO: 9149 - DNA, 1338 bp, Homo sapiens
  ref <308>: DATABASE ACCESSION NUMBER: EMBL / AK022522
  ref <309>: DATABASE ENTRY DATE: 2002-08-06
agagaaaaatgttaaagaggtattggaagattttgctgaagatggtgagaagaagattaaattgcttactggtaaacgcgttcaactggcggaagacctcaagaaagttagagaaattcaagaaaaacttgatgctttcattgaagctcttcatcaggagaaataaattaaaatcgtactcataatcagctctgcatacatctgaagaacaaaaacatcaacgtcttttgtccagcctctttttcttctgctgttccacctttctaaacgtacaataaagtcatgggataaaaataatcgatgtatgttacgggcgctttaaccatcagctgcctctcgaatggaagaacagtggtaatggattaacatcctattttgttgtactaaagtgacaaatcggaataatataattggtatggccattaggttcagtccttgaagataagaagcttgttctctgtttgttgtcttatttgtggtggcactcgtttaatggattaactgaggttgctcaatgttcagtttcttttccagaaatacaatgctaggtgttttgaaataaaacttatatagcaattgtttaaagttatcaattgtatataaaatcacagtagcctgctaaatcattgtatgtgtctgtagtattctattcccagaaactatttgaccatgataattcagtttatattcaccacatgaaagaaaaatgggtaacagaagaacccctaaaacaggttaatttggattgtaacgttcagtgaaagaaatttcaacccttcatagccagcgaagaaatttgccttggaagccaagtcagtaccagcttacctatttgattcagttgctgttttctcactctctatatccatttgaaattgatttattttagatgttgtatacttacgttaggctttctgttaatagtggtttttctcctgttgacagagccaccggattatgacacaggatgaggaaggttaaggataatcaattgactaatttcatttagaatattatcaaacatttcaactaggtatcagaaaaaggctttctttcataagactattttaaatagaaattatttcaacaattaaagtaatgttgaccatccccctctcagctgaataaagaaaaatttagttcaatttattgcaatttaattacaatactaccttcacaacattttcatgtgttttaaataaatattttttaattggctaaaggacattcaagcaaagaaatgctttctttacttaaaatgtctatctcatttgctgctttttcactaagcctttactttgttaataaaagtgtccattgtgtgatgtttttgatttt

SEQ ID NO: 9150 - protein, 960 aa, Homo sapiens
  ref <308>: DATABASE ACCESSION NUMBER: SWISS-Prot / O60313
  ref <309>: DATABASE ENTRY DATE: 2002-06-15
MWRLRRAAVACEVCQSLVKHSSGIKGSLPLQKLHLVSRSIYHSHHPTLKLQRPQLRTSFQQFSSLTNLPLRKLKFSPIKYGYQPRRNFWPARLATRLLKLRYLILGSAVGGGYTAKKTFDQWKDMIPDLSEYKWIVPDIVWEIDEYIDFEKIRKALPNSEDLVKLAPDFDKIVESLSLLKDFFTSGSPEETAFRATDRGSESDKHFRKVSDKEKIDQLQEELLHTQLKYQRILERLEKENKELRKLVLQKDDKGIHHRKLKKSLIDMYSEVLDVLSDYDASYNTQDHLPRVVVVGDQSAGKTSVLEMIAQARIFPRGSGEMMTRSPVKVTLSEGPHHVALFKDSSREFDLTKEEDLAALRHEIELRMRKNVKEGCTVSPETISLNVKGPGLQRMVLVDLPGVINTVTSGMAPDTKETIFSISKAYMQNPNAIILCIQDGSVDAERSIVTDLVSQMDPHGRRTIFVLTKVDLAEKNVASPSRIQQIIEGKLFPMKALGYFAVVTGKGNSSESIEAIREYEEEFFQNSKLLKTSMLKAHQVTTRNLSLAVSDCFWKMVRESVEQQADSFKATRFNLETEWKNNYPRLRELDRNELFEKAKNEILDEVISLSQVTPKHWEEILQQSLWERVSTHVIENIYLPAAQTMNSGTFNTTVDIKLKQWTDKQLPNKAVEVAWETLQEEFSRFMTEPKGKEHDDIFDKLKEAVKEESIKRHKWNDFAEDSLRVIQHNALEDRSISDKQQWDAAIYFMEEALQARLKDTENAIENMVGPDWKKRWLYWKNRTQEQCVHNETKNELEKMLKCNEEHPAYLASDEITTVRKNLESRGVEVDPSLIKDTWHQVYRRHFLKTALNHCNLCRRGFYYYQRHFVDSELECNDVVLFWRIQRMLAITANTLRQQLTNTEVRRLEKNVKEVLEDFAEDGEKKIKLLTGKRVQLAEDLKKVREIQEKLDAFIEALHQEK

SEQ ID NO: 9151 - DNA, 3128 bp, Rattus norvegicus
  ref <308>: DATABASE ACCESSION NUMBER: EMBL / U94340
  ref <309>: DATABASE ENTRY DATE: 2000-03-04
tctgcccatatgtgcagatctagagggaggatggcggaggccacggagaggctttaccgagtggagtacgctaagagcgggcgcgcctcttgcaagaaatgcagcgagagtatccccaaggactcgctccgcatggccatcatggtgcagtcacccatgttcgatggaaaagtcccacactggtatcacttctcctgcttctggaaggtgggccactccatccggcagcctgacacagaggtggacgggttctctgagctgcggtgggatgaccagcagaaggtcaagaagaccgcagaggctggaggcgtggcaggcaaaggccagcatggaggtggcggcaaggcggagaagacgctgggcgactttgcggcagagtatgccaagtccaacaggagcacatgcaagggctgcatggagaagatagagaagggtcagatgcgcctgtccaagaagatgctggatccagagaagccgcaactgggtatgattgaccgctggtaccatccaacttgctttgtcaagaaccgggacgagctgggcttccggcctgagtacagtgccagccagctcaagggctttagcctcctctctgcagaagacaaagaagctctgaagaagcagctcccggcagtcaagagtgaaggaaagagaaaatgtgacgaggtggatggaatagatgaagtagccaaaaagaaatctaaaaaaggaaaggacaaggagagtagtaaactggaaaaggcgctcaaggctcagaacgagctggtctggaatatcaaagatgagctgaagaaagcctgctccaccaacgacctgaaggagttgctcatcttcaaccagcagcaagtaccatctggagagtccgcaatcctggaccgagttgctgatggcatggcgtttggggcccttctgccctgcaaggagtgttcaggacagctggtttttaagagcgacgcttattactgtactggggatgtcactgcctggaccaagtgcatggtcaagacacagaatcccagccgaaaggaatgggtaactccaaaggaattccgagaaatatcctacctcaagaaattaaagatcaaaaagcaggaccggctgttccctccagagagcagcgccccagcaccaccagcacctcccgtctcgatcacctccgcacccacagctgtgaactcctctgcaccagcagacaaacccctgtctaacatgaagatcctgactcttggtaagctctcccagaacaaggacgaagcaaaggccatgattgagaaactcggaggcaagctgacaggatctgccaacaaggcctccttgtgtatcagcactaagaaggaggtggagaagatgagtaagaagatggaggaagtgaaagcagccaatgttcgagtcgtgtgtgaggacttcctccaggatgtgtctgcctcagctaagagcctccaagagctgctctcagcccatagcttgtcctcgtggggggctgaggtgaaggtagagcctggtgaagtggtggtccccaaggggaagtcagctgcaccctccaagaagagcaagggtgctgtcaaggaggaaggtgtcaacaagtctgaaaagaggatgaaactaactctgaagggaggagcagccgttgatcctgactctggtctggaacactctgcacatgtcctggagaaaggcgggaaggtgttcagtgccacgcttggcctggtggacattgtgaaagggactaactcctattacaaactgcaacttctggagtccgacaaggagagcaggtattggatcttccggtcctggggccgagtgggcacagttatcggcagtaacaagcttgagcagatgccgtccaaagaggatgctgttgaacacttcatgaagttatacgaagagaagactggaaatgcctggcactcgaaaaacttcacaaagtatcccaagaagttctaccctctggagattgactatggccaggacgaagaggcagtaaagaagctggcggtgaagcctggcactaagtcgaagctgccgaagccggtgcaggagctcgtcgggatgatcttcgacgtggagagcatgaagaaggccttggtggagtacgagattgaccttcagaagatgcccttggggaaactgagcagaaggcagatccaggccgcctactctatcctcagtgaggtccagcaggcagtgtcccaaggcagcagtgaatctcagatcctggatctctccaatcgcttctacaccctcatcccccatgactttggaatgaagaagcccccacttctgaacaacacagacagtgtgcaggccaaggtggagatgctggacaacctcctggacatcgaggttgcctatagtcttctcaggggtgggtctgatgacagcagtaaggaccccatcgatgtcaactatgagaagctcaaaactgacattaaggtggttgacagagattctgaagaggctgaggtcatcaggaagtatgtgaagaacactcacgcgaccacgcacaatgcctatgacctggaagtgatagacatctttaagatagagcgagagggagagagccaacgctacaagcccttcaggcagcttcacaaccggagactgctgtggcacgggtccaggaccaccaacttcgcaggcatcctgtcacagggtctgcggatagccccacctgaagcacctgtgacaggctacatgtttgggaaaggaatctactttgctgatatggtgtccaaaagtgcgaactactgccacacgtctcagggagacccgattggcttaatactgttgggagaagttgcccttggaaacatgtacgaactcaagcatgcttctcacatcagcaagttacccaagggcaagcacagtgtcaaaggtttgggcaaaaccgcccctgacccttcggccagcatcaccctggatggtgtagaggttccgctgggaacagggattccgtctggtgttaatgacacctgcctgctgtataacgagtacattgtctacgacattgctcaggtgaatctgaagtacctactgaaactgaagttcaatttcaagacctccttgtggtagagtgaaggcgggctttgccagcacccggggcctaggggataatgcccctagtg

SEQ ID NO: 9152 - protein, 1013 aa, Rattus norvegicus
  ref <308>: DATABASE ACCESSION NUMBER: SWISS-Prot / P27008
  ref <309>: DATABASE ENTRY DATE: 2001-10-16
AEATERLYRVEYAKSGRASCKKCSESIPKDSLRMAIMVQSPMFDGKVPHWYHFSCFWKVGHSIRQPDTEVDGFSELRWDDQQKVKKTAEAGGVAGKGQHGGGGKAEKTLGDFAAEYAKSNRSTCKGCMEKIEKGQMRLSKKMLDPEKPQLGMIDRWYHPTCFVKNRDELGFRPEYSASQLKGFSLLSAEDKEALKKQLPAVKSEGKRKCDEVDGIDEVAKKKSKKGKDKESSKLEKALKAQNELVWNIKDELKKACSTNDLKELLIFNQQQVPSGESAILDRVADGMAFGALLPCKECSGQLVFKSDAYYCTGDVTAWTKCMVKTQNPSRKEWVTPKEFREISYLKKLKIKKQDRLFPPESSAPAPPAPPVSITSAPTAVNSSAPADKPLSNMKILTLGKLSQNKDEAKAMIEKLGGKLTGSANKASLCISTKKEVEKMSKKMEEVKAANVRVVCEDFLQDVSASAKSLQELLSAHSLSSWGAEVKVEPGEVVVPKGKSAAPSKKSKGAVKEEGVNKSEKRMKLTLKGGAAVDPDSGLEHSAHVLEKGGKVFSATLGLVDIVKGTNSYYKLQLLESDKESRYWIFRSWGRVGTVIGSNKLEQMPSKEDAVEHFMKLYEEKTGNAWHSKNFTKYPKKFYPLEIDYGQDEEAVKKLAVKPGTKSKLPKPVQELVGMIFDVESMKKALVEYEIDLQKMPLGKLSRRQIQAAYSILSEVQQAVSQGSSESQILDLSNRFYTLIPHDFGMKKPPLLNNTDSVQAKVEMLDNLLDIEVAYSLLRGGSDDSSKDPIDVNYEKLKTDIKVVDRDSEEAEVIRKYVKNTHATTHNAYDLEVIDIFKIEREGESQRYKPFRQLHNRRLLWHGSRTTNFAGILSQGLRIAPPEAPVTGYMFGKGIYFADMVSKSANYCHTSQGDPIGLILLGEVALGNMYELKHASHISKLPKGKHSVKGLGKTAPDPSASITLDGVEVPLGTGIPSGVNDTCLLYNEYIVYDIAQVNLKYLLKLKFNFKTSLW

SEQ ID NO: 9153 - DNA, 3640 bp, Homo sapiens
  ref <308>: DATABASE ACCESSION NUMBER: EMBL / M18112
  ref <309>: DATABASE ENTRY DATE: 2000-03-04
aatctatcaggaacgcgtgcgtcgcgtgttcgtgcggctctggccgctcagctcggctgggtgagcgcacgcgagcgcagcggcagcgtgtttctaggtcgtgcgtcgggcttccggagctttgcggcagctagggaggatggcggagtcttcggataagctctatcgagtcgagtacgccaagagcgggcgcgcctcttgcaagaaatgcagcgagagcatccccaaggactcgctccggatggccatcatggtgcagtcgcccatgtttgatggaaaagtcccacactggtaccacttctcctgcttctggaaggtgggccactccatccggcaccctgacgttcaggtggatgggttctctgagcttcggtgggatgaccagcagaaagtcaagaagacagcggaagctggaggagtgacaggcaaaggccaggatggaattggtagcaaggcagagaagactctgggtgactttgcagcagagtatgccaagtccaacagaagtacgtgcaaggggtgtatggagaagatagaaaagggccaggtgcgcctgtccaagaagatggtggacccggagaagccacagctaggcatgattgaccgctggtaccatccaggctgctttgtcaagaacagggaggagctgggtttccggcccgagtacagtgcgagtcagctcaagggcttcagcctccttgctacagaggataaagaagccctgaagaagcagctcccaggagtcaagagtgaaggaaagagaaaaggcgatgaggtggatggagtggatgaagtggcgaagaagaaatctaaaaaagaaaaagacaaggatagtaagcttgaaaaagccctaaaggctcagaacgacctgatctggaacatcaaggacgagctaaagaaagtgtgttcaactaatgacctgaaggagctactcatcttcaacaagcagcaagtgccttctggggagtcggcgatcttggaccgagtagctgatggcatggtgttcggtgccctccttccctgcgaggaatgctcgggtcagctggtcttcaagagcgatgcctattactgcactggggacgtcactgcctggaccaagtgtatggtcaagacacagacacccaaccggaaggagtgggtaaccccaaaggaattccgagaaatctcttacctcaagaaattgaaggttaaaaagcaggaccgtatattccccccagaaaccagcgcctccgtggcggccacgcctccgccctccacagcctcggctcctgctgctgtgaactcctctgcttcagcagataagccattatccaacatgaagatcctgactctcgggaagctgtcccggaacaaggatgaagtgaaggccatgattgagaaactcggggggaagttgacggggacggccaacaaggcttccctgtgcatcagcaccaaaaaggaggtggaaaagatgaataagaagatggaggaagtaaaggaagccaacatccgagttgtgtctgaggacttcctccaggacgtctccgcctccaccaagagccttcaggagttgttcttagcgcacatcttgtccccttggggggcagaggtgaaggcagagcctgttgaagttgtggccccaagagggaagtcaggggctgcgctctccaaaaaaagcaagggccaggtcaaggaggaaggtatcaacaaatctgaaaagagaatgaaattaactcttaaaggaggagcagctgtggatcctgattctggactggaacactctgcgcatgtcctggagaaaggtgggaaggtcttcagtgccacccttggcctggtggacatcgttaaaggaaccaactcctactacaagctgcagcttctggaggacgacaaggaaaacaggtattggatattcaggtcctggggccgtgtgggtacggtgatcggtagcaacaaactggaacagatgccgtccaaggaggatgccattgagcacttcatgaaattatatgaagaaaaaaccgggaacgcttggcactccaaaaatttcacgaagtatcccaaaaagttctaccccctggagattgactatggccaggatgaagaggcagtgaagaagctgacagtaaatcctggcaccaagtccaagctccccaagccagttcaggacctcatcaagatgatctttgatgtggaaagtatgaagaaagccatggtggagtatgagatcgaccttcagaagatgcccttggggaagctgagcaaaaggcagatccaggccgcatactccatcctcagtgaggtccagcaggcggtgtctcagggcagcagcgactctcagatcctggatctctcaaatcgcttttacaccctgatcccccacgactttgggatgaagaagcctccgctcctgaacaatgcagacagtgtgcaggccaaggtggaaatgcttgacaacctgctggacatcgaggtggcctacagtctgctcaggggagggtctgatgatagcagcaaggatcccatcgatgtcaactatgagaagctcaaaactgacattaaggtggttgacagagattctgaagaagccgagatcatcaggaagtatgttaagaacactcatgcaaccacacacaatgcgtatgacttggaagtcatcgatatctttaagatagagcgtgaaggcgaatgccagcgttacaagccctttaagcagcttcataaccgaagattgctgtggcacgggtccaggaccaccaactttgctgggatcctgtcccagggtcttcggatagccccgcctgaagcgcccgtgacaggctacatgtttggtaaagggatctatttcgctgacatggtctccaagagtgccaactactgccatacgtctcagggagacccaataggcttaatcctgttgggagaagttgcccttggaaacatgtatgaactgaagcacgcttcacatatcagcaagttacccaagggcaagcacagtgtcaaaggtttgggcaaaactacccctgatccttcagctaacattagtctggatggtgtagacgttcctcttgggaccgggatttcatctggtgtgaatgacacctctctactatataacgagtacattgtctatgatattgctcaggtaaatctgaagtatctgctgaaactgaaattcaattttaagacctccctgtggtaattgggagaggtagccgagtcacacccggtggctctggtatgaattcacccgaagcgcttctgcaccaactcacctggccgctaagttgctgatgggtagtacctgtactaaaccacctcagaaaggattttacagaaacgtgttaaaggttttctctaacttctcaagtcccttgttttgtgttgtgtctgtggggaggggttgttttggggttgtttttgttttttcttgccaggtagataaaactgacatagagaaaaggctggagagagattctgttgcatagactagtcctatggaaaaaaccaagcttcgttagaatgtctgccttactggtttccccagggaaggaaaaatacacttccacccttttttctaagtgttcgtctttagttttgattttggaaagatgttaagcatttatttttagttaaaaataaaaactaatttcatact

SEQ ID NO: 9154 - protein, 1013 aa, Homo sapiens
  ref <308>: DATABASE ACCESSION NUMBER: SWISS-Prot / P09874
  ref <309>: DATABASE ENTRY DATE: 2002-06-15
AESSDKLYRVEYAKSGRASCKKCSESIPKDSLRMAIMVQSPMFDGKVPHWYHFSCFWKVGHSIRHPDVEVDGFSELRWDDQQKVKKTAEAGGVTGKGQDGIGSKAEKTLGDFAAEYAKSNRSTCKGCMEKIEKGQVRLSKKMVDPEKPQLGMIDRWYHPGCFVKNREELGFRPEYSASQLKGFSLLATEDKEALKKQLPGVKSEGKRKGDEVDGVDEVAKKKSKKEKDKDSKLEKALKAQNDLIWNIKDELKKVCSTNDLKELLIFNKQQVPSGESAILDRVADGMVFGALLPCEECSGQLVFKSDAYYCTGDVTAWTKCMVKTQTPNRKEWVTPKEFREISYLKKLKVKKQDRIFPPETSASVAATPPPSTASAPAAVNSSASADKPLSNMKILTLGKLSRNKDEVKAMIEKLGGKLTGTANKASLCISTKKEVEKMNKKMEEVKEANIRVVSEDFLQDVSASTKSLQELFLAHILSPWGAEVKAEPVEVVAPRGKSGAALSKKSKGQVKEEGINKSEKRMKLTLKGGAAVDPDSGLEHSAHVLEKGGKVFSATLGLVDIVKGTNSYYKLQLLEDDKENRYWIFRSWGRVGTVIGSNKLEQMPSKEDAIEHFMKLYEEKTGNAWHSKNFTKYPKKFYPLEIDYGQDEEAVKKLTVNPGTKSKLPKPVQDLIKMIFDVESMKKAMVEYEIDLQKMPLGKLSKRQIQAAYSILSEVQQAVSQGSSDSQILDLSNRFYTLIPHDFGMKKPPLLNNADSVQAKVEMLDNLLDIEVAYSLLRGGSDDSSKDPIDVNYEKLKTDIKVVDRDSEEAEIIRKYVKNTHATTHNAYDLEVIDIFKIEREGECQRYKPFKQLHNRRLLWHGSRTTNFAGILSQGLRIAPPEAPVTGYMFGKGIYFADMVSKSANYCHTSQGDPIGLILLGEVALGNMYELKHASHISKLPKGKHSVKGLGKTTPDPSANISLDGVDVPLGTGISSGVNDTSLLYNEYIVYDIAQVNLKYLLKLKFNFKTSLW

SEQ ID NO: 9155 - DNA, 3628 bp, Rattus norvegicus
  ref <308>: DATABASE ACCESSION NUMBER: EMBL / U94904
  ref <309>: DATABASE ENTRY DATE: 2000-03-04
ccaaagcgtacaccactcaatccttagcaagtgttgcatatctgataaacaccttggccaacaatgtcctacagatggctggatattcaggcatcgcagttacggagaatggaatcttcaatcaaccatatttcacaaacagttgatattcataaagagaaagtggcaagaagagaaattggtattttgactaccaataaaaacacttcaaggacccataagattattgcaccagccagccttgagcggccagtccgttatattcgaaaacctattgactacacaattttagatgacattggacatggcgtaaaggtgagtacccagaatatgaagatgggtggactgccacgtacaacacctccaactcagaagcccccaagtccccctatgtcagggaaggggacacttgggcggcactccccctatcgaacactggagccagtgcgtcctccagtggtaccaaatgattacgtacctagcccaacccgtaatatggctccctcgcagcagagccctgtgaggacagcttctgtgaatcaaagaaatcgaacttacagcagtgggagcagtggaggaagccacccaagtagtcggagcagcagtcgggagaacagcggaagtggtagtgtgggggttcccatcgctgttcctactccgtctcctcctagcgtctttccaggtcatcctgttcagttctacagcatgaataggcctgcctctcgccatacgccacccacaatagggggctcattgccctatagacgccctccttccataacttcacaaacaagccttcagaatcagatgaatggaggtcctttttataaccagaatccagtttcagatacaccacctccaccacctcctgtggatgagccagtgttcgatgagtccccacctccaccacctcctccagaggactcagaagaggaggaagcagctgtggttgagtacagcgatccttacgccgaagaggacccaccatgggcaccaaggtcttacttggaaaaggtcgtggcaatctatgattatacgaaagacaaggaggatgagctgtcctttcaggaaggagccattatctatgtcatcaagaagaacgatgatggttggtatgagggagttatgaatggagtgactgggctcttccctgggaattacgttgagtcccatcatgcattattcggagtaaagcccagcacagccgtgcttcttgttcatggctcaggtattcccagattagctagaggccctgggaattccctcccaggaaatatgatgaagcatacaaatgataaagttactctttttattactgttttggtttatcccctagtatcaaaacctgaaagccaagtctcgaacaagtggaacttcttgggtcactttgcattatgcctatctagattgaaaaatgccatttctcagtcacggaaaggcactaccaacatcgaacatatagctaaaatatataggaccaagactaacttgagaaaaaaatctgggatcttctcaggaatactgtacacccttggatttctctgtcctgcagaatctgagacattggatgctcattgcctctgctttggggctaacctcatggcctggtggacacccttgccctttactttcagtatatggagaggttggttccagtgtttaaatactttatttaactacttttggattgcttaaaaaggctgtttttcttctttaacactgtaaatcctgtgttctcttagcactggagtgctaggtgagttaatcccgaactcccttgcatcctgtcctgtttgtagattataaggatgacaaaatgtgagtctccaaacattcccagggttgttaccagtttgattttaatgcactgttgcatgagactgcattgctgatagcagccagtaaaaccgatgtgaaatgtggtaggtacttcaagtactgaggtgagcttgctggacacaaaggttcctaaggagctccaagccttgaggcactgtttcagagtagagcctaggaaatcagaccagctattactgttcttttgatatttaaacacccccccccacctcttttaagaagagactagttgtaagtctctgacagtcactggactgggaatgaaaggctgctactgtgctcttggaccattatcaatggcagtgttagctgatgccattttgcttctctcagcctatagaaaaatcaagtatcctcctgatttgaagtgattagactttaaagtagccactcctcgtaatagtctgaaccttgtgagtcagagtaaagagtttactggaaaagactaatatggataaaatacttaccagtcacactgatgaaaaccagtctgtatttgaaacaattggcatcccctcatctactgaaaagaagaggaagcaaagctgttgtgattcagatgcaggccttgcacatctgtctagcgagtctagaagaacaagtgttgtagatgcgagaagaaaggcaggctgtaaggacgcgctaatactccactcgtagatctgttatctgagcctgaggcttcagtctgtggcaagtctcatacccaaacagtgtccttctcaagaccctttttgctttaaggttgtaggttttgtttgtttcagacacggtgctcttctgcttctgcttagcctctcaaatattaggactacaaggaggaccctacaccaggagcaggatttttggttttaatacacgttgcatgcacatcagcagctattacacttttagactttttctaaatgctttggatttttctttaatttgcttctagtgcacttttcacttcatggtttttgttaggtcatcttgactgtcttcaggatatggccctgaagccctctgaacctttagctccattatggatataagcaagagtgtatatgaacatttaactctgagtgtattggtacatggaaacttgtgaaaatagctatactaattatttatttaagtagccttttgctgaacaagcttagggattgataagacattggaaacccagccaacagttagctttttgtagtcacagaaacaactggtggtaggcactggaacacagctcaccttctgaacctctgctgaattagggtttgcaggaaacacgtgtgcaatcctttgtgctgaagatgtgcgctgggggtgatccatgggacaggtgaccccacttgatccatgggacaggtgaccccactccttgtattattgagtactgatgtgattttaaaaacaaaacacagaatacggtctgttggccttttttccacccattttaaactttagcaattttttttgaaatctatgaattgtcaaggaaggatactctgaacaatgagccaggcctacaggtaattggagccttttaatgtatgtaatattttatagattgcatgctattaatactgtgaggttatttcctgttttattgtaaattttcccacttatttgcccattaacaaaaatatggttgatattaggaattttaaacaaatgttgaaactttctgaccagattgcaaggcagtttaccgagacacaggtactgagggctctggtcaatcctgaaatgtctgactctgtgcacagtttctttaccctttaaaaaaaaa

SEQ ID NO: 9156 - protein, 543 aa, Rattus norvegicus
  ref <308>: DATABASE ACCESSION NUMBER: SWISS-Prot / AAC53493
  ref <309>: DATABASE ENTRY DATE: 2003-02-01
MSYRWLDIQASQLRRMESSINHISQTVDIHKEKVARREIGILTTNKNTSRTHKIIAPASLERPVRYIRKPIDYTILDDIGHGVKVSTQNMKMGGLPRTTPPTQKPPSPPMSGKGTLGRHSPYRTLEPVRPPVVPNDYVPSPTRNMAPSQQSPVRTASVNQRNRTYSSGSSGGSHPSSRSSSRENSGSGSVGVPIAVPTPSPPSVFPGHPVQFYSMNRPASRHTPPTIGGSLPYRRPPSITSQTSLQNQMNGGPFYNQNPVSDTPPPPPPVDEPVFDESPPPPPPPEDSEEEEAAVVEYSDPYAEEDPPWAPRSYLEKVVAIYDYTKDKEDELSFQEGAIIYVIKKNDDGWYEGVMNGVTGLFPGNYVESHHALFGVKPSTAVLLVHGSGIPRLARGPGNSLPGNMMKHTNDKVTLFITVLVYPLVSKPESQVSNKWNFLGHFALCLSRLKNAISQSRKGTTNIEHIAKIYRTKTNLRKKSGIFSGILYTLGFLCPAESETLDAHCLCFGANLMAWWTPLPFTFSIWRGWFQCLNTLFNYFWIA

SEQ ID NO: 9157 - DNA, 1542 bp, Homo sapiens
  ref <308>: DATABASE ACCESSION NUMBER: EMBL / AF260261
  ref <309>: DATABASE ENTRY DATE: 2002-06-20
atggcggagctgcagatgctgctggaagaggaaatcccggggggccgccgggcccttttcgacagctacacaaatctggaacgggtggccgattactgcgagaacaactacatacagtcagcagataagcagagagccctagaagaaaccaaagcctacaccacccaatccttagcaagtgttgcctatctgataaacaccttggccaacaatgtcctgcagatgctggatatccaggcatcccagctacgaaggatggaatcttcaatcaatcatatttcacaaacagttgatattcataaagagaaagttgcaagaagagaaattggtattttgactaccaataaaaacacttcaaggacacataagattattgctccagccaaccttgaacgaccagttcgttatattagaaaacctattgactatacaattctagatgatattggacatggagtaaagtggttgcttagatttaaggtgagtacccagaacatgaagatgggtgggctgccgcgtacaacacctccaactcagaagccccctagtccccctatgtcagggaaagggacacttgggcggcactccccctatcgcacactggagccagtgcgtcctccagtggtaccaaatgattacgtacctagcccaacccgtaatatggctccctcgcagcagagccctgtgaggacagcttctgtgaatcaaagaaatcgaacttacagcagcagtgggagtagtggagggagccacccaagtagtcggagcagcagtcgagagaacagtggaagtggtagtgtgggggttcctattgctgttcctactccatctcctcccagtgtctttccagcccctgctggctctgctggcactcctccccttcctgctacttctgcatctgcccctgctcctcttgttcctgctactgtcccttcctccactgccccaaacgctgctgctgggggtgccccaaaccttgctgatggcttcacttctccaactccccctgttgtttcttccactccccctacaggtcatcctgtacagttctacagcatgaataggcctgcctctcgccatactcccccaacaatagggggttcgttgccctatagacgccctccttccattacttcacaaacaagccttcagaatcagatgaatggaggacctttttatagccagaatccagtttcagatacaccacctccaccgccacctgtggaagaaccagtctttgatgagtctcccccacctcctcctcctccagaagattacgaagaggaggaagctgctgtggttgagtatagtgatccttatgctgaagaggacccaccgtgggctccacgttcttacttggaaaaggttgtggcaatttatgactatacaaaagacaaggaagatgagctgtcctttcaggaaggagccattatttatgtcatcaagaagaatgacgatggttggtatgagggagttatgaatggagtgactgggctttttcctgggaattacgttgagtctatcatgcattattctgagtaa

SEQ ID NO: 9158 - protein, 475 aa, Homo sapiens
  ref <308>: DATABASE ACCESSION NUMBER: Refseq / NP_005750
  ref <309>: DATABASE ENTRY DATE: 2002-04-10
MAELQMLLEEEIPGGRRALFDSYTNLERVADYCENNYIQSADKQRALEETKAYTTQSLASVAYLINTLANNVLQMLDIQASQLRRMESSINHISQTVDIHKEKVARREIGILTTNKNTSRTHKIIAPANLERPVRYIRKPIDYTILDDIGHGVKVSTQNMKMGGLPRTTPPTQKPPSPPMSGKGTLGRHSPYRTLEPVRPPVVPNDYVPSPTRNMAPSQQSPVRTASVNQRNRTYSSSGSSGGSHPSSRSSSRENSGSGSVGVPIAVPTPSPPSVFPGHPVQFYSMNRPASRHTPPTIGGSLPYRRPPSITSQTSLQNQMNGGPFYSQNPVSLAPPPPSILQVTPQLPLMGFVARVQENISDTPPPPPPVEEPVFDESPPPPPPPEDYEEEEAAVVEYSDPYAEEDPPWAPRSYLEKVVAIYDYTKDKEDELSFQEGAIIYVIKKNDDGWYEGVMNGVTGLFPGNYVESIMHYSE

SEQ ID NO: 9159 - DNA, 2516 bp, Rattus norvegicus
  ref <308>: DATABASE ACCESSION NUMBER: EMBL / U95178
  ref <309>: DATABASE ENTRY DATE: 1998-09-04
cccgtcatgtctaacgaagtagaaacaagcacaaccaatggtcagcctgaccaacaggctgcaccgaaagcaccatcaaagaaggaaaagaagaaaggttctgaaaagacagatgagtatctgttggccaggttcaaaggtgatggtgtaaaatacaaggccaagctaatcggtattgatgatgtgcctgatgcgaggggagacaaaatgagtcaggattctatgatgaaactcaagggaatggcagcagctggtcgctctcagggacagcacaagcaaaggatctgggtcaacatttccctgtctggcataaaaattattgatgagaaaaccggggtaatagagcatgaacatccagtaaataagatttccttcattgctcgtgatgtgacagacaatagagcatttggttatgtgtgtggaggagaaggccagcatcaattttttgctataaaaacagggcaacaggctgaaccattagtcgtcgatcttaaagacctttttcaagttatctataatgtaaagaaaaaggaagaagaaaagaaaaaggttgaagaagccaacaaagcggaagagaatgggagtgaggccctaatgacccttgatgatcaagctaacaaactgaagctgggtgttgaccagatggatttgtttggggacatgtctacacctcctgacctaaataatccaacatcttcagcaaacgacctgcttgcttcagatatctttgcctcagaacctccaggccagatgtcccccacaggacaacctgcagtcccacaggcgaactttatggatctcttcaaaaccagtgctcctgccccaatggggtcggggcccctcgtaggtctaggtactgtcccagtaacacccccccaagcaggaccttggacacctgttgtcttcactccttctacaactgtggtcccaggagccataataagtggccagccttccggttttggtcagccactcgtctttggtacaaccccagcagtgcaagtttggaatcagccttcatcatttgcaactgcagcttcccctccacccccggcagtttggtgtcctaccacatctgtggcacccaacacttggtcatccacaagtcccctggggaatccttttcagagtagtaatatctttccaccttccaccatatccactcagtcctttcctcagcctatgatgtcctctgttctggtcacacctccccaaccacctccccgaaatggcccactaaaggacactcttagtgatgccttcactggcttagacccacttggggataaagaggtcaaggaagtgaaagaaatgtttaaggacttccagctgcggcagccacctcttgtaccctcgaggaagggggagacaccttcctctgggacctcaagcgccttctccagttacttcaacaataaagttggcattcctcaggagcatgtagaccatgatgattttgatgccaatcaactgttgaacaagattaatgaaccaccaaagccagcccccagacaaggtgtcctctcgggtaccaaatctgctgacaattcactcgagaaccctttctctaaagggttcagctcaacaaacccctccgtggtctctcagcctgcatcttctgatgcccacaggagcccttttggaaatccttttgcctaacttctttctgaagttgtaatgctgactgactatccagatgagcaaaaggctggctttggtcaaggattaagcagatagccagaaacgtgctgacctctgtccttgctccagctttgatgtattacctgttaccctacttgtctttgcctcatgtacttgtaaaaagcctttcactctctctaggctaaagctacactgaaacaatggctttacataaattaaactcctaagctctctagctccaatataaatgaagtagcttccctaccaaatccttgtctgtcgtgctcctagaaccttccagaatattctccgttttaccctcaatttgggaggtgtggccacctttacccttaatatcacactgccttgagtaaatgtccaaatccttgtagctctcaaggtcatttgtgattcctggtgtgcatcataaatctaaacattaatattaacattaataggaaagcaagacaccttgcttcccattcccactcagacaagtttttttatgataaaatgaaagcaagactaacttctcgaatccacccaaggaccatttcgagatggtctttctcagctaattgcatcatttaccaatcctactccaagtggtgtttacatttgacttgaaaaggagaaaggtctaactcaaaacataaggcattattcaaagctaataaaacaatttctccctggggccccacattgttttcattccagacactttgcagctgtttgaccctgatgatattatgccctacattttccttgaagattctgattttatttcatgtgattcttttttctcaataaagatgattattgtgtgcatttactaaacaaacaaaaaaaaaaaa

SEQ ID NO: 9160 - protein, 768 aa, Rattus norvegicus
  ref <308>: DATABASE ACCESSION NUMBER: SWISS-Prot / O88797
  ref <309>: DATABASE ENTRY DATE: 2002-06-15
MSNEVETSTTNGQPDQQAAPKAPSKKEKKKGSEKTDEYLLARFKGDGVKYKAKLIGIDDVPDARGDKMSQDSMMKLKGMAAAGRSQGQHKQRIWVNISLSGIKIIDEKTGVIEHEHPVNKISFIARDVTDNRAFGYVCGGEGQHQFFAIKTGQQAEPLVVDLKDLFQVIYNVKKKEEEKKKVEEANKAEENGSEALMTLDDQANKLKLGVDQMDLFGDMSTPPDLNNPTESRDILLVDLNSEIDTNQNSLRENPFLTNGVTSCSLPRPKPQASFLPESAFSANLNFFPTPNPDPFRDDPFAQPDQSAPSSFHSLTSADQKKANPGSLSTPQSKGPLNGDTDYFGQQFDQISNRTGKQEAQGGPWPYPSSQTQQAVRTQNGVSEKEQNGFHIKSSPNPFVGSPPKGLSVPNGVKQDLESSVQSSAHDSIAIIPPPQSTKPGRGRRTAKSSANDLLASDIFASEPPGQMSPTGQPAVPQANFMDLFKTSAPAPMGSGPLVGLGTVPVTPPQAGPWTPVVFTPSTTVVPGAIISGQPSGFGQPLVFGTTPAVQVWNQPSSFATAASPPPPAVWCPTTSVAPNTWSSTSPLGNPFQSSNIFPPSTISTQSFPQPMMSSVLVTPPQPPPRNGPLKDTLSDAFTGLDPLGDKEVKEVKEMFKDFQLRQPPLVPSRKGETPSSGTSSAFSSYFNNKVGIPQEHVDHDDFDANQLLNKINEPPKPAPRQGVLSGTKSADNSLENPFSKGFSSTNPSVVSQPASSDAHRSPFGNPFA

SEQ ID NO: 9161 - DNA, 2493 bp, Homo sapiens
  ref <308>: DATABASE ACCESSION NUMBER: EMBL / AK024965
  ref <309>: DATABASE ENTRY DATE: 2000-09-29
ggagatggtgccactgcactccagcctgggcgacagaacgagactctgtctcaaacaaacaaacttaaaactgtactcaggactatgtttaatattatatataaatatggtctatctgaaaatttggcttctatatgtattgtctattcttcccaatagggcaatggatacatttttatggttaggcacttctaatctgcactccctggcttttattttttttctctctatgagattcatattaattctaggaaatatacaggacaaccaagtttaaatccagtaactctactcaaaccttatattgatatgaaaaggggaggggaacggagggcagaaataatatacaagacttattcttgccttatgcctgtgaaccataggcatacttgtttgtgtatttaactccctttcactatgaatatgaagatcactgaatatgtatctttctttttagatagaggaagccagcaaagcagttgaggtaaaattgcatctttacttcttgttaatcatgtgtgtgacatgcgtaagcccctgttttctacctgcccaaccactctcgccacctcgcttattactatgtgtttatgacttctctgatcatgaaagatgtttagttaaaagatgataccaaaaccattgctgcttagcagactaatagagtggacaaatacattttatagacaaagctcaactaaatccttaaatatttgctatcttttcagaatgggagtgaggccctaatgattctagatgaccaaactaacaaactgaaatcgggtgttgaccagatggatttgtttggggacatgtctacacctcctgacctaaatagtccaacagtaagtgtttgtttttaaatttgcaatgtaataaaatgacatctataactcaaattggcaataaccagaaatcttaagcatctcattgaaacttggaaggtgactgttgatttttgcaaatgaagtgtcaatggtttttagaataaatgtgaatcttaagtcaccatgggaacctatccacactaattcagttatattaatattgcttacagattaaacctgaacaataagtcagcaatgtagtccttcttggtatcacttaggattagaaggaggaggtgaataatagtccttgaataagcctacttgaagaaagtatgactgttagatggttaatcataaagcctcctggcctcttcatttcttttgcattctgtctgttgcaatttagcagcataaatttggtgtgaagtaagatttaaaacaaacaagtggctcagttatattccaccaaagcttgtccttgttagaaagctgcccattctcataggattttataccatatccagtctgctcaatattgaatgatctgtaacaaccctgtaagaacagaacagtattttcctttataaattaaaaaaaaatggtggttcagggaaaaaaaaagaagaaaaaaaaataaaaaggaaagaggtccagattcaagacttaggcccaagtcttcagaccttccaaaacatacctctaatgaaaatgtccatgacattttgaatgacttcttgcaacttcttttatttatgtaacagtttcctgagcacctgctatttgcaaggcatagcagtaagatgcacaacatcaatgacatcatggaatttactctccggcagggagaccaacattaaaactaatcacatcgttagtaattgatgttactacagggtatttatctagttcagattcaggtaatgcttctgcaggagtgagtttctagatttgaacataaaagatgagaaggcaataaacagacaaaaagagaattagtctagaataatggggggaaatgtctagaaaggactctcttgtatcagaaaattatcatggaagcctatgtgaccaaggttacaggagttgaagcaatggatcaaagattggataaaattctcccttcagacttctgcagagaatttgaggcctgtgaatccttactgcataaaactttcaggtcaaatgagatggagaggagcagggacttcatgcattcttctctgaccctaaccatatgagtatcacaatgcatggtagcattctaaaatgcctttaagagagaagcctgtttaatattcattttagcagtgagccctaactcacttgcctatagaacctttcattcttcataatttttgttatagttctgaggataaactttttaaagtactagactagattatcctgacaggtccatcctaactctgaggtccttttggtttgtagtcaactttgtgctctcctccattagtgatgttttctcaaataaatcagtatctgaacacttacttcccaagtataaatgacattcaaacaagtaatattcaaagagagcaaagcactcaagatatgaagtggaattccactggaataggcaaggaagtactgcctatataatctacttctgtagacttctagaatgttctaaaaaaaaaaaaaaaaa

SEQ ID NO: 9162 - protein, 770 aa, Homo sapiens
  ref <308>: DATABASE ACCESSION NUMBER: Refseq / NP_001334
  ref <309>: DATABASE ENTRY DATE: 2001-12-24
MSNEVETSATNGQPDQQAAPKAPSKKEKKKGPEKTDEYLLARFKGDGVKYKAKLIGIDDVPDARGDKMSQDSMMKLKGMAARGRSQGQHKQRIWVNISLSGIKIIDEKTGVIEHEHPVNKISFIARDVTDNRAFGYVCGGEGQHQFFTIKTGQQAEPLVVDLKDLFQVIYNVKKKEEEKKKIEEASKAVENGSEALRILDDQTNKLKSGVDQMDLFGDMSTPPDLNSPTESKDILLVDLNSEIDTNQNSLRENPFLTNGITSCSLPRPTPQASFLPENAFSANLNFFPTPNPDPFRDDPFTQPDQSTPSSFDSLKSPDQKKENSSSSSTPLSNGPLNGDVDYFGQQFDQISNRTGKQEAQAGPWPFSSSQTQPAVRTQNGVSEREQNGFSVKSSPNPFVGSPPKGLSIQNGVKQDLESSVQSSPHDSIAIIPPPQSTKPGRGRRTAKSSANDLLASDIFAPPVSEPSGQASPTGQPTALQPNPLDLFKTSAPAPVGPLVGLGGVTVTLPQAGPWNTASLVFNQSPSMAPGAMMGGQPSGFSQPVIFGTSPAVSGWNQPSPFAASTPPPVPVVWGPSASVAPNAWSTTSPLGNPFQSNIFPAPAVSTQPPSMHSSLLVTPPQPPPRAGPPKDISSDAFTALDPLGDKEIKDVKEMFKDFQLRQPPAVPARKGEQTSSGTLSAFASYFNSKVGIPQENADHDDFDANQLLNKINEPPKPAPRQVSLPVTKSTDNAFENPFFKDSFGSSQASVASSQPVSSEMYRDPFGNPFA

SEQ ID NO: 9163 - DNA, 1518 bp, Rattus norvegicus
  ref <308>: DATABASE ACCESSION NUMBER: EMBL / U95727
  ref <309>: DATABASE ENTRY DATE: 2001-05-02
gtcgcgctccttccgctccgccgcctgcttgcgagtgctgccgggcaggccgccatggcgaacgtggccgacacgaagctgtacgacatcctgggcgtccctcccggcgccagcgagaacgagctgaagaaggcataccgaaagttagccaaagaataccatcctgataagaatccaaatgctggagataaatttaaagaaataagttttgcctatgaagtattgtcaaatccagagaagcgggagctatatgacagatatggagaacaaggtctacgggaaggcagcggcgggggtggcggcatggatgatattttctcacatatttttggtggaggattgtttggcttcatgggcaatcaaagtagaagtcgaaatggcagaagaagaggcgaggacatgatgcatccgctgaaagtgtctttagaagacctgtacaatggcaagaccaccaagctgcagctcagcaagaatgtgctctgtagcgcgtgcagtggccaaggtggaaagtctggagctgttcagaaatgcagtgcttgccggggtcgaggtgtgcgcattatgataagacagctggctccagggatggtacagcagatgcagtctgtgtgctctgactgtaatggagaaggagaggtcatcaatgaaaaagaccgctgtaaaaaatgtgaaggaaagaaggtgattaaagaagtcaagattctggaagttcatgtagacaaaggcatgaaacatggacagagaattacgttcactggggaagcagaccaggctccaggagtggaacctggagatattgttcttttcgtacaggaaaaagaacatgaggtgttccagagagatgggaatgatctgcatatgacatataagataggacttgttgaagctttgtgtggatttcagttcacatttaaacatcttgatgctcgtcagattgtagtgaaatacccccctggcaaagtaattgaaccaggatgtgttcgtgttgttcgaggcgaaggaatgccacagtatcgtaatccctttgaaaagggtgatctttacataaagtttgatgtgcagtttcctgaaaacaactggatcaacccagacaaactttctgaattagaagatctcctgccatctagaccagaagttcctaatgtaattggggagacagaagaagtagagcttcaggaattcgatagcactcgaggctctggaggtggtcagaggcgtgaagcctacaacgacagctctgatgaggaaagcagcagccatcatggacctggagtgcagtgtgcccatcagtaaactgcaggcaactgcacggtggattttctccacatttgccggatttgccagctgctggagtacctggatgagtccagatgaactgatggacatctgctgatctatgtgtaacttctaaacttggtatagtatcacagagtgtataatttaaactaaccacggagctttacgtcttcatttcgactgtctatagcagagtaaagcacttgaaataagactcccttt

SEQ ID NO: 9164 - protein, 412 aa, Rattus norvegicus; identical to SEQ ID NO: 6935
  ref <308>: DATABASE ACCESSION NUMBER: SWISS-Prot / O35824
  ref <309>: DATABASE ENTRY DATE: 2001-10-16

SEQ ID NO: 9165 - DNA, 1993 bp, Homo sapiens; identical to SEQ ID NO: 6936
  ref <308>: DATABASE ACCESSION NUMBER: Refseq / NM_005880
  ref <309>: DATABASE ENTRY DATE: 2002-11-04

SEQ ID NO: 9166 - protein, 412 aa, Homo sapiens; identical to SEQ ID NO: 6937
  ref <308>: DATABASE ACCESSION NUMBER: SWISS-Prot / O60884
  ref <309>: DATABASE ENTRY DATE: 2002-06-15

SEQ ID NO: 9167 - DNA, 1518 bp, Rattus norvegicus; identical to SEQ ID NO: 9163
  ref <308>: DATABASE ACCESSION NUMBER: EMBL / U95727
  ref <309>: DATABASE ENTRY DATE: 2001-05-02

SEQ ID NO: 9168 - protein, 412 aa, Rattus norvegicus; identical to SEQ ID NO: 6935
  ref <308>: DATABASE ACCESSION NUMBER: SWISS-Prot / O35824
  ref <309>: DATABASE ENTRY DATE: 2001-10-16

SEQ ID NO: 9169 - DNA, 1993 bp, Homo sapiens; identical to SEQ ID NO: 6936
  ref <308>: DATABASE ACCESSION NUMBER: Refseq / NM_005880
  ref <309>: DATABASE ENTRY DATE: 2002-11-04

SEQ ID NO: 9170 - protein, 412 aa, Homo sapiens; identical to SEQ ID NO: 6937
  ref <308>: DATABASE ACCESSION NUMBER: SWISS-Prot / O60884
  ref <309>: DATABASE ENTRY DATE: 2002-06-15

SEQ ID NO: 9171 - DNA, 1358 bp, Rattus norvegicus
  ref <308>: DATABASE ACCESSION NUMBER: EMBL / U96130
  ref <309>: DATABASE ENTRY DATE: 2000-03-04
tccactgctggtcactcactcagtattccaaatgtgtgttcatggatgcagatactctggttctctcaaatattgatgatctttttgaaagagaagaattgtcagcagcaccagacccagggtggcctgactgtttcaattctggagtctttgtctatcaaccctcaattgaaacgtataaccagctgttgcatcttgcttctgagcaaggtagttttgatggtggggaccagggcctactgaatacatattttagtggctgggcaacgacagatatcacaaaacacttgccatttgtgtataacctgagcagcctctcaatatactcctacctcccggcatttaaagcgtttggtaaaaatgccaaagttgtgcacttcctgggacgaaccaagccatggaattacacgtacaatccccaaacaaaaagtgtcaaatgtgaatcccaggacccaattgtgagtcacccagagtttctgaacctgtggtgggacaccttcaccaccaatgtcttacccctgctccaacaccatggccttgtcaaagatgccggttcctatctaatgatggaacatgtcacaggagccttgtcagacctgtcctttggggaggccccacctgcatcacagccttctttgtcctcagaagaaaggaaggaacggtgggaacagggccaggctgattatatgggagcagattcttttgataacatcaagagaaaacttgacacttacctacagtagaagcactgccattttcttgtggacacatccatgtcttaggcacgtttcgatacatagtatgtgaagtctgttacaattgttagaggctttcactaaacctcagcagatgaggggtttgggcaggacaacaggtgagaactgggcaaatgttattaagtaataattctattatgtggacaagtgttgtgtttaaccctagactttttcaaaaactctaaattcttaaattgccaatgtgtgataaagaaaagccaacattgagctactaaattaggctctttcaaatggtgcagaacttgactctccatcttcaaaacaaggtatgagattctccaatatttgcttgttgtatccttcactagacctgcaatgtagaattgttcaaagcctgtcagagaagtagccttctagactaaagtggcctttattaacactgcggagtgattcataagcctaccagctagtgttagttcaccagttttctatgcaccatgaaggcggcatgcagacctgctctttctcagttatctacttgaaaattgcagtgtgctctctgatggtagctgtggaagcactgtgtataacaaataaagacttattgacataaaaaaaaaa

SEQ ID NO: 9172 - protein, 332 aa, Rattus norvegicus; identical to SEQ ID NO: 2737
  ref <308>: DATABASE ACCESSION NUMBER: SWISS-Prot / O08730
  ref <309>: DATABASE ENTRY DATE: 2002-06-15

SEQ ID NO: 9173 - DNA, 1563 bp, Homo sapiens
  ref <308>: DATABASE ACCESSION NUMBER: EMBL / X79537
  ref <309>: DATABASE ENTRY DATE: 1994-06-03
gctggccgcgctccctcccggtgccggcttctctgagtcaccaacctgaggctgccccggccgcctgcgcacccggcagcaccatgacagatcaggcctttgtgacactaaccacaaacgatgcctacgccaaaggtgccctggtcctgggatcatctctgaaacagcacaggaccaccaggaggctggtcgtgctcgccacccctcaggtctcagactccatgagaaaagttttagagacagtctttgatgaagtcatcatggtagatgtcttggacagtggcgattctgctcatctaaccttaatgaagaggccagagttgggtgtcacgctgacaaagctccactgctggtcgcttacacagtattcaaaatgtgtattcatggatgcagatactctggtcctagcaaatattgatgatctttttgacagagaagaattgtcagcagcaccagacccagggtggcctgactgcttcaattccggagtcttcgtttatcagccttcagttgaaacatacaatcagctgttgcatcttgcttctgagcaaggtagttttgatggtggggaccaaggcatactgaacacattttttagcagctgggcaacaacagatatcagaaaacacctgccgtttatttataacctaagcagcatctctatatactcctacctcccggcatttaaagtgaagatgtctcaggagccatatcacatctgtcccttggggagatcccagctatggcacagccgtttgtatcctcggaagaacggaaggaacgatgggaacagggccaggctgattatatgggagcagattcctttgacaacatcaagaggaaacttgacacttacctccagtagaaacactgcatttttctgtgaacacatccacttcacaagccttgtttctgatacttagtatctagagctgggttgagaaaagtctgttacagttgctagaggttttcattaaaacttatcagatgagaggcttttttaggataagaggtgagaactgggcaaaagttgtgaagcagcaattctgttatatggacagtgttctgctttttaatcctatttagcttgtttcagaaattctcacttttgttgactgccaacatacaaagtaagggaaactcaagatattaagatggctgtatcagttcttaaaatctgcagagcctggttcaaaatcagtcactcccttcagaagcagacatggcatctgttccttgcttgcttgttggttgtgtacctttcacgagacctgaattttagaattgcccagtgctgccagagtgagtgagtgtaattctcctttcaggtaaagataggctatctcaacactgctgagtgattcataaacatatcaaccaatagcattaacccattttatttcctgtccttagtgtctgaagatgctcaccagttttctgtgtacagtaaggcagcatgctaaaatgcttttgttcagttctgtatatttgaaaatagcagtgtgttctctgatggttacctgcagtggcaccctgtacaaaaaataaaagacttattgctgt

SEQ ID NO: 9174 - protein, 349 aa, Homo sapiens; identical to SEQ ID NO: 2735
  ref <308>: DATABASE ACCESSION NUMBER: SWISS-Prot / P46976
  ref <309>: DATABASE ENTRY DATE: 2002-06-15

SEQ ID NO: 9175 - DNA, 1358 bp, Rattus norvegicus; identical to SEQ ID NO: 9171
  ref <308>: DATABASE ACCESSION NUMBER: EMBL / U96130
  ref <309>: DATABASE ENTRY DATE: 2000-03-04

SEQ ID NO: 9176 - protein, 332 aa, Rattus norvegicus; identical to SEQ ID NO: 2737
  ref <308>: DATABASE ACCESSION NUMBER: SWISS-Prot / O08730
  ref <309>: DATABASE ENTRY DATE: 2002-06-15

SEQ ID NO: 9177 - DNA, 1563 bp, Homo sapiens; identical to SEQ ID NO: 9173
  ref <308>: DATABASE ACCESSION NUMBER: EMBL / X79537
  ref <309>: DATABASE ENTRY DATE: 1994-06-03

SEQ ID NO: 9178 - protein, 349 aa, Homo sapiens; identical to SEQ ID NO: 2735
  ref <308>: DATABASE ACCESSION NUMBER: SWISS-Prot / P46976
  ref <309>: DATABASE ENTRY DATE: 2002-06-15

SEQ ID NO: 9179 - DNA, 1047 bp, Rattus norvegicus
  ref <308>: DATABASE ACCESSION NUMBER: EMBL / U96490
  ref <309>: DATABASE ENTRY DATE: 1997-09-12
tttgggcaggacaaggcaagagaagcggctgtttcagtagtgtttgtacccagaactcagcgaggtctacccttgggtagagcgaacgtccggccatggcttaccactcgggatatggagtccacggttccaagcataggacccgggcagctccaaaccctcctccactcttcgatgatacaagtggtggttattccagccaactaggcggatacccagccccaggagctgatgtagccttcaatgtcaacaacctgcttggagacccagtggccaatatggctatggcccatggcagctccatagcatcccaagggaaggacatagtgcacaaagagctacaccgttttgtgtctataaacaaactcaagtatttttttgctgtggacacagcctatgtagccaagaagctagggctattggtcttcccttacacacatcagaactggaaagtgcagtacagtcatgatgtgcctcttgcccccacggaaagacctcaatgcgcctgacctctatatccccaccatggccttcataacatacgtgctgctggctgggatggcactaggcattcagaaaaggttctccccacagcatgtggggctttgtgagcgagacaggtactggtgtgggtgttaatggagtgttggctctgcttctggcctctacctggccaccgtacgcagtgaactgggcaccttccacctcttggcctagactggctacaagtatgtagggatgatcctcagtgtgctcacagggctagcttttcggcagtgatggctactacgtggccctggcctggacatcgtctgcactcatgtacttcactgtagatctttgcggactgcagcttgggtcctgacagcatggggggcccacccctcggcagcatctccagctgtacctgaccctgggagccgctgcctccaaccccttatgatatactggctgaccttccacctggtccggtgacccctggtcctttggtggcactgagttttccatacattgaagatttggtttccttaaaaaaaaaaaaaaaaa

SEQ ID NO: 9180 - protein, 137 aa, Rattus norvegicus
  ref <308>: DATABASE ACCESSION NUMBER: SWISS-Prot / AAB68777
  ref <309>: DATABASE ENTRY DATE: 2002-10-01
MAYHSGYGVHGSKHRTRAAPNPPPLFDDTSGGYSSQLGGYPAPGADVAFNVNNLLGDPVANMAMAHGSSIASQGKDIVHKELHRFVSINKLKYFFAVDTAYVAKKLGLLVFPYTHQNWKVQYSHDVPLAPTERPQCA

SEQ ID NO: 9181 - DNA, 1096 bp, Homo sapiens
  ref <308>: DATABASE ACCESSION NUMBER: EMBL / BC001299
  ref <309>: DATABASE ENTRY DATE: 2001-07-13
ccggcggggtgggggacgtgtcgcgaggccgggtggcctcggtcggtaccctgggcgcggagcagctgcctcattagtattcgtacccacgaggcggcgcagcgggccctcggggacagcgagcgtcgcggccatggcttatcactcgggctacggagcccacggctccaagcacagggcccgggcagccccggatccccctcccctcttcgatgacacaagcggtggttattccagccagcccgggggatacccagccacaggagcagacgtggccttcagtgtcaaccacttgcttggggacccaatggccaatgtggctatggcctatggcagctccatcgcatcccatgggaaggacatggtgcacaaggagctgcaccgttttgtgtctgtgagcaaactcaagtatttttttgctgtggacacagcctacgtggccaagaagctagggctgctggtcttcccctacacacaccagaactgggaagtgcagtacagtcgtgatgctcctctgcccccccggcaagacctcaacgcccctgacctctatatccccacgatggccttcattacttacgtgctcctggctgggatggcactgggcattcagaaaaggttctccccggaggtgctgggcctgtgtgcaagcacagcgctggtgtgggtggtgatggaggtgctggccctgctcctgggcctctacctggccaccgtgcgcagtgacctgagcacctttcacctgctggcctacagtggctacaaatacgtgggaatgatcctcagtgtgctcacggggctgctgttcggcagcgatggctactacgtggcgctggcctggacctcatcggcgctcatgtacttcattgtgcgctctttgcggacagcagccctgggccccgacagcatggggggccccgtcccccggcagcgtctccagctctacctgactctgggagctgcagccttccagcccctcatcatatactggctgactttccacctggtccggtgaccccctggccccagatggcactgagtttttcattcattgaagatttgatttccttgaaaaaaaaaaaaaaaaaaaaaaaaa

SEQ ID NO: 9182 - protein, 293 aa, Homo sapiens
  ref <308>: DATABASE ACCESSION NUMBER: Refseq / NP_065203
  ref <309>: DATABASE ENTRY DATE: 2002-11-25
MAYHSGYGAHGSKHRARAAPDPPPLFDDTSGGYSSQPGGYPATGADVAFSVNHLLGDPMANVAMAYGSSIASHGKDMVHKELHRFVSVSKLKYFFAVDTAYVAKKLGLLVFPYTHQNWEVQYSRDAPLPPRQDLNAPDLYIPTKAFITYVLLAGMALGIQKRFSPEVLGLCASTALVWVVMEVLALLLGLYLATVRSDLSTFHLLAYSGYKYVGMILSVLTGLLFGSDGYYVALAWTSSALMYFIVRSLRTAALGPDSMGGPVPRQRLQLYLTLGAAAFQPLIIYWLTFHLVR

SEQ ID NO: 9183 - DNA, 1047 bp, Rattus norvegicus; identical to SEQ ID NO: 9179
  ref <308>: DATABASE ACCESSION NUMBER: EMBL / U96490
  ref <309>: DATABASE ENTRY DATE: 1997-09-12

SEQ ID NO: 9184 - protein, 137 aa, Rattus norvegicus; identical to SEQ ID NO: 9180
  ref <308>: DATABASE ACCESSION NUMBER: SWISS-Prot / AAB68777
  ref <309>: DATABASE ENTRY DATE: 2002-10-01

SEQ ID NO: 9185 - DNA, 1096 bp, Homo sapiens; identical to SEQ ID NO: 9181
  ref <308>: DATABASE ACCESSION NUMBER: EMBL / BC001299
  ref <309>: DATABASE ENTRY DATE: 2001-07-13

SEQ ID NO: 9186 - protein, 293 aa, Homo sapiens; identical to SEQ ID NO: 9182
  ref <308>: DATABASE ACCESSION NUMBER: Refseq / NP_065203
  ref <309>: DATABASE ENTRY DATE: 2002-11-25

SEQ ID NO: 9187 - DNA, 2787 bp, Rattus norvegicus
  ref <308>: DATABASE ACCESSION NUMBER: EMBL / U97143
  ref <309>: DATABASE ENTRY DATE: 1997-07-29
ctccgcattggatttgggggtcgctattgctcggctgttattattatcgttattttatttttattttttaaacctaagggagaaagacacatacacacaaaactgtgggatttatttaacatgatcttggcaaacgccttctgcctcttcttctttttagacgaaaccctccgctctttggccagcccttcctccctgcagggctctgagctccacggctggcgcccccaagtggactgtgtccgggccaatgagctgtgtgcggctgaatccaactgcagctccaggtaccgcacccttcggcagtgcctggcaggccgggatcgcaataccatgctggccaataaggagtgccaggcagccctggaggtcttgcaggaaagcccactgtatgactgccgctgcaagcggggcatgaagaaggagctgcagtgtctgcagatctactggagcatccatctggggctgacagagggtgaggagttctatgaagcttccccctatgagcctgtgacctcgcgcctctcggacatcttcaggctcgcttcaatcttctcagggacagggacagacccggcggtcagtaccaaaagcaaccactgcctggatgccgccaaggcctgcaacctgaatgacaactgcaagaagcttcgctcctcttatatctccatctgcaaccgtgagatctctcccaccgaacgctgcaaccgccgcaagtgccacaaggctctgcgccagttctttgaccgtgtgcccagcgagtatacctaccgcatgctcttctgctcctgtcaggaccaggcatgtgctgagcgtcgccggcaaaccatcctgcccagttgctcctatgaggacaaggagaagcccaactgcctggacctgcgcagcctgtgtcgtacagaccacctgtgccggtcccgactggcagatttccacgccaactgtcgagcctcctaccggacaatcaccagctgtcctgcggacaactaccaggcatgtctgggctcctatgctggcatgattgggtttgatatgacacccaactatgtggactccaaccccacgggcatcgtggtgtctccctggtgcaattgtcgtggcagtgggaacatggaagaagagtgtgagaagttcctcagggacttcacggaaaacccatgcctccggaatgccattcaggcctttggtaatggcacagatgtgaacatgtctcccaaaggcccctcactcccagctacccaggcccctcgggtggagaagactccttcactgccagatgacctcagtgacagcaccagcctggggaccagtgtcatcaccacctgcacatctatccaggagcaagggctgaaggccaacaactccaaagagttaagcatgtgcttcacagagctcacgacaaacatcagtccagggagtaaaaaggtgatcaaacttaactcaggctccagcagagccagactgtcggctgccttgactgccctcccactcctgatgctgaccttggccttgtaggcctttggaacccagcacaaaagttcttcaagcaacccagatatgaactcccgcctgacaaaatggaaacacacgcatacacacatgcacacacacacacacacacacacacacacacacacacacacacacacacacacaccccttgcaaaaacactttttttcctacattgtctctgaacctttctcctcccaagtttcttctctggagaagtttttctaaaccaaacagacaagcaggcgggcagtcagaagcctgcccagaggtcccctgcaagggacacccagcaccaacgagggctcaaggctcttgagagactcttttctcttcactggtgttttctctctggacaagatgagaccctgatgtggaaggtactttgctgtgcctggtgtggactggggaaaggacagttgcagctgcctactctggggacctgcccaagggttcacagagagtctcagtcagcaaggaagcagggctggccacaaggactttgtcacctcttcctcttggcttcagagatggaaatggtttgctgccatccccagccattatgtggcctagtgggtttaagtctggagtaggaagcctcatggcagcttcaggccatggtgcctgtagtatagctggggttgggagctgttacaggaggaagcttctttggggcatgagcaagccttggttgggcaccagctccaagatgtaccttcctcctttatgccaggaatcttgaagtcaaagagaaatgatcctctgttggctcttttttgtttgtttttgaatttttttgtgggtccatttggcaggtctctcttggggagaagggctgttgagtggggctggggagaccctagctgggcgtgtgtatggagcactctggtgggttcccaagcttgccccttctctcttcttgtttctgctttctctctcatttctgagacattcatgcactgtctgtacatactgggtctcctttctcaacatatgtgtatatccatatccatatatcctatgattttactctttctttcattttttttaaagaaacaaaactatggaaataataccctacagatgagcgaaaatgtattattgtaaagtttattttttttaataatgttgtctatgatgggaagaaaggtaccaggacccctgagccctggtccagttgggctggtggggctgtggccggggactcccgattgcattcactcttaaccaagctccaataaacgtactaggaagcgagtcgccctgtgcttcaaaaa

SEQ ID NO: 9188 - protein, 464 aa, Rattus norvegicus; identical to SEQ ID NO: 394
  ref <308>: DATABASE ACCESSION NUMBER: SWISS-Prot / AAC53301
  ref <309>: DATABASE ENTRY DATE: 2002-10-01

SEQ ID NO: 9189 - DNA, 2906 bp, Homo sapiens
  ref <308>: DATABASE ACCESSION NUMBER: EMBL / U97145
  ref <309>: DATABASE ENTRY DATE: 1999-07-01
tttttttttttgattgtagcgggcaaggggggcgtcgagaggcagcagcccatcgcccgcctctcaccccaccccctccagccagaggcgagaatcgcaggactcgggatcttcatcgggtggactagctgggatctccgcattggatttggggctgattaccactgcttggctattattattgttgttgttactactattatttttttttacccaagggagaaagacaaaaaaacggtgggatttatttaacatgatcttggcaaacgtcttctgcctcttcttctttctagacgagaccctccgctctttggccagcccttcctccctgcagggccccgagctccacggctggcgccccccagtggactgtgtccgggccaatgagctgtgtgccgccgaatccaactgcagctctcgctaccgcactctgcggcagtgcctggcaggccgcgaccgcaacaccatgctggccaacaaggagtgccaggcggccttggaggtcttgcaggagagcccgctgtacgactgccgctgcaagcggggcatgaagaaggagctgcagtgtctgcagatctactggagcatccacctggggctgaccgagggtgaggagttctacgaagcctccccctatgagccggtgacctcccgcctctcggacatcttcaggcttgcttcaatcttctcagggacaggggcagacccggtggtcagcgccaagagcaaccattgcctggatgctgccaaggcctgcaacctgaatgacaactgcaagaagctgcgctcctcctacatctccatctgcaaccgcgagatctcgcccaccgagcgctgcaaccgccgcaagtgccacaaggccctgcgccagttcttcgaccgggtgcccagcgagtacacctaccgcatgctcttctgctcctgccaagaccaggcgtgcgctgagcgccgccggcaaaccatcctgcccagctgctcctatgaggacaaggagaagcccaactgcctggacctgcgtggcgtgtgccggactgaccacctgtgtcggtcccggctggccgacttccatgccaattgtcgagcctcctaccagacggtcaccagctgccctgcggacaattaccaggcgtgtctgggctcttatgctggcatgattgggtttgacatgacacctaactatgtggactccagccccactggcatcgtggtgtccccctggtgcagctgtcgtggcagcgggaacatggaggaggagtgtgagaagttcctcagggacttcaccgagaacccatgcctccggaacgccatccaggcctttggcaacggcacggacgtgaacgtgtccccaaaaggcccctcgttccaggccacccaggcccctcgggtggagaagacgccttctttgccagatgacctcagtgacagtaccagcttggggaccagtgtcatcaccacctgcacgtctgtccaggagcaggggctgaaggccaacaactccaaagagttaagcatgtgcttcacagagctcacgacaaatatcatcccagggagtaacaaggtgatcaaacctaactcaggccccagcagagccagaccgtcggctgccttgaccgtgctgtctgtcctgatgctgaaactggccttgtaggctgtgggaaccgagtcagaatatttttgaaagctacgcagacaagaacagccgcctgacgaaatggaaacacacacagacacacacacaccttgcaaaaaaaaaattgtttttcccaccttgtcgctgaacctgtctcctcccaggtttcttctctggagaagtttttgtaaaccaaacagacaagcaggcaggcagcctgagagctggcccaggggtcccctggcaggggaaactctggtgccggggagggcacgaggctctagaaatgcccttcactttctcctggtgtttttctctctggacccttctgaagcagagaccggacaagagcctgcagcggaagggactctgggctgtgcctgaggctggctgggggcaggacaacacagctgcttccccaggctgcccactctggggacccgctgggggctggcagagggcatcggtcagcggggcagcggggctggccatgagggtccaccttcagccctttggcttcaaggatggagatggttttgccctccctctctgccctcgggtggggctggtgggtctgcagctggtgtgggaacttccccacggatggcggtggagggggttcgcaccgtgctgggctccccctgactgtagcacggagtgttggggctgggggccagctccaggagggcttgagagctcagcctgcctgggagagcccttgtggcgaggcattaaaacttgggcaccagcttctttctcggtggcagaaattttgaagtcagagagaaacggtcctttgttggcttctttgctttctcgtgggtcctttggcaggcctccctttggggagagggaggggagagaccacagccgggtgtgtgtctgcagcaccgtgggccctcaagctttcctgctgtcttctccctcctcctcctttcccctttctctttcctcatttcctagacgtacgtcaactgtatgtacataccggggctcctctcctaacatatatgtatatacacatccatatacatatattgtgtggtttcccctttctttcctttttttaagcaacaaaactatggaaataataccccaacagatgagcgaaaatgtattattgtaaagtttattttttttaatactgttgtctataatggggaaaaaggacattggccccgcagtgccctgccccagtcagcctggctgggctctggtgggggctcctgatccgcatccaagcttaaccaaggctccaataaacgtgctaggaagc

SEQ ID NO: 9190 - protein, 464 aa, Homo sapiens; identical to SEQ ID NO: 396
  ref <308>: DATABASE ACCESSION NUMBER: SWISS-Prot / O00451
  ref <309>: DATABASE ENTRY DATE: 2002-06-15

SEQ ID NO: 9191 - DNA, 1617 bp, Rattus norvegicus
  ref <308>: DATABASE ACCESSION NUMBER: EMBL / V01227
  ref <309>: DATABASE ENTRY DATE: 1993-09-12
gcgctgtaagaagcaacacctcctcctcgcctccgccatccacccggcagccgcgaagcagcaaccatgcgtgagtgtatctccatccacgtcggccaggctggtgtccagatcggcaatgcctgctgggagctctactgcctggaacatggcatccagcctgatggccagatgccaagcgacaagaccattgggggaggagatgactccttcaacaccttcttcagtgagacaggagctggcaagcacgtgccccgggcggtgttcgtagacctggaacccacagttattgatgaagttcgcactggcacctaccgccagctcttccacccagagcagctcatcacaggcaaggaagatgctgccaataactatgcccgtggccactacaccattggcaaggagatcattgaccttgtcttggacagaattcgcaagctggctgaccagtgcacgggtctccagggcttcttggttttccacagctttggtgggggaactggctctgggttcacctccctgctgatggagaggctctctgtcgactacggaaagaagtccaagctggagttctccatttacccagccccccaggtttccactgctgtggttgagccctacaattccatcctcaccacccacaccaccctggagcactctgattgtgccttcatggtagacaatgaggccatctatgacatctgtcgtagaaacctcgacattgagcgcccaacctacactaacttaaacaggttgataggtcaaattgtgtcttccatcactgcttccctcagatttgatggggccctgaatgttgatctgacagaattccagaccaacctggtgccctaccctcgcatccacttccctctggccacttatgcccctgtcatctctgctgagaaagcctaccatgaacagctttctgtagcagagatcaccaatgcctgctttgagccagccaaccagatggtgaaatgtgaccctcgccatggtaaatacatggcttgctgcctgctgtaccgtggtgatgtggtccccaaagatgtcaatgctgccattgccaccatcaagaccaagcgtaccatccagtttgtggactggtgccccactggcttcaaggttggcattaattaccagcctcccactgtggtccctggtggcgacctggccaaggtccagagagctgtgtgtatgctgagcaacaccacagccattgctgaggcctgggctcgcctggatcacaagtttgatctgatgtatgccaagcgtgcctttgtgcactggtacgtgggtgagggcatggaggagggagagttctctgaggcccgtgaggacatggctgccctagagaaggattatgaggaggttggtgtggattctgtggagggtgagggtgaggaagaaggagaggaatactaaattaaatgtcacaaggtgctgctttcacagggatgtttattctggtccaacatagaaagttgtgggctgatcagttaatttgtatgtggcaatgtgtgctttcatacagttactgactttaagtgtgaatgatttgtcagagacccgagccgtccacttcactgatgggttttaaataaaatactccctgtctta

SEQ ID NO: 9192 - protein, 451 aa, Rattus norvegicus; identical to SEQ ID NO: 5831
  ref <308>: DATABASE ACCESSION NUMBER: SWISS-Prot / P02551
  ref <309>: DATABASE ENTRY DATE: 2002-06-15

SEQ ID NO: 9193 - DNA, 1657 bp, Homo sapiens
  ref <308>: DATABASE ACCESSION NUMBER: EMBL / AF141347
  ref <309>: DATABASE ENTRY DATE: 2001-09-24
cctaagagtcgcgctgtaagaagcaacaacctctcctcttcgtctccgccatcagctcggcagtcgcgaagcagcaaccatgcgtgagtgcatctccatccacgttggccaggctggtgtccagattggcaatgcctgctgggagctctactgcctggaacacggcatccagcccgatggccagatgccaagtgacaagaccattgggggaggagatgattccttcaacaccttcttcagtgagacgggggctggcaagcatgtgccccgggcagtgtttgtagacttggaacccacagtcattgatgaagttcgcactggcacctaccgccagctcttccaccctgagcaacttatcacaggcaaagaagatgctgccaataactatgcccgagggcactacaccattggcaaggagatcattgacctcgtgttggaccgaattcgcaagctggccgaccagtgcacgggtctccagggcttcttggttttccacagctttggtgggggaactggttctgggttcacctcgctgctcatggaacgtctctcagttgattatggcaagaagtccaagctggagttctctatttacccggcgccccaggtttccacagctgtagttgagccctacaactccatcctcaccacccacaccaccctggagcactctgattgtgccttcatggtagacaatgaggccatctatgacatctgtcgtagaaacctcgatattgagcgtccaacctatactaacctgaataggttaataggtcaaattgtgtcctccatcactgcttccctgagatttgatggagccctgaatgttgacctgacagaattccagaccaacctggtgccctatccccgcatccacttccctctggccacatatgcccctgtcatctctgctgagaaagcctaccatgaacagctttctgtagcagagatcaccaatgcttgctttgagccagccaaccagatggtgaaatgtgaccctcgccatggtaaatacatggcttgctgcctgttgtaccgtggtgacgtggttcccaaagatgtcaatgctgccattgccaccatcaagaccaagcgtaccatccagtttgtggattggtgccccactggcttcaaggttggcatcaactaccagcctcccactgtggtgcctggtggagacctggccaaggtacagagagctgtgtgcatgctgagcaacaccacagccattgctgaggcctgggctcgcctggaccacaagtttgacctgatgtatgccaaacgtgcctttgttcactggtacgttggggaggggatggaggaaggtgagttttcagaggcccgtgaggacatggctgcccttgagaaggattatgaggaggttggtgtggattctgttgaaggagagggtgaggaagaaggagaggaatactaaagttaaaacgtcacaaaggtgctgcttttacagggaagcttattctgttttaaacattgaaaagttgtggtctgatcagttaatttgtatgtagcagtgtatgctctcatatacaattactgacctatgctctaaaacatgaatgctttgttacagacccaagctgtccatttctgtgatgggttttgaataaagtattccctgtcttaaaaaaaaaaaaaa

SEQ ID NO: 9194 - protein, 451 aa, Homo sapiens [sequence omitted]

SEQ ID NO: 9195 - DNA, 1136 bp, Rattus norvegicus
  ref <308>: DATABASE ACCESSION NUMBER: EMBL / V01543
  ref <309>: DATABASE ENTRY DATE: 1995-07-07
tacaaagtgtacaagtatgaccgtgcgtgccctgatgggtttgtcttgaagaatacccagtgcatcccagaaggcttggagagctactacacggagcaagactccagtgcccgggagaaattttacactgtcataaatcactacaacctggccaagcagagcatcacgcgctcagtgtcaccgtggatgtcagttctgtcagaagagaagctgtcggaacaggagaccgaagctgcagagaagtcagcttagcaagcggggcaggttccttacaatgtgtcacttgaaggcaacaaagggactttgagggacatttcattaaatataattaccgataatttagagattactcatttacggtgcaattgcttctgtttgctaatgctgctttgcaaataaaacttgctgcggaccacccacaggcataagaaaagtgcatctcagcactgcttagagagcttgatgccactgtccatgccgaggagtcgccatttagctccttcactgggacgcactggatactgtcaagaggtaattcgccctggctatgccagggctccggccatcagaacagtgcatttggtggtttcgttctcttttatgcccctttgctatttgcagaccttaccccatacatagagtgaccccacgctctgctgactgcagtgtggatgcactgctaagcggcgcagaggaaggaaggtgtgcaccacgacacacgcagccctgccagggcagttctgggaggttctctttgctatgtcccctgcgcagaacacgaggatggggtggggaggagctggctctgggccagggggttgccgagcctgtgctcctgtgggtggtgtctgctggtgatgtgctagataggaagaaagcccactggctcgttcctttcctgttatgatacatttgcacgtacagccctgaatgcaggtgcagttttggttttttgttttcttagccagtgggcaaagtgaaatgtaattttgggtaagccagggcttctttagcttttattctgtgaacagatgtgactcctgtgctgtgggaagggggcaggacggctggtggggggctgatgtggcaccttgaaaatagaataagtccacaatctttgtaagaaaagaaccccg

SEQ ID NO: 9196 - protein, 119 aa, Rattus norvegicus
  ref <308>: DATABASE ACCESSION NUMBER: SWISS-Prot / CAA24785
  ref <309>: DATABASE ENTRY DATE: 1988-11-01
MPGLRPSEQCIWWFRSLLCPFAICRPYPIHRVTPRSADCSVDALLSGAEEGRCAPRHTQPCQGSSGRFSLLCPLRRTRGWGGEELALGQGVAEPVLLWVVSAGDVLDRKKAHWLVPFLL

SEQ ID NO: 9197 - DNA, 1136 bp, Rattus norvegicus; identical to SEQ ID NO: 9195
  ref <308>: DATABASE ACCESSION NUMBER: EMBL / V01543
  ref <309>: DATABASE ENTRY DATE: 1995-07-07

SEQ ID NO: 9198 - protein, 119 aa, Rattus norvegicus; identical to SEQ ID NO: 9196
  ref <308>: DATABASE ACCESSION NUMBER: Refseq / NP_077042
  ref <309>: DATABASE ENTRY DATE: 2001-02-28

SEQ ID NO: 9199 - DNA, 2216 bp, Rattus norvegicus
  ref <308>: DATABASE ACCESSION NUMBER: EMBL / X01785
  ref <309>: DATABASE ENTRY DATE: 1993-09-12
gtcttactgcggcccagagcaaggatgggcagtccggtattcaggagacctttctgccatctgtccacctacagcctgctctgggccatagcagcagtagcgctgagcacagctcaagtggaagtggtgacccaggatgaaagaaagctgctgcacacaactgcatccttacgctgttctctaaaaacaacccaggaacccttgattgtgacatggcagaaaaagaaagccgtaggcccagaaaacatggtcacttacagcaaagcccatggggttgtcattcagcccacctacaaagacaggataaacatcactgagctgggactcttgaacacaagcatcaccttctggaacacaaccctggatgatgagggttgctacatgtgtctcttcaacatgtttggatctgggaaggtctctgggacagcttgccttactctctatgtacagcccatagtacaccttcactacaactattttgaagaccacctaaacatcacgtgctctgcaactgcccgcccagcccctgccatctcctggaagggcactgggtcaggaattgagaatagtactgagagtcactcccattcaaatgggactacatctgtcaccagcatcctccgggtcaaagaccccaaaactcaggttggaaaggaagtgatctgccaggttttatacttggggaatgtgattgactacaagcagagtctggacaaaggattttggttttcagtcccactgctgctgagcattgtttctctggtaattcttctggtcttgatctccatcttattatactggaaacggcaccgaaatcaggagcggggtgagtcatcacaggggatgcaaagaatgaaataagagctctagagaaattatatcagaaccctgaacgtgtttccctggtctacttgaatctgatgttaaagaaaagcaggagggaaaaggtcattctccataggacctaaaaaagagcaaaagatgcagaaggaagcctgtgagggatttgactttttgctgctgtcccgggtcctcagtatttacattccaagaggaagttgtgtgcctcgggtctgttgcaggacttgatttttgtggagcaatgcagcgtcattgctgttagaaaggcaccagacttagaatcaccagtgccaagccggctcgcagaccgactagggctcccaccggagggacaaatcatagtcaacttacctcacagagcttcctggtctttatacaaagtagaaaggagtgggaccagaaaatttgccatgtctgagatctgatggaattttaggaagaaaactgaagagcgatcaaaagaagaagagagaacacagaagggtcaaagagcttcggagagtaccttttgcctttctgttggggtcccacctctggttttgttcttaggtccaccagtttgtttccctgttgtttgagtatctaattgactacctgctactgttccgctgattgttggccttgctaaaatccctgattcccctgccgttctctatgtgcttctatgagggttactatgatgaaaatagagaagaatttagtgtgaagtaacattggcaaccgtaatgtgtccatttaacttatttttatagcacgtaggcaaataccgttagtcttagcaagtagttcacatctttacaaaagcatgctttccctgtccatttggcccaggatatcacccactttgaggccattctgaatcctgtctcgtgtaacgataatatattatgaaaacagatgtgttaagaatttcctgtacagcagtcagttgtatattctctctctctctctctctctctctctctctctctctctctctctctctcaacttctttttctgtgactttatttttcacaaagagaaggcaactctggaatacaatcgctttgttctgaagacatttgtggacatcttaaccctttgacagaactagtgacgttgttttctgtatcttttgcttcatctgtctctgtagagtgacctaggaattcaagtgtaagttgttttcattgtcaaactcgatatttatatacttggtatgcttttcatgtgttatttaattccgtataattttcctatatttgtattaaaatactgagcaattaaaagtgtcaactaaatagttgatgtgtgacattcccttgagaaatatagaaataaagaataacacttggatttttttttctctgtattc

SEQ ID NO: 9200 - protein, 278 aa, Rattus norvegicus
  ref <308>: DATABASE ACCESSION NUMBER: SWISS-Prot / P04218
  ref <309>: DATABASE ENTRY DATE: 2002-06-15
MGSPVFRRPFCHLSTYSLLWAIAAVALSTAQVEVVTQDERKLLHTTASLRCSLKTTQEPLIVTWQKKKAVGPENMVTYSKAHGVVIQPTYKDRINITELGLLNTSITFWNTTLDDEGCYMCLFNMFGSGKVSGTACLTLYVQPIVHLHYNYFEDHLNITCSATARPAPAISWKGTGSGIENSTESHSHSNGTTSVTSILRVKDPKTQVGKEVICQVLYLGNVIDYKQSLDKGFWFSVPLLLSIVSLVILLVLISILLYWKRHRNQERGESSQGMQRMK

SEQ ID NO: 9201 - DNA, 210 bp, Homo sapiens
  ref <308>: DATABASE ACCESSION NUMBER: EMBL / X05323
  ref <309>: DATABASE ENTRY DATE: 2002-11-04
ttccttggatttgtccaaatccaaacccccatttctgtactttgctttctgtcttcaggtgatcaggatgcccttctctcatctgtctacctacagcctggtttgggtcatggcagcagtggtgctgtgcacagcacaaggtaaagaaactcaattcccctgcttggagcccagcaaacacaatttctggggtgaagacatttagccaga

SEQ ID NO: 9202 - protein, 274 aa, Homo sapiens
  ref <308>: DATABASE ACCESSION NUMBER: SWISS-Prot / CAA28943
  ref <309>: DATABASE ENTRY DATE: 2002-06-15
VIRMPFSHLSTYSLVWVMAAVVLCTAQVQVVTQDEREQLYTTASLKCSLQNAQEALIVTWQKKKAVSPENMVTFSENHGVVIQPAYKDKINITQLGLQNSTITFWNITLEDEGCYMCLFNTFGFGKISGTACLTVYVQPIVSLHYKFSEDHLNITCSATARPAPMVFWKVPRSGIENSTVTLSHPNGTTSVTSILHIKDPKNQVGKEVICQVLHLGTVTDFKQTVNKGYWFSVPLLLSIVSLVILLVLISILLYWKRHRNQDRGELSQGVQKMT

SEQ ID NO: 9203 - DNA, 890 bp, Rattus norvegicus
  ref <308>: DATABASE ACCESSION NUMBER: EMBL / X02412
  ref <309>: DATABASE ENTRY DATE: 1996-04-11
gctgaagctgacgtagcatctctgaacagacgcatccagctggttgaggaggagttggatcgggctcaggagcggctggccacagctctacagaagctggaggaggctgagaaggctgcagatgagagtgagagaggcatgaaagtcattgaaagccgagcccaaaaagatgaagaaaagatggagattcaggagatccagctgaaagaggccaagcacattgctgaagatgctgaccgaaagtatgaagaggtggcccgtaagctggtcatcatcgagagtgatctggagcgtgcggaggagagggctgagctctcggaaggcaaatgtgcggagcttgaagaagagttgaaaacggtgacgaacaacttgaagtcactggaggctcaggctgagaagtactctcagaaagaagacaagtatgaagaggagatcaaggttctctctgacaagctgaaggaggctgagacccgggctgagtttgcagagagatcagtaaccaaattggagaaaagcattgatgacttagaagacgagctgtatgctcagaaactgaagtacaaggccatcagcgaggagctggaccacgctctcaacgatatgacttccatataagttctgcttctctcctcccaagactccttcattcaagccggaatgtcccacctctctgagctctgcatctgtctgctctccagctgacccaggtttctttctagtgcccacccaccctagggccagcacagaccgtgctttctattgtacagaggtgatcctcccagtgtaaaataaacactgtacgctagtcctgtttgctattcctctgctccttatttattgacatttttgtctcagcgctcaataaaactacagttctgctttgtgatcta

SEQ ID NO: 9204 - protein, 284 aa, Rattus norvegicus; identical to SEQ ID NO: 3319
  ref <308>: DATABASE ACCESSION NUMBER: SWISS-Prot / Q63582
  ref <309>: DATABASE ENTRY DATE: 2002-06-15

SEQ ID NO: 9205 - DNA, 2301 bp, Homo sapiens; identical to SEQ ID NO: 6896
  ref <308>: DATABASE ACCESSION NUMBER: EMBL / X03541
  ref <309>: DATABASE ENTRY DATE: 1993-09-12

SEQ ID NO: 9206 - protein, 796 aa, Homo sapiens; identical to SEQ ID NO: 6897
  ref <308>: DATABASE ACCESSION NUMBER: SWISS-Prot / P04629
  ref <309>: DATABASE ENTRY DATE: 2002-06-15

SEQ ID NO: 9207 - DNA, 1771 bp, Rattus norvegicus
  ref <308>: DATABASE ACCESSION NUMBER: EMBL / X02601
  ref <309>: DATABASE ENTRY DATE: 1993-09-12
aaggaggcagcaaagaacccgctgagagcagtgcagaactgtgggaagccagtggaaatgaaagggctcccagtcctgctgtggctgtgtacggctgtgtgctcatcctacccattgcatggcagtgaagaagatgctggcatggaggttctgcagaaatacctagaaaactactatggtcttgaaaaggatgtgaagcagtttactaagaaaaaggacagtagccctgttgtcaaaaaaattcaagaaatgcagaagttccttgggctgaagatgacagggaagctggactcgaacactatggagctgatgcacaagccccggtgtggtgttcccgacgtcggtggcttcagtacctttccaggttcacccaaatggaggaaaaaccacatctcctacaggattgtgaattatacactggatttaccaagagagagtgtggattctgccattgagagagctttgaaggtctgggaggaggtgaccccactcacattctccaggatctctgaaggagaggctgacataatgatctcctttgcagttgaagaacatggagactttatcccttttgatgggcctggaatggtcttggctcatgcctatgcccctggaccagggaccaatggagatgctcactttgatgatgatgaacgatggacagatgatgtcacaggtaccaacctattcctggttgctgctcatgaacttggccactccctgggtctctttcactcagccaatgctgaagctttgatgtacccagtctacaagtcctccacagacctggcccgtttccatctctctcaagatgatgtagatggtattcaatccctctatggacctcccacagaatcccctgatgtcctcgtggtacccaccaaatctaactctctggaccctgagaccttaccaatgtgtagctctgctttgtccttcgatgcagtcagcaccctgcggggagaagtcttgttctttaaagacaggcacttttggcgaaaatctctcaggacccctgagcctggcttttatttgatctcttcattttggccgtctcttccatccaacatggatgctgcatatgaagttactaacagagacactgttttcattcttaaaggaaatcagatctgggctatccgaggtcatgaagagctagcaggttatcctaaaagcattcacactctgggcctccctgaaaccgtccagaagatcgatgcagccatttctttaaaggaccaaaagaagacgtacttctttgtagaggacaaattctggagatttgatgagaagaaacaatccatggatccagaatttcccaggaaaatagctgagaactttccaggcattggcacaaaggtggatgctgtctttgaagcatttgggtttctttacttcttcagcggatcttcacagttggagtttgatccaaatgcagggaaagtgacccacatattgaagagcaacagctggtttaattgttaagaagatccatggaaggcgtcgtgtgtttcagctgaccctgatagctcttcctctgaaacttggcgcactgaagtggtttccttactctagcatgtgctatggcagagcaaaatgggagctacatatggcaccagtcaacctcaagttgtcgaaggacattcagaagcactgcttgtcttatactgtgtcaaagggagaggagaaaacacactcctgggctacagacaagtaactgtctctgtgtagatggtttgttttatttaataaaatggtgtgtcatttattt

SEQ ID NO: 9208 - protein, 475 aa, Rattus norvegicus
  ref <308>: DATABASE ACCESSION NUMBER: SWISS-Prot / P03957
  ref <309>: DATABASE ENTRY DATE: 2002-06-15
MKGLPVLLWLCTAVCSSYPLHGSEEDAGMEVLQKYLENYYGLEKDVKQFTKKKDSSPVVKKIQEMQKFLGLKMTGKLDSNTMELMHKPRCGVPDVGGFSTFPGSPKWRKNHISYRIVNYTLDLPRESVDSAIERALKVWEEVTPLTFSRISEGEADIMISFAVEEHGDFIPFDGPGMVLAHAYAPGPGTNGDAHFDDDERWTDDVTGTNLFLVAAHELGHSLGLFHSANAEALMYPVYKSSTDLARFHLSQDDVDGIQSLYGPPTESPDVLVVPTKSNSLDPETLPMCSSALSFDAVSTLRGEVLFFKDRHFWRKSLRTPEPGFYLISSFWPSLPSNMDAAYEVTNRDTVFILKGNQIWAIRGHEELAGYPKSIHTLGLPETVQKIDAAISLKDQKKTYFFVEDKFWRFDEKKQSMDPEFPRKIAENFPGIGTKVDAVFEAFGFLYFFSGSSQLEFDPNAGKVTHILKSNSWFNC

SEQ ID NO: 9209 - DNA, 1434 bp, Homo sapiens
  ref <308>: DATABASE ACCESSION NUMBER: EMBL / J03209
  ref <309>: DATABASE ENTRY DATE: 1999-07-02
atgaagagtcttccaatcctactgttgctgtgcgtggcagtttgctcagcctatccattggatggagctgcaaggggtgaggacaccagcatgaaccttgttcagaaatatctagaaaactactacgacctcgaaaaagatgtgaaacagtttgttaggagaaaggacagtggtcctgttgttaaaaaaatccgagaaatgcagaagttccttggattggaggtgacggggaagctggactccgacactctggaggtgatgcgcaagcccaggtgtggagttcctgacgttggtcacttcagaacctttcctggcatcccgaagtggaggaaaacccaccttacatacaggattgtgaattatacaccagatttgccaaaagatgctgttgattctgctgttgagaaagctctgaaagtctgggaagaggtgactccactcacattctccaggctgtatgaaggagaggctgatataatgatctcttttgcagttagagaacatggagacttttacccttttgatggacctggaaatgttttggcccatgcctatgcccctgggccagggattaatggagatgcccactttgatgatgatgaacaatggacaaaggatacaacagggaccaatttatttctcgttgctgctcatgaaattggccactccctgggtctctttcactcagccaacactgaagctttgatgtacccactctatcactcactcacagacctgactcggttccgcctgtctcaagatgatataaatggcattcagtccctctatggacctccccctgactcccctgagacccccctggtacccacggaacctgtccctccagaacctgggacgccagccaactgtgatcctgctttgtcctttgatgctgtcagcactctgaggggagaaatcctgatctttaaagacaggcacttttggcgcaaatccctcaggaagcttgaacctgaattgcatttgatctcttcattttggccatctcttccttcaggcgtggatgccgcatatgaagttactagcaaggacctcgttttcatttttaaaggaaatcaattctgggccatcagaggaaatgaggtacgagctggatacccaagaggcatccacaccctaggtttccctccaaccgtgaggaaaatcgatgcagccatttcggataaggaaaagaacaaaacatatttctttgtagaggacaaatactggagatttgatgagaagagaaattccatggagccaggctttcccaagcaaatagctgaagactttccagggattgactcaaagattgatgctgtttttgaagaatttgggttcttttatttctttactggatcttcacagttggagtttgacccaaatgcaaagaaagtgacacacactttgaagagtaacagctggcttaattgttga

SEQ ID NO: 9210 - protein, 477 aa, Homo sapiens
  ref <308>: DATABASE ACCESSION NUMBER: SWISS-Prot / P08254
  ref <309>: DATABASE ENTRY DATE: 2002-06-15
MKSLPILLLLCVAVCSAYPLDGAARGEDTSMNLVQKYLENYYDLKKDVKQFVRRKDSGPVVKKIREMQKFLGLEVTGKLDSDTLEVMRKPRCGVPDVGHFRTFPGIPKWRKTHLTYRIVNYTPDLPKDAVDSAVEKALKVWEEVTPLTFSRLYEGEADIMISFAVREHGDFYPFDGPGNVLAHAYAPGPGINGDAHFDDDEQWTKDTTGTNLFLVAAHEIGHSLGLFHSANTEALMYPLYHSLTDLTRFRLSQDDINGIQSLYGPPPDSPETPLVPTEPVPPEPGTPANCDPALSFDAVSTLRGEILIFKDRHFWRKSLRKLEPELHLISSFWPSLPSGVDAAYEVTSKDLVFIFKGNQFWAIRGNEVRAGYPRGIHTLGFPPTVRKIDAAISDKEKNKTYFFVEDKYWRFDEKRNSMEPGFPKQIAEDFPGIDSKIDAVFEEFGFFYFFTGSSQLEFDPNAKKVTHTLKSNSWLNC

SEQ ID NO: 9211 - DNA, 735 bp, Rattus norvegicus
  ref <308>: DATABASE ACCESSION NUMBER: EMBL / X02904
  ref <309>: DATABASE ENTRY DATE: 1993-09-12
acgcagctttgagtccacacctctgtctacgcagcagctatgccgccgtacaccattgtgtacttcccagttcgagggcgctgtgaggccacgcgcatgctgctggctgaccagggccagagctggaaggaggaggtggttaccatagatgtctggcttcaaggctcgctcaagtccacttgtctgtatgggcagctccccaagtttgaagatggagacctcaccctttaccaatctaatgccatcttgaggcacctgggtcgctctttagggctttatgggaaagaccagaaggaggctgccttggtggatatggtgaatgatggggtggaggaccttcgatgcaaatatggtaccctcatctacactaactatgagaatggtaaggatgactatgtgaaggccctgcctgggcatctgaaaccttttgagaccctgctgtcccagaaccagggaggcaaagctttcattgtgggtaaccagatttcctttgcagattacaacttgctggacctgctgctggtccaccaagtcctggcccctggctgcctggacaacttccccctgctctctgcctatgtggctcgcctcagtgcccgccccaagatcaaggcctttctgtcctcccctgaccatttgaaccgtcccatcaacggcaatggtaaacagtagtggacgaagggacaggaactccttgtcccccttttcccagactaataaagtttgtaaggcaga

SEQ ID NO: 9212 - protein, 209 aa, Rattus norvegicus; identical to SEQ ID NO: 6581
  ref <308>: DATABASE ACCESSION NUMBER: SWISS-Prot / P04906
  ref <309>: DATABASE ENTRY DATE: 2002-06-15

SEQ ID NO: 9213 - DNA, 719 bp, Homo sapiens; identical to SEQ ID NO: 6582
  ref <308>: DATABASE ACCESSION NUMBER: EMBL / U30897
  ref <309>: DATABASE ENTRY DATE: 1999-07-01

SEQ ID NO: 9214 - protein, 209 aa, Homo sapiens; identical to SEQ ID NO: 6583
  ref <308>: DATABASE ACCESSION NUMBER: SWISS-Prot / P09211
  ref <309>: DATABASE ENTRY DATE: 2002-06-15

SEQ ID NO: 9215 - DNA, 3955 bp, Rattus norvegicus
  ref <308>: DATABASE ACCESSION NUMBER: EMBL / X03362
  ref <309>: DATABASE ENTRY DATE: 1995-03-30
ccgggccggagccgcaatgatcatcatggagctggcggcctggtgccgctgggggttcctcctcgccctcctgccccccggaatcgcgggcacccaagtgtgtaccggcacagacatgaagttgcggctccctgccagtcctgagacccacctggacatgctccgccacctgtaccagggctgtcaggtagtgcagggcaacttggagcttacctacgtgcctgccaatgccagcctctcattcctgcaggacatccaggaagttcagggttacatgctcatcgctcacaaccaggtgaagcgcgtcccactgcaaaggctgcgcatcgtgagagggacccagctctttgaggacaagtatgccctggctgtgctagacaaccgagatcctcaggacaatgtcgccgcctccaccccaggcagaaccccagaggggctgcgggagctgcagcttcgaagtctcacagagatcctgaagggaggagttttgatccgtgggaaccctcagctctgctaccaggacatggttttgtggaaggacgtcttccgcaagaataaccaactggctcctgtcgatatagacaccaatcgttcccgggcctgtccaccttgtgcccccgcctgcaaagacaatcactgttggggtgagagtccggaagactgtcagatcttgactggcaccatctgtaccagtggttgtgcccggtgcaagggccggctgcccactgactgctgccatgagcagtgtgccgcaggctgcacgggccccaagcattctgactgcctggcctgcctccacttcaatcatagtggtatctgtgagctgcactgcccagccctcgtcacctacaacacagacacctttgagtccatgcacaaccctgagggtcgctacacctttggtgccagctgcgtgaccacctgcccctacaactacctgtctacggaagtgggatcctgcactctggtgtgtcccccgaataaccaagaggtcacagctgaggacggaacacagcgttgtgagaaatgcagcaagccctgtgctcgagtgtgctatggtctgggcatggagcaccttcgaggggcgagggccatcaccagtgacaatgtccaggagtttgatggctgcaagaagatctttgggagcctggcatttttgccggagagctttgatggggacccctcctccggcattgctccgctgaggcctgagcagctccaagtgttcgaaaccctggaggagatcacaggttacctgtacatctcagcatggccagacagtctccgtgacctcagtgtcttccagaaccttcgaatcattcggggacggattctccacgatggcgcgtactcattgacactgcaaggcctggggatccactcgctggggctgcgctcactgcgggagctgggcagtggattggctctgattcaccgcaacgcccatctctgctttgtacacactgtaccttgggaccagctcttccggaacccacatcaggccctgctccacagtgggaaccggccggaagaggacttgtgcgtctcgagcggcttggtctgtaactcactgtgtgcccacgggcactgctgggggccagggcccacccagtgtgtcaactgcagtcatttccttcggggccaggagtgtgtggaggagtgccgagtatggaaggggctcccccgggagtatgtgagtgacaagcgctgtctgccgtgtcaccccgagtgtcagcctcaaaacagctcagagacctgctttggatcggaggctgatcagtgtgcagcctgcgcccactacaaggactcgtcctcctgtgtggctcgctgccccagtggtgtgaaaccggacctctcctacatgcccatctggaagtacccggatgaggagggcatatgccagccgtgccccatcaactgcacccactcctgtgtggatctggatgaacgaggctgcccagcagagcagagagccagcccggtgacattcatcattgcaactgtagagggcgtcctgctgttcctgatcttagtggtggtcgttggaatcctaatcaaacgaaggagacagaagatccggaagtatacgatgcgtaggctgctgcaggaaactgagttagtggagccgctgacgcccagcggagcaatgcccaaccaggctcagatgcggatcctaaaagagacggagctaaggaaggtgaaggtgcttggatcaggagcttttggcactgtctacaagggcatctggatcccagatggggagaatgtgaaaatccccgtggctatcaaggtgttgagagaaaacacatctcctaaagccaacaaagaaattctagatgaagcgtatgtgatggctggtgtgggttctccgtatgtgtcccgcctcctgggcatctgcctgacatccacagtacagctggtgacacagcttatgccctacggctgccttctggaccatgtccgagaacaccgaggtcgcctaggctcccaggacctgctcaactggtgtgttcagattgccaaggggatgagctacctggaggacgtgcggcttgtacacagggacctggctgcccggaatgtgctagtcaagagtcccaaccacgtcaagattacagatttcgggctggctcggctgctggacattgatgagacagagtaccatgcagatgggggcaaggtgcccatcaaatggatggcattggaatctattctcagacgccggttcacccatcagagtgatgtgtggagctatggagtgactgtgtgggagctgatgacttttggggccaaaccttacgatggaatcccagcccgggagatccctgatttgctggagaagggagaacgcctacctcagcctccaatctgcaccattgatgtctacatgattatggtcaaatgttggatgattgactctgaatgtcgcccgagattccgggagttggtgtcagaattttcacgtatggcgagggacccccagcgttttgtggtcatccagaacgaggacttgggcccatccagccccatggacagtaccttctaccgttcactgctggaagatgatgacatgggtgacctggtagacgctgaagagtatctggtgccccagcagggattcttctccccggaccctaccccaggcactgggagcacagcccatagaaggcaccgcagctcgtccaccaggagtggaggtggtgagctgacactgggcctggagccctcggaagaagggccccccagatctccactggctccctcggaaggggctggctccgatgtgtttgatggtgacctggcaatgggggtaaccaaagggctgcagagcctctctccacatgacctcagccctctacagcggtacagcgaggaccccacattacctctgccccccgagactgatggctatgttgctcccctggcctgcagcccccagcccgagtatgtgaaccaatcagaggttcagcctcagcctcctttaaccccagagggtcctctgcctcctgtccggcctgctggtgctactctagaaagacccaagactctctctcctgggaagaatggggttgtcaaagacgtttttgccttcgggggtgctgtggagaaccctgaatacttagtaccgagagaaggcactgcctctccgccccacccttctcctgccttcagcccagcctttgacaacctctattactgggaccagaactcatcggagcaggggcctccaccaagtaactttgaagggacccccactgcagagaaccctgagtacctaggcctggatgtacctgtatgagacgtgtgcagacgtcctgtgctttcagagtggggaaggcctgacttgtggtctccatcgccacaaagcagggagagggtcctctggccacattacatccagggcagacggctctaccaggaacctgccccgaggaacctttccttgctgcttgaa

SEQ ID NO: 9216 - protein, 1257 aa, Rattus norvegicus
  ref <308>: DATABASE ACCESSION NUMBER: SWISS-Prot / P06494
  ref <309>: DATABASE ENTRY DATE: 2002-06-15
MELAAWCRWGFLLALLPPGIAGTQVCTGTDMKLRLPASPETHLDMLRHLYQGCQVVQGNLELTYVPANASLSFLQDIQEVQGYMLIAHNQVKRVPLQRLRIVRGTQLFEDKYALAVLDNRDPQDNVAASTPGRTPEGLRELQLRSLTEILKGGVLIRGNPQLCYQDMVLWKDVFRKNNQLAPVDIDTNRSRACPPCAPACKDNHCWGESPEDCQILTGTICTSGCARCKGRLPTDCCHEQCAAGCTGPKHSDCLACLHFNHSGICELHCPALVTYNTDTFESMHNPEGRYTFGASCVTTCPYNYLSTEVGSCTLVCPPNNQEVTAEDGTQRCEKCSKPCARVCYGLGMEHLRGARAITSDNVQEFDGCKKIFGSLAFLPESFDGDPSSGIAPLRPEQLQVFETLEEITGYLYISAWPDSLRDLSVFQNLRIIRGRILHDGAYSLTLQGLGIHSLGLRSLRELGSGLALIHRNAHLCFVHTVPWDQLFRNPHQALLHSGNRPEEDLCVSSGLVCNSLCAHGHCWGPGPTQCVNCSHFLRGQECVEECRVWKGLPREYVSDKRCLPCHPECQPQNSSETCFGSEADQCAACAHYKDSSSCVARCPSGVKPDLSYMPIWKYPDEEGICQPCPINCTHSCVDLDERGCPAEQRASPVTFIIATVVGVLLFLILVVVVGILIKRRRQKIRKYTMRRLLQETELVEPLTPSGAMPNQAQMRILKETELRKVKVLGSGAFGTVYKGIWIPDGENVKIPVAIKVLRENTSPKANKEILDEAYVMAGVGSPYVSRLLGICLTSTVQLVTQLMPYGCLLDHVREHRGRLGSQDLLNWCVQIAKGMSYLEDVRLVHRDLAARNVLVKSPNHVKITDFGLARLLDIDETEYHADGGKVPIKWMALESILRRRFTHQSDVWSYGVTVWELMTFGAKPYDGIPAREIPDLLEKGERLPQPPICTIDVYMIMVKCWMIDSECRPRFRELVSEFSRMARDPQRFVVIQNEDLGPSSPMDSTFYRSLLEDDDMGDLVDAEEYLVPQQGFFSPDPTPGTGSTAHRRHRSSSTRSGGGELTLGLEPSEEGPPRSPLAPSEGAGSDVFDGDLAMGVTKGLQSLSPHDLSPLQRYSEDPTLPLPPETDGYVAPLACSPQPEYVNQSEVQPQPPLTPEGPLPPVRPAGATLERPKTLSPGKNGVVKDVFAFGGAVENPEYLVPREGTASPPHPSPAFSPAFDNLYYWDQNSSEQGPPPSNFEGTPTAENPEYLGLDVPV

SEQ ID NO: 9217 - DNA, 4530 bp, Homo sapiens
  ref <308>: DATABASE ACCESSION NUMBER: EMBL / M11730
  ref <309>: DATABASE ENTRY DATE: 2000-03-04
aattctcgagctcgtcgaccggtcgacgagctcgagggtcgacgagctcgagggcgcgcgcccggcccccacccctcgcagcaccccgcgccccgcgccctcccagccgggtccagccggagccatggggccggagccgcagtgagcaccatggagctggcggccttgtgccgctgggggctcctcctcgccctcttgccccccggagccgcgagcacccaagtgtgcaccggcacagacatgaagctgcggctccctgccagtcccgagacccacctggacatgctccgccacctctaccagggctgccaggtggtgcagggaaacctggaactcacctacctgcccaccaatgccagcctgtccttcctgcaggatatccaggaggtgcagggctacgtgctcatcgctcacaaccaagtgaggcaggtcccactgcagaggctgcggattgtgcgaggcacccagctctttgaggacaactatgccctggccgtgctagacaatggagacccgctgaacaataccacccctgtcacaggggcctccccaggaggcctgcgggagctgcagcttcgaagcctcacagagatcttgaaaggaggggtcttgatccagcggaacccccagctctgctaccaggacacgattttgtggaaggacatcttccacaagaacaaccagctggctctcacactgatagacaccaaccgctctcgggcctgccacccctgttctccgatgtgtaagggctcccgctgctggggagagagttctgaggattgtcagagcctgacgcgcactgtctgtgccggtggctgtgcccgctgcaaggggccactgcccactgactgctgccatgagcagtgtgctgccggctgcacgggccccaagcactctgactgcctggcctgcctccacttcaaccacagtggcatctgtgagctgcactgcccagccctggtcacctacaacacagacacgtttgagtccatgcccaatcccgagggccggtatacattcggcgccagctgtgtgactgcctgtccctacaactacctttctacggacgtgggatcctgcaccctcgtctgccccctgcacaaccaagaggtgacagcagaggatggaacacagcggtgtgagaagtgcagcaagccctgtgcccgagtgtgctatggtctgggcatggagcacttgcgagaggtgagggcagttaccagtgccaatatccaggagtttgctggctgcaagaagatctttgggagcctggcatttctgccggagagctttgatggggacccagcctccaacactgccccgctccagccagagcagctccaagtgtttgagactctggaagagatcacaggttacctatacatctcagcatggccggacagcctgcctgacctcagcgtcttccagaacctgcaagtaatccggggacgaattctgcacaatggcgcctactcgctgaccctgcaagggctgggcatcagctggctggggctgcgctcactgagggaactgggcagtggactggccctcatccaccataacacccacctctgcttcgtgcacacggtgccctgggaccagctctttcggaacccgcaccaagctctgctccacactgccaaccggccagaggacgagtgtgtgggcgagggcctggcctgccaccagctgtgcgcccgagggcactgctggggtccagggcccacccagtgtgtcaactgcagccagttccttcggggccaggagtgcgtggaggaatgccgagtactgcaggggctccccagggagtatgtgaatgccaggcactgtttgccgtgccaccctgagtgtcagccccagaatggctcagtgacctgttttggaccggaggctgaccagtgtgtggcctgtgcccactataaggaccctcccttctgcgtggcccgctgccccagcggtgtgaaacctgacctctcctacatgcccatctggaagtttccagatgaggagggcgcatgccagccttgccccatcaactgcacccactcctgtgtggacctggatgacaagggctgccccgccgagcagagagccagccctctgacgtccatcgtctctgcggtggttggcattctgctggtcgtggtcttgggggtggtctttgggatcctcatcaagcgacggcagcagaagatccggaagtacacgatgcggagactgctgcaggaaacggagctggtggagccgctgacacctagcggagcgatgcccaaccaggcgcagatgcggatcctgaaagagacggagctgaggaaggtgaaggtgcttggatctggcgcttttggcacagtctacaagggcatctggatccctgatggggagaatgtgaaaattccagtggccatcaaagtgttgagggaaaacacatcccccaaagccaacaaagaaatcttagacgaagcatacgtgatggctggtgtgggctccccatatgtctcccgccttctgggcatctgcctgacatccacggtgcagctggtgacacagcttatgccctatggctgcctcttagaccatgtccgggaaaaccgcggacgcctgggctcccaggacctgctgaactggtgtatgcagattgccaaggggatgagctacctggaggatgtgcggctcgtacacagggacttggccgctcggaacgtgctggtcaagagtcccaaccatgtcaaaattacagacttcgggctggctcggctgctggacattgacgagacagagtaccatgcagatgggggcaaggtgcccatcaagtggatggcgctggagtccattctccgccggcggttcacccaccagagtgatgtgtggagttatggtgtgactgtgtgggagctgatgacttttggggccaaaccttacgatgggatcccagcccgggagatccctgacctgctggaaaagggggagcggctgccccagccccccatctgcaccattgatgtctacatgatcatggtcaaatgttggatgattgactctgaatgtcggccaagattccgggagttggtgtctgaattctcccgcatggccagggacccccagcgctttgtggtcatccagaatgaggacttgggcccagccagtcccttggacagcaccttctaccgctcactgctggaggacgatgacatgggggacctggtggatgctgaggagtatctggtaccccagcagggcttcttctgtccagaccctgccccgggcgctgggggcatggtccaccacaggcaccgcagctcatctaccaggagtggcggtggggacctgacactagggctggagccctctgaagaggaggcccccaggtctccactggcaccctccgaaggggctggctccgatgtatttgatggtgacctgggaatgggggcagccaaggggctgcaaagcctccccacacatgaccccagccctctacagcggtacagtgaggaccccacagtacccctgccctctgagactgatggctacgttgcccccctgacctgcagcccccagcctgaatatgtgaaccagccagatgttcggccccagcccccttcgccccgagagggccctctgcctgctgcccgacctgctggtgccactctggaaagggccaagactctctccccagggaagaatggggtcgtcaaagacgtttttgcctttgggggtgccgtggagaaccccgagtacttgacaccccagggaggagctgcccctcagccccaccctcctcctgccttcagcccagccttcgacaacctctattactgggaccaggacccaccagagcggggggctccacccagcaccttcaaagggacacctacggcagagaacccagagtacctgggtctggacgtgccagtgtgaaccagaaggccaagtccgcagaagccctgatgtgtcctcagggagcagggaaggcctgacttctgctggcatcaagaggtgggagggccctccgaccacttccaggggaacctgccatgccaggaacctgtcctaaggaaccttccttcctgcttgagttcccagatggctggaaggggtccagcctcgttggaagaggaacagcactggggagtctttgtggattctgaggccctgcccaatgagactctagggtccagtggatgccacagcccagcttggccctttccttccagatcctgggtactgaaagccttagggaagctggcctgagaggggaagcggccctaagggagtgtctaagaacaaaagcgacccattcagagactgtccctgaaacctagtactgccccccatgaggaaggaacagcaatggtgtcagtatccaggctttgtacagagtgcttttctgtttagtttttactttttttgttttgtttttttaaagacgaaataaagacccaggggagaatgggtgttgtatggggaggcaagtgtggggggtccttctccacacccactttgtccatttgcaaatatattttggaaaac

SEQ ID NO: 9218 - protein, 1255 aa, Homo sapiens [sequence omitted]

SEQ ID NO: 9219 - DNA, 1592 bp, Rattus norvegicus
  ref <308>: DATABASE ACCESSION NUMBER: EMBL / X03369
  ref <309>: DATABASE ENTRY DATE: 1993-09-12
ccaacaccatgcgcgagatcgtgcacatccaggcgggccaatgcggcaaccagatcggccctaagttttgggaggtgataagcgatgagcatggcatcgacccgacgggcagctaccatggcgacagtgacttgcagctggagagaatcaatgtgtactacaatgaagctgctggcaacaaatatgtacctcgggccatcctagtggacctggagccaggcaccatggactcagtgaggtcgggaccattcggccagatcttcaggccagacaactttgtgttcggtcagagtggtgcaggaaataactgggcaaagggccactacacagagggtgccgagctggtggactctgtcctggatgtggtcaggaaggagtcagaaagctgtgactgtctccagggctttcagctgacccactcattggggggaggcactggctcaggcatggggaccctgctcatcagcaagatcagagaagagtacccagaccgcatcatgaacaccttcagcgtcatgccctcacccaaggtgtcggacactgtggtggagccctataatgccaccctttccgtgcaccagctggtagagaacacagacgaaacctactgcatcgacaacgaggctctgtatgacatctgcttccgcaccctgaagctgaccacacccacctatggcgatctcaaccacctggtgtcagccaccatgagtggagtgaccacctgcctgcgcttccctggccagctgaacgcagacctgcgcaagctggctgtgaacatggtgcctttcccacgcctgcacttcttcatgccaggcttcgcacctctgaccagcaggggcagccagcagtaccgagccctgacagtgcccgagctcacccagcagatgttcgactccaagaacatgatggctgcctgcgacccacgccatggccgctacctgaccgtagccgccattttccggggccgcatgtccatgaaggaggtggatgagcagatgctcaacgtgcagaacaagaacagcagctacttcgtggaatggatccccaacaatgtgaagacggccgtgtgtgacatccctcctcgtggcctcaagatgtccgccaccttcattggcaacagcaccgccatccaagagctgttcaagcgcatctcggagcagttcactgccatgttccggcgcaaggccttcctgcactggtacacgggcgagggcatggacgagatggagttcaccgaggcggagagcaacatgaatgagctggtgtctgagtaccagcagtaccaggatgccacggctgatgagcagggcgagttcgaggaggaggagggtgaggatgaggcttgagttcccaggccaagcaggttagggaaagctgaggcgaaaggagggggtgggggtcttaatctgtgaaaataccttggcagttggaagaaggagaatggtcttaggtttgtgctgggtctctggtgctcttactgttgcctctcacttttttctctttttgtaatatcgatgacgtgatgtgatgcttgagatctttctgaactcctgttgtgatggctgaaatcgcctgaacctttgtgtcctaaa

SEQ ID NO: 9220 - protein, 445 aa, Rattus norvegicus
  ref <308>: DATABASE ACCESSION NUMBER: SWISS-Prot / P04691
  ref <309>: DATABASE ENTRY DATE: 1999-07-15
MREIVHIQAGQCGNQIGPKFWEVISDEHGIDPTGSYHGDSDLQLERINVYYNEAAGNKYVPRAILVDLEPGTMDSVRSGPFGQIFRPDNFVFGQSGAGNNWAKGHYTEGAELVDSVLDVVRKESESCDCLQGFQLTHSLGGGTGSGMGTLLISKIREEYPDRIMNTFSVMPSPKVSDTVVEPYNATLSVHQLVENTDETYCIDNEALYDICFRTLKLTTPTYGDLNHLVSATMSGVTTCLRFPGQLNADLRKLAVNMVPFPRLHFFMPGFAPLTSRGSQQYRALTVPELTQQMFDSKNMMAACDPRHGRYLTVAAIFRGRMSMKEVDEQMLNVQNKNSSYFVEWIPNNVKTAVCDIPPRGLKMSATFIGNSTAIQELFKRISEQFTAMFRRKAFLHWYTGEGMDEMEFTEAESNMNELVSEYQQYQDATADEQGEFEEEEGEDEA

SEQ ID NO: 9221 - DNA, 220 bp, Homo sapiens
  ref <308>: DATABASE ACCESSION NUMBER: EMBL / R29239
  ref <309>: DATABASE ENTRY DATE: 1999-12-12
cgcaaggccttcctgcactggtacacgggcgagggcatggacgagatggagttcaccgaggccgagagcaacatgaatgacctggtgtccgagtaccagcagtaccaggatgccacagccgaggaggagggcgagttcgaggaggaggctgaggaggaggtggcctagagcttcaatcactgggaaagcagggaagcagtgtgaactctttattcactcc

SEQ ID NO: 9222 - DNA, 1485 bp, Rattus norvegicus
  ref <308>: DATABASE ACCESSION NUMBER: EMBL / X04070
  ref <309>: DATABASE ENTRY DATE: 1993-09-12
cgcagtgccagggaggtgtgaatgaggcaggatgaactggacaggtctatacaccttgctcagtggcgtgaatcggcattctacagccattggccgagtatggctgtccgtcatctttatcttcagaatcatggtgctggtggtggctgcagagagcgtgtggggtgatgagaagtcttctttcatctgtaacaccctccagccgggctgtaacagcgtctgctatgaccattttttccccatctcccatgtgcgcctgtggtccctgcaactcatcttggtttccaccccagctctcctcgtggcaatgcacgtggctcaccaacaacacatagaaaagaaaatgctacggcttgaggggcacggggacccccttcacctggaagaggtaaagaggcacaaggtgcacatctcagggacactgtggtggacctatgtcatcagtgtggtgttccggctgctgtttgaggctgtcttcatgtatgtcttctatctgctctacccgggctatgccatggtgcggctggtcaagtgtgaggccttcccctgccccaacacggtggactgcttcgtgtcccgccccactgagaaaaccgtcttcactgtctttatgctcgccgcctccggcatctgcattatcctcaacgtggcggaggtggtgtacctcatcatccgggcctgtgcccgccgtgctcagcgccgctccaatccgccctcccgcaagggctcgggcttcggccaccgcctctcacctgaatacaagcagaatgagatcaacaagctgctgagcgagcaggatggctctctgaaagacatactgcgccgcagtcctggcactggggccgggctggctgagaagagcgaccgatgctcagcctgctgatgccgagtaccaggcaacctcccatccaacccctccctcaccccacccaggcctgcccctccttctcctatgctggtgagcaggcctctgcctcctagggattactccatcaaaccttccctccctccctactccccttcctcagagagtcttctgtcaaagacctggccggcttgggagtggggagccacttctgcaccagggctcaaggttattgagggtgtgggcaattctttctgcctataccctttcctcttccctctccctgagatgagggatgagatgttctgaaggtgtttccaattaggaaacgtaatcttaacccccatgctgtcaggtaccccactttgggagtcatgtcagtggggagggctgtgagcaagcagagtggaggaggggctctgcactgtggatggagaagggaggggagcttgccttgctgcctgctacaaggaaaaggaggacacatctagggtgggggagttctggagggagaagcaggcagataaatcagagtgggggttggtcagggctgcccccagtccccagttcccaaggcctctctctctgaaaatgttacacattaaacaggattttacagt

SEQ ID NO: 9223 - protein, 283 aa, Rattus norvegicus
  ref <308>: DATABASE ACCESSION NUMBER: SWISS-Prot / P08033
  ref <309>: DATABASE ENTRY DATE: 2001-10-16
MNWTGLYTLLSGVNRHSTAIGRVWLSVIFIFRIMVLVVAAESVWGDEKSSFICNTLQPGCNSVCYDHFFPISHVRLWSLQLILVSTPALLVAMHVAHQQHIEKKMLRLEGHGDPLHLEEVKRHKVHISGTLWWTYVISVVFRLLFEAVFMYVFYLLYPGYAMVRLVKCEAFPCPNTVDCFVSRPTEKTVFTVFMLAASGICIILNVAEVVYLIIRACARRAQRRSNPPSRKGSGFGHRLSPEYKQNEINKLLSEQDGSLKDILRRSPGTGAGLAEKSDRCSAC

SEQ ID NO: 9224 - DNA, 1561 bp, Homo sapiens
  ref <308>: DATABASE ACCESSION NUMBER: EMBL / BC002805
  ref <309>: DATABASE ENTRY DATE: 2002-08-24
gacctgtctgggtggcctcagggataggcgctccccaaggtgtgaatgaggcaggatgaactggacaggtttgtacaccttgctcagtggcgtgaaccggcattctactgccattggccgagtatggctctcggtcatcttcatcttcagaatcatggtgctggtggtggctgcagagagtgtgtggggtgatgagaaatcttccttcatctgcaacacactccagcctggctgcaacagcgtttgctatgaccaattcttccccatctcccatgtgcggctgtggtccctgcagctcatcctagtttccaccccagctctcctcgtggccatgcacgtggctcaccagcaacacatagagaagaaaatgctacggcttgagggccatggggaccccctacacctggaggaggtgaagaggcacaaggtccacatctcagggacactgtggtggacctatgtcatcagcgtggtgttccggctgttgtttgaggccgtcttcatgtatgtcttttatctgctctaccctggctatgccatggtgcggctggtcaagtgcgacgtctacccctgccccaacacagtggactgcttcgtgtcccgccccaccgagaaaaccgtcttcaccgtcttcatgctagctgcctctggcatctgcatcatcctcaatgtggccgaggtggtgtacctcatcatccgggcctgtgcccgccgagcccagcgccgctccaatccaccttcccgcaagggctcgggcttcggccaccgcctctcacctgaatacaagcagaatgagatcaacaagctgctgagtgagcaggatggctccctgaaagacatactgcgccgcagccctggcaccggggctgggctggctgaaaagagcgaccgctgctcggcctgctgatgccacataccaggcaacctcccatcccacccccgaccctgccctgggcgagcccctccttctcccctgccggtgcacaggcctctgcctgctggggattactcgatcaaaaccttccttccctggctacttcccttcctcccggggccttccttttgaggagctggaggggtggggagctagaggccacctatgccagtgctcaaggttactgggagtgtgggctgcccttgttgcctgcacccttccctcttccctctccctctctctgggaccactgggtacaagagatgggatgctccgacagcgtctccaattatgaaactaatcttaaccctgtgctgtcagataccctgtttctggagtcacatcagtgaggagggatgtgggtaagaggagcagagggcaggggtgctgtggacatgtgggtggagaagggagggtggccagcactagtaaaggaggaatagtgcttgctggccacaaggaaaaggaggaggtgtctggggtgagggagttagggagagagaagcaggcagataagttggagcaggggttggtcaaggccacctctgcctctagtccccaaggcctctctctgcctgaaatgttacacattaaacaggattttacagtaaaaaaaaaaaaaaaaaa

SEQ ID NO: 9225 - protein, 283 aa, Homo sapiens
  ref <308>: DATABASE ACCESSION NUMBER: SWISS-Prot / P08034
  ref <309>: DATABASE ENTRY DATE: 2002-06-15
MNWTGLYTLLSGVNRHSTAIGRVWLSVIFIFRIMVLVVAAESVWGDEKSSFICNTLQPGCNSVCYDQFFPISHVRLWSLQLILVSTPALLVAMHVAHQQHIEKKMLRLEGHGDPLHLEEVKRHKVHISGTLWWTYVISVVFRLLFEAVFMYVFYLLYPGYAMVRLVKCDVYPCPNTVDCFVSRPTEKTVFTVFMLAASGICIILNVAEVVYLIIRACARRAQRRSNPPSRKGSGFGHRLSPEYKQNEINKLLSEQDGSLKDILRRSPGTGAGLAEKSDRCSAC

SEQ ID NO: 9226 - DNA, 3237 bp, Rattus norvegicus
  ref <308>: DATABASE ACCESSION NUMBER: EMBL / X04979
  ref <309>: DATABASE ENTRY DATE: 1996-05-30
cggggatggggagagttcacccgtggcagaggaatcaacaaagaggggccagggctaaaactcagttttcaccccagaagctgagcctcttaacagatagagccccccacctatttccatttaagcctccagcccttttccgtacaacgaatgcaccagaccccgcgggaaaggggagaagcagtactcagtgccccagcaccaaggcctggattattcaatgaggagtcagctcctttttggggggggggggtcacaaggcatcaaaactccacctctttcctctgccctgctgtgaagggggggggagagcaacccgcctcgtgacagggggttggcccagcccgccctagccctgaggagggggcgggcaggggggagtcctataattggacaggtctgggatccggtcccctgctcagaccccggaggctaaggagttgtttcggaaggagctggtaagacaagcttgggctggcgattcacccagggggcttggtaagacgtgggcaggggaccttgaaatccgctggagtccaggaaacaggcacaattattagaaaagcaggaagcccgatagaagacttagggtggcggggagacaaactaagatcgtgaggtaactagcctttgccggggtcagaacagatggaggagatggaggggtcatctccaggagtactgtcggtgcacggcatacgggctcaactagaaggtagtatcaatctttagcgaaggacccgcgatgagccttaggttgcgtttatgtaaatacctactgatttccatcacagtccccaaaattaccctggccagtttcaaagcgaagaccctcatgcctgagcgtccgaagttctggggtcgcgggagggtaccacttcgcagggatggaggacgattaaaagcttacattagtactaaaccgagagcccggcttagcagggaaggtagaaaggaatgtaaattggaccaccggctgtccctctgcgttgtggaatttgaaccctaggactgggagctggaatttttggcagcgggtccaccccggggtgctgagatagagataggagggggaggtaaatagacctttgggcagatgctctattgtggagatgtttgtgatgactcacagacctgagaagggaattaaggtgggggctctttgggtggcccgagtttctccacccctacccactggtgttcaaagacagcttttccttccgcagactggccaatcacaactgggaagatgaaggctctgtgggccctgctgttggtcccattgctgacaggtatggggcaaggggtggctttccctgctggcaggttggggttggggcagttctgagacctctgagattcaatagccctgagcagctgttttacatgcaggccttgtctttccctatccataatatgagaggattgatgctcagagggtaaaggtgcttgtcataaagctcgaagacttatctcggagcccaacatggtggaaggagagagcggattctctctagttgtcctctgacctccaagggtacacacacagacacacaattaaaaagttgaagtgtgtaatttcttagtcgcttttaaaggggaggtatacattttctaaccccataccagcctagtctcagctctgttctacataggatactagacagtgtatgcttgtagtatctaaacagactccacgactgacttccagacgcactgttgcttcaaagagacccaagagcactgtaggtcctgacccagccttaaacttactactctacacaggatgcctggccgagggagagctggaggtgacagatcagctcccagggcaaagcgaccaaccctgggagcaggccctgaaccgcttctgggattacctgcgctgggtgcagacgctttctgaccaggtccaggaagagctgcagagctcccaagtcacacaggaactgacgtgagtgctcagcgcttcaccctccgcacctgctgagtatccagatccaggggttcctcctatctgggcacctacctacttcttgtttcctttctccatgagtgtgtgggccaggttggcttgaactctcaatacttctgctttctttagccttctggatactgggatgaacaggcattcatttatgttcttggtcgaatggcttttggctttttgagacaggatcccaatctaacttaagctggcttcgaaggctctgcaattctccttcctcagcttctcaacttctgggaatacaagcgagtaccaccgcacctcgctctgtggtttcctcccaccctaattctgacctttttgtctctgcattcatctccctcttgtgtttcctctgggcctgcagggtactgatggaggacactatgactgaagtaaaggcatacaaaaaggagctggaggaacagctgggcccagtggcggaggagacacgggccaggctgactaaagaggtgcaggcggcacaggcccgtctgggagctgacatggaggatctacgcaaccgactcgggcagtaccgcaacgaggtaaacaccatgctgggccagagcacagaggagctgcggtcgcgcctctccacacacctgcgcaagatgcgcaagcgcctgatgcgggatgcggatgatctgcagaagcgcctagcggtgtacaaggccggggcacaggagggcgccgagcgcggtgtgagtgctatccgtgagcgcctggggccactggtggagcagggtcgtcagcgcacagccaacctgcgctggcgccgcccagccccgcgcgatcgcgcccaggctttgagtgaccgcatccgagggcggctggaggaagtgggcaaccaggcccgagaccgcctagaggaggtgcgtgagcagatggaggaggtgcgctccaagatggaggagcagacccagcagatacgcctgcaggccgagatcttccaggcccgcatcaagggctggttcgagccgctagtggaagacatgcagcgccagtgggcaaacctaatggagaagatacaggcctctgtggctaccaactccattgcctccaccacagtgcccctggagaatcaatgatcatccctcacctacgccctgccgcaacatccatgaccagctaggtggccctgtcccaagcaccactctggccctctggtggcccttgcttaataaagattctccaagcacgttctgagtctctgtgagtgattccacacagcttcagcctcagtttat

SEQ ID NO: 9227 - protein, 312 aa, Rattus norvegicus
  ref <308>: DATABASE ACCESSION NUMBER: SWISS-Prot / CAA28650
  ref <309>: DATABASE ENTRY DATE: 2002-06-15
MKALWALLLVPLLTGCLAEGELEVTDQLPGQSDQPWEQALNRFWDYLRWVQTLSDQVQEELQSSQVTQELTVLMEDTMTEVKAYKKELEEQLGPVAEETRARLAKEVQAAQARLGADMEDLRNRLGQYRNEVNTMLGQSTEELRSRLSTHLRKMRKRLMRDADDLQKRLAVYKAGAQEGAERGVSAIRERLGPLVEQGRQRTANLGAGAAQPLRDRAQALSDRIRGRLEEVGNQARDRLEEVREQMEEVRSKMEEQTQQIRLQAEIFQARIKGWFEPLVEDMQRQWANLMEKIQASVATNSIASTTVPLENQ

SEQ ID NO: 9228 - DNA, 1156 bp, Homo sapiens
  ref <308>: DATABASE ACCESSION NUMBER: Refseq / NM_000041
  ref <309>: DATABASE ENTRY DATE: 2000-10-31
cgcagcggaggtgaaggacgtccttccccaggagccgactggccaatcacaggcaggaagatgaaggttctgtgggctgcgttgctggtcacattcctggcaggatgccaggccaaggtggagcaagcggtggagacagagccggagcccgagctgcgccagcagaccgagtggcagagcggccagcgctgggaactggcactgggtcgcttttgggattacctgcgctgggtgcagacactgtctgagcaggtgcaggaggagctgctcagctcccaggtcacccaggaactgagggcgctgatggacgagaccatgaaggagttgaaggcctacaaatcggaactggaggaacaactgaccccggtggcggaggagacgcgggcacggctgtccaaggagctgcaggcggcgcaggcccggctgggcgcggacatggaggacgtgtgcggccgcctggtgcagtaccgcggcgaggtgcaggccatgctcggccagagcaccgaggagctgcgggtgcgcctcgcctcccacctgcgcaagctgcgtaagcggctcctccgcgatgccgatgacctgcagaagcgcctggcagtgtaccaggccggggcccgcgagggcgccgagcgcggcctcagcgccatccgcgagcgcctggggcccctggtggaacagggccgcgtgcgggccgccactgtgggctccctggccggccagccgctacaggagcgggcccaggcctggggcgagcggctgcgcgcgcggatggaggagatgggcagccggacccgcgaccgcctggacgaggtgaaggagcaggtggcggaggtgcgcgccaagctggaggagcaggcccagcagatacgcctgcaggccgaggccttccaggcccgcctcaagagctggttcgagcccctggtggaagacatgcagcgccagtgggccgggctggtggagaaggtgcaggctgccgtgggcaccagcgccgcccctgtgcccagcgacaatcactgaacgccgaagcctgcagccatgcgaccccacgccaccccgtgcctcctgcctccgcgcagcctgcagcgggagaccctgtccccgccccagccgtcctcctggggtggaccctagtttaataaagattcaccaagtttcacgc

SEQ ID NO: 9229 - protein, 317 aa, Homo sapiens [sequence omitted]

SEQ ID NO: 9230 - DNA, 3259 bp, Rattus norvegicus
  ref <308>: DATABASE ACCESSION NUMBER: EMBL / X05137
  ref <309>: DATABASE ENTRY DATE: 1995-03-21
cagctccggcgggcagcaggcgctggagcgcatcgcagttcagctcagcgcagcaccatcggtctgcggagcggactgagctagaagcggagcgctgacgccggaggcgtgcaatgaggagggcaggtgctgcctgcagcgccatggaccggctgcgcctgctgctgctgctgattctaggggtgtcctctggaggtgccaaggagacatgttccacaggcctgtacacccacagcggagagtgctgcaaagcctgcaacttgggcgaaggcgtggcccagccctgcggagccaaccagaccgtgtgtgaaccctgcctggacaatgttacattctccgatgtggtgagcgccactgagccgtgcaagccgtgcaccgagtgcctgggcctgcagagcatgtccgctccctgtgtggaggcagacgatgcagtgtgcagatgtgcctatggctactaccaggacgaggagactggccactgtgaggcttgcagcgtgtgcgaggtgggctcgggactcgtgttctcctgccaggacaaacagaacacagtgtgtgaagagtgcccagagggcacatactcagacgaagccaaccacgtggacccgtgcctaccctgcacggtgtgcgaggacactgagcgccagttacgcgagtgcacgccctgggctgatgctgaatgcgaagagatccctggtcgatggatcccaaggtctacgcccccggagggctccgacagcacagcgcccagcacccaggagcctgaggttcctccagagcaagaccttgtacccagtacagtggcggatatggtgaccactgtgatgggcagctcccagcctgtagtgacccgcggcaccaccgacaacctcattcctgtctattgctccatcttggctgctgtggtcgtgggccttgtggcctatattgctttcaagaggtggaacagctgcaaacaaaataaacaaggcgccaacagccgccccgtgaaccagacgcccccaccggagggagagaaactgcacagcgacagtggcatctctgtggacagccagagcctgcacgaccagcagacccatacgcagactgcctcaggccaggccctcaagggtgatggcaacctctacagtagcctgcccctgaccaagcgtgaggaggtagagaaactgctcaacggggatacctggcgacatctggcaggcgagctgggttaccagcctgaacatatagactcctttacccacgaggcctgcccagtgcgagccctgctggccagctggggtgcccaggacagtgcaacgcttgatgcccttttagccgccctgcgacgcatccagagagctgacattgtggagagtctatgcagcgagtccactgccacatccccagtgtgaactcacagactgggagcccctgtcctgtcccacattccgacgactgatgttctagccagcccccacagagctgccccctctccctcggggatggcccaacggtcagaacggagcatctctgtgcagggcctctgtgttcccactcctgactccgttgctgctcccgagggggcccttgcttctgaccaccctctcctcagcaagagagagagagaggaccacccgagcctgacttgctccatttccatctcaggcctttccttcctttctacacattagctgtgtcagatctgggggtttgacactaggagaagggagcgggggcacccctaagactcaggaggtactgaagaaccagagccatggactccacactgtgaaccggagaacaaggggcggggcattgtggtaggctagaccttccttagcccctcccttctcccctctggccaaagaagaggattacggacctatctgagctgaaagcaggtttggaacccagcccacacttctctctcacacacaggatggtaaaacccagagaaaggcagggactgacctaggccacccaaccacaggaagaacaaatgaaggctgatacactccgtttctgaatgagggcgtcaagtgtgcttgttgacagggatggcgtgactttcagggaaatatctggaagccatgtctgccccgccctcaaccacttccaggcccctacccaacccttgtgcagatgaactgtttgttcaagggctggtccattggtctattctgatggagtcaagctaagggctcaggcttatccataaggcatttgtggagagatgaatctgttagtgcgctcattcttggcataagcctgaagccaacacggcccttaatgtcagccctcggggtcaggaaccaaggactcccaccccacaatccaacactatactacattacacacacacacacacacacacacacacacacacacacacacacacagatatcttgcttttctccccatggctcttttggggctgagactagatcctgctgggagtcactgccagtgagagatccggaggggacagagctgagcttcatggggctgtcttcctcgcccccgggtctggcaggccaagaatgactgcatctgagctggtgtctgtcttccaatggcctgtgcgtggaggaaatgctcccactcctccccttcttgaagctgcccccagaagactacagtgcaaaagagcagactggtgtgagaacacaagaaaaagcagatgctggccctgcagtctgtggcagctttctcctcagcttcaaggcccctgcaaaggacggatttcctgagcacggccaggaaggggcaagagggttcggttcagtggcgctttctcccggctccttggcctgttctgttttgcttgctgttggaatgagtgggcaccccctctatttagcatgaaggagccccaggcagggtatgcacagactgaccaccatccctccccacccagggtccacccaacccggtgaagagaccaggagcattgtacgcatacgcgggtggtatttttatggaccccaatctgcaattcccagacacctgggaagtgggacattctttgtgtatttattttcctccccaggagctggggagtggtggggggctgcaggtacggtttagcatgtgtttggttctgggggtctctccagccttgttttgggccaagttggaacctctggccctccagctggtgactatgaactccagaccccttcgtgctccccgacgccttccccttgcatcctgtgtaaccatttcgttgggccctcccaaaacctacacataaaacatacaggaggaccattaaattggc

SEQ ID NO: 9231 - protein, 425 aa, Rattus norvegicus
  ref <308>: DATABASE ACCESSION NUMBER: SWISS-Prot / P07174
  ref <309>: DATABASE ENTRY DATE: 2002-06-15
MRRAGAACSAMDRLRLLLLLILGVSSGGAKETCSTGLYTHSGECCKACNLGEGVAQPCGANQTVCEPCLDNVTFSDVVSATEPCKPCTECLGLQSMSAPCVEADDAVCRCAYGYYQDEETGHCEACSVCEVGSGLVFSCQDKQNTVCEECPEGTYSDEANHVDPCLPCTVCEDTERQLRECTPWADAECEEIPGRWIPRSTPPEGSDSTAPSTQEPEVPPEQDLVPSTVADMVTTVMGSSQPVVTRGTTDNLIPVYCSILAAVVVGLVAYIAFKRWNSCKQNKQGANSRPVNQTPPPEGEKLHSDSGISVDSQSLHDQQTHTQTASGQALKGDGNLYSSLPLTKREEVEKLLNGDTWRHLAGELGYQPEHIDSFTHEACPVRALLASWGAQDSATLDALLAALRRIQRADIVESLCSESTATSPV

SEQ ID NO: 9232 - DNA, 3386 bp, Homo sapiens
  ref <308>: DATABASE ACCESSION NUMBER: EMBL / M14764
  ref <309>: DATABASE ENTRY DATE: 1999-07-02
gccgcggccagctccggcgggcagggggggcgctggagcgcagcgcagcgcagccccatcagtccgcaaagcggaccgagctggaagtcgagcgctgccgcgggaggcgggcgatgggggcaggtgccaccggccgcgccatggacgggccgcgcctgctgctgttgctgcttctgggggtgtcccttggaggtgccaaggaggcatgccccacaggcctgtacacacacagcggtgagtgctgcaaagcctgcaacctgggcgagggtgtggcccagccttgtggagccaaccagaccgtgtgtgagccctgcctggacagcgtgacgttctccgacgtggtgagcgcgaccgagccgtgcaagccgtgcaccgagtgcgtggggctccagagcatgtcggcgccgtgcgtggaggccgacgacgccgtgtgccgctgcgcctacggctactaccaggatgagacgactgggcgctgcgaggcgtgccgcgtgtgcgaggcgggctcgggcctcgtgttctcctgccaggacaagcagaacaccgtgtgcgaggagtgccccgacggcacgtattccgacgaggccaaccacgtggacccgtgcctgccctgcaccgtgtgcgaggacaccgagcgccagctccgcgagtgcacacgctgggccgacgccgagtgcgaggagatccctggccgttggattacacggtccacacccccagagggctcggacagcacagcccccagcacccaggagcctgaggcacctccagaacaagacctcatagccagcacggtggcaggtgtggtgaccacagtgatgggcagctcccagcccgtggtgacccgaggcaccaccgacaacctcatccctgtctattgctccatcctggctgctgtggttgtgggccttgtggcctacatagccttcaagaggtggaacagctgcaagcagaacaagcaaggagccaacagccggccagtgaaccagacgcccccaccagagggagaaaaactccacagcgacagtggcatctccgtggacagccagagcctgcatgaccagcagccccacacgcagacagcctcgggccaggccctcaagggtgacggaggcctctacagcagcctgcccccagccaagcgggaggaggtggagaagcttctcaacggctctgcgggggacacctggcggcacctggcgggcgagctgggctaccagcccgagcacatagactcctttacccatgaggcctgccccgttcgcgccctgcttgcaagctgggccacccaggacagcgccacactggacgccctcctggccgccctgcgccgcatccagcgagccgacctcgtggagagtctgtgcagtgagtccactgccacatccccggtgtgagcccaaccggggagcccccgccccgccccacattccgacaaccgatgctccagccaacccctgtggagcccgcacccccaccctttggggggggcccgcctggcagaactgagctcctctgggcaggacctcagagtccaggccccaaaaccacagccctgtcagtgcagcccgtgtggccccttcacttctgaccacacttcctgtccagagagagaagtgcccctgctgcctccccaaccctgcccctgccccgtcaccatctcaggccacctgcccccttctcccacactgctaggtgggccagcccctcccaccacagcaggtgtcatatatggggggccaacaccagggatggtactagggggaagtgacaaggccccagagactcagagggaggaatcgaggaaccagagccatggactctacactgtgaacttggggaacaagggtggcatcccagtggcctcaaccctccctcagcccctcttgccccccaccccagcctaagatgaagaggatcggaggcttgtcagagctgggaggggttttcgaagctcagcccacccccctcattttggatataggtcagtgaggcccagggagaggccatgattcgcccaaagccagacagcaacggggaggccaagtgcaggctggcaccgccttctctaaatgaggggcctcaggtttgcctgagggcgaggggagggtggcaggtgaccttctgggaaatggcttgaagccaagtcagctttgccttccacgctgtctccagacccccaccccttccccactgcctgcccacccgtggagatgggatgcttgcctagggcctggtccatgatggagtcaggtttggggttcgtggaaagggtgctgcttccctctgcctgtccctctcaggcatgcctgtgtgacatcagtggcatggctccagtctgctgccctccatcccgacatggacccggagctaacactggcccctagaatcagcctaggggtcagggaccaaggacccctcaccttgcaacacacagacacacgcacacacacacacaggaggagaaatctcacttttctccatgagttttttctcttgggctgagactggatactgcccggggcagctgccagagaagcatcggagggaattgaggtctgctcggccgtcttcactcgcccccgggtttggcgggccaaggactgccgaccgaggctggagctggcgtctgtcttcaagggcttacacgtggaggaatgctcccccatcctccccttccctgcaaacatggggttggctgggcccagaaggttgcgatgaagaaaagcgggccagtgtgggaatgcggcaagaaggaattgacttcgactgtgacctgtggggatttctcccagctctagacaaccctgcaaaggactgttttttcctgagcttggccagaagggggccatgaggcctcagtggactttccaccccctccctggcctgttctgttttgcctgaagttggagtgagtgtggctcccctctatttagcatgacaagccccaggcaggctgtgcgctgacaaccaccgctccccagcccagggttcccccagccctgtggaagggactaggagcactgtagtaaatggcaattctttgacctcaacctgtgatgaggggaggaaactcacctgctggcccctcacctgggcacctggggagtgggacagagtctgggtgtatttattttcctccccagcaggtggggagggggtttggtggcttgcaagtatgttttagcatgtgtttggttctggggcccctttttactccccttgagctgagatggaacccttttggcccccagctgggggccatgagctccagacccccagcaaccctcctatcacctcccctccttgcctcctgtgtaatcatttcttgggccctcctgaaacttacacacaaaacgttaagtgatgaacattaaatagcaaag

SEQ ID NO: 9233 - protein, 427 aa, Homo sapiens
  ref <308>: DATABASE ACCESSION NUMBER: SWISS-Prot / P08138
  ref <309>: DATABASE ENTRY DATE: 2001-10-16
MGAGATGRAMDGPRLLLLLLLGVSLGGAKEACPTGLYTHSGECCKACNLGEGVAQPCGANQTVCEPCLDSVTFSDVVSATEPCKPCTECVGLQSMSAPCVEADDAVCRCAYGYYQDETTGRCEACRVCEAGSGLVFSCQDKQNTVCEECPDGTYSDEANHVDPCLPCTVCEDTERQLRECTRWADAECEEIPGRWITRSTPPEGSDSTAPSTQEPEAPPEQDLIASTVAGVVTTVMGSSQPVVTRGTTDNLIPVYCSILAAVVVGLVAYIAFKRWNSCKQNKQGANSRPVNQTPPPEGEKLHSDSGISVDSQSLHDQQPHTQTASGQALKGDGGLYSSLPPAKREEVEKLLNGSAGDTWRHLAGELGYQPEHIDSFTHEACPVRALLASWATQDSATLDALLAALRRIQRADLVESLCSESTATSPV

SEQ ID NO: 9234 - DNA, 2214 bp, Rattus norvegicus
  ref <308>: DATABASE ACCESSION NUMBER: EMBL / X05300
  ref <309>: DATABASE ENTRY DATE: 1995-03-21
tcgcggtcatggaggcgccgatcgtcttgctgctgctgctatggctcgccttggccccgacgcctggcagcgcctcttcggaggctccgccgctggtcaacgaggacgtgaagcgcacggtggacctgagcagccacctagccaaggtgacggctgaggtggtcctggcgcacccgggcggcggctctacagcacgagccagctctttcgttctggccctggagcccgaactggagtcgcgacttgcacacctaggcgtgcaggtaaagggagaagatgaggaagacaacaacctagaagtacgagaaaccaaaatgaaggggaaaagtgggaggtttttcaccgtcaagctcccagttgctcttgatcctgggtccaagatctcaatcgttgtggaaactgtctacacccatgtgcttcatccatacccgactcagataactcagtcagagaaacagtttgtggtgtttgagggcaaccattacttctactctccctatccaacaaagacccagaccatgcgagtgagacttgcttcccgaaatgtggagagccataccaagctggggaacccctcaaggtctgaggacatcctggactatgggccttttaaagacatccctgcctacagtcaggatactttcaaagtacattatgagaacaatagccctttcctgaccatcaccagtatgacccgggtcattgaggtttctcactggggcaatattgctgtggaagagaacgtggacttgaagcatacaggtgcggtgctgaagggacctttctcccgctacgattaccagaggcagcctgacagtgggatctcctccattcgttcttttaagaccatccttcctgctgctgcccaggatgtgtattaccgggatgaaatcggtaatgtttccaccagccacctccttattttggatgactccgtggaaatggaaatccggcctcgatttggtctctttggagggtggaagacacactacatcgttggttacaacctcccaagctatgagtacctctataatctgggtgaccagtatgcactgaagatgcggtttgtagaccacgtgtttgatgagcaagtgatagattctctgacagtgaagatcatccttcctgagggagccaagaacatccaggtagacagtccctacgatattagccgggccccagatgagctgcattacacctacctagacacattcggccgcccggtgattgttgcttacaagaagaatctagttgaacagcacattcaggacattgtggtgcactacacattcaacaaggtgctcatgctgcaggagcctctgctggttgtggccgccttctacatcctgttcttcaccgtcatcatctacgtccgtctagacttttccatcaccaaggacccagcagcagaagccaggatgaaagtggcctgtatcacagagcaggtcttaaccctggtcaacaagaggttaggcctctaccgtcactttgatgagactgtcaatagatacaagcagtcccgggacatctctaccctcaatagtggcaagaagagcctagagacagagcacaaagctgtgaccagtgagattgctgtgctgcagtctaggctgaagacggagggctctgacctgtgtgacagggtgagcgaaatgcagaagctggacgcgcaggtcaaggagctggtactgaagtctgcggtggaggcagagaggctggtggctggcaagctcaagaaggacacatacatcgagaatgaaaagctcagctcaggaaaacgccaggagctggtcaccaagatcgaccacatcctagacgctctgtagctcttgtctccagagcaggcctgggtggcctacacttctggatggaataggtagagggaggaagttgtgattagcctaagacctcaagaaaaaagctgaggcccatccatggctgtgtaagaagcttgtcccttatttctgaatggttctcttttttacaaaaacaaaaacctaaacaaaaatcctgcccaaaaaacaaacttggttgtgttttgagcaaaagcattttgagtagttgattgctgttttgttttgatacctgggtattttttctgtctgtaagccctgttttatggccttctgattcctaatgtttggttcttttgtgagcgtatgcatggttttttaaaagtgtgtatgaccaaataaaaataaaggagggactgtg

SEQ ID NO: 9235 - protein, 605 aa, Rattus norvegicus
  ref <308>: DATABASE ACCESSION NUMBER: SWISS-Prot / P07153
  ref <309>: DATABASE ENTRY DATE: 2001-10-16
MEAPIVLLLLLWLALAPTPGSASSEAPPLVNEDVKRTVDLSSHLAKVTAEVVLAHPGGGSTARASSFVLALEPELESRLAHLGVQVKGEDEEDNNLEVRETKMKGKSGRFFTVKLPVALDPGSKISIVVETVYTHVLHPYPTQITQSEKQFVVFEGNHYFYSPYPTKTQTMRVRLASRNVESHTKLGNPSRSEDILDYGPFKDIPAYSQDTFKVHYENNSPFLTITSMTRVIEVSHWGNIAVEENVDLKHTGAVLKGPFSRYDYQRQPDSGISSIRSFKTILPAAAQDVYYRDEIGNVSTSHLLILDDSVEMEIRPRFGLFGGWKTHYIVGYNLPSYEYLYNLGDQYALKMRFVDHVFDEQVIDSLTVKIILPEGAKNIQVDSPYDISRAPDELHYTYLDTFGRPVIVAYKKNLVEQHIQDIVVHYTFNKVLMLQEPLLVVAAFYILFFTVIIYVRLDFSITKDPAAEARMKVACITEQVLTLVNKRLGLYRHFDETVNRYKQSRDISTLNSGKKSLETEHKAVTSEIAVLQSRLKTEGSDLCDRVSEMQKLDAQVKELVLKSAVEAERLVAGKLKKDTYIENEKLSSGKRQELVTKIDHILDAL

SEQ ID NO: 9236 - DNA, 2397 bp, Homo sapiens
  ref <308>: DATABASE ACCESSION NUMBER: EMBL / Y00281
  ref <309>: DATABASE ENTRY DATE: 1995-03-23
ttagctaggcatggtggcacatgcctgtaatcccagctactcgggaggctgaggcaggagaattgcttgaacccgggaggcagaggttgcagccggctgagatggcgccatcacactccagcctgctcttcccggtcatggaggcgccagccgccggcttgtttctgctcctgttgcttgggacttgggccccggcgccgggcagcgcctcctccgaggcaccgccgctgatcaatgaggacgtgaagcgcacagtggacctaagcagccacctggctaaggtgacggccgaggtggtcctggcgcacctgggcggcggctccacgtcccgagctacctctttcctgctggctttggagcctgagctcgaggcccggctggcgcacctgggcgtgcaggtaaagggagaagatgaggaagagaacaatttggaagtacgtgaaaccaaaattaagggtaaaagtgggagattcttcacagtcaagctcccagttgctcttgatcctggggccaagatttcagtcattgtggaaacagtctacacccatgtgcttcatccatatccaacccagatcacccagtcagagaaacagtttgtggtgtttgaggggaaccattatttctactctccctatccaacgaagacacaaaccatgcgtgtgaagcttgcctctcgaaatgtggagagctacaccaagctggggaaccccacgcgctctgaggacctactggattatgggcctttcagagatgtgcctgcctatagtcaggatacttttaaagtacattatgagaacaacagccctttcctgaccatcaccagcatgacccgagtcattgaagtctctcactggggtaatattgctgtggaagaaaatgtggacttaaagcacacaggagctgtgcttaaggggcctttctcacgctatgattaccagagacagccagatagtggaatatcctccatccgttcttttaagaccatccttcctgctgctgcccaggatgtttattaccgggatgagattggcaatgtttctaccagccacctccttattttggatgactctgtagagatggaaatccggcctcgcttccctctctttggcgggtggaagacccattacatcgttggctacaacctcccaagctatgagtacctctataatttgggtgaccagtatgcactgaagatgaggtttgtggaccatgtgtttgatgaacaagtgatagattctctgactgtgaagatcatcctgcctgaaggagccaagaacattgaaattgatagtccctatgaaatcagccgtgccccagatgagctgcactacacctatctggatacatttggccgccctgtgattgttgcctacaagaaaaatctggtagaacagcacattcaggacattgtggtccactacacgttcaacaaggtgctcatgctgcaggagcccctgctggtggtggcggccttctacatcctgttcttcaccgttatcatctatgttcggctggacttctccatcaccaaggatccagccgcagaagccaggatgaaggtagcctgcatcacagagcaggtcttgaccctggtcaacaagagaataggcctttaccgtcactttgacgagaccgtcaataggtacaagcaatcccgggacatctccaccctcaacagtggcaagaagagcctggagactgaacacaaggccttgaccagtgagattgcactgctgcagtccaggctgaagacagagggctctgatctgtgcgacagagtgagcgaaatgcagaagctggatgcacaggtcaaggagctggtgctgaagtcggcggtggaggctgagcgcctggtggctggcaagctcaagaaagacacgtacattgagaatgagaagctcatctcaggaaagcgccaggagctggtcaccaagatcgaccacatcctggatgccctgtagcccctgcccgcatcctccagggggcccagggtgcctgcactttgctgtggcaggcagattgggtggtagtgggaggttgtgcatggaggccagtgaaagctgacatctgtaaaaggccttcaaggaagagaaaccaggccctgcgtcaggcagtgtgagtttgccgtttgtccttaactttctttttttttttttttaaaaaagaaaactttaaaaaaactcccattaaaaacaaaacatctttgtgttgtgaacaaaggaattttcaatatttgattggtattctgttctgaagtctaggatatttttcagcctataaagccccctgttttatgcccttctaattctgatgtttgggtattgtgtgagtgcatgtgtttttttttttttttttttaaagcgtgtgtgaacaaatggaaataaagcagggactgtg

SEQ ID NO: 9237 - protein, 607 aa, Homo sapiens
  ref <308>: DATABASE ACCESSION NUMBER: SWISS-Prot / P04843
  ref <309>: DATABASE ENTRY DATE: 2002-06-15
MEAPAAGLFLLLLLGTWAPAPGSASSEAPPLINEDVKRTVDLSSHLAKVTAEVVLAHLGGGSTSRATSFLLALEPELEARLAHLGVQVKGEDEEENNLEVRETKIKGKSGRFFTVKLPVALDPGAKISVIVETVYTHVLHPYPTQITQSEKQFVVFEGNHYFYSPYPTKTQTMRVKLASRNVESYTKLGNPTRSEDLLDYGPFRDVPAYSQDTFKVHYENNSPFLTITSMTRVIEVSHWGNIAVEENVDLKHTGAVLKGPFSRYDYQRQPDSGISSIRSFKTILPAAAQDVYYRDEIGNVSTSHLLILDDSVEMEIRPRFPLFGGWKTHYIVGYNLPSYEYLYNLGDQYALKMRFVDHVFDEQVIDSLTVKIILPEGAKNIEIDSPYEISRAPDELHYTYLDTFGRPVIVAYKKNLVEQHIQDIVVHYTFNKVLMLQEPLLVVAAFYILFFTVIIYVRLDFSITKDPAAEARMKVACITEQVLTLVNKRIGLYRHFDETVNRYKQSRDISTLNSGKKSLETEHKALTSEIALLQSRLKTEGSDLCDRVSEMQKLDAQVKELVLKSAVEAERLVAGKLKKDTYIENEKLISGKRQELVTKIDHILDAL

SEQ ID NO: 9238 - DNA, 1121 bp, Rattus norvegicus
  ref <308>: DATABASE ACCESSION NUMBER: EMBL / X05472
  ref <309>: DATABASE ENTRY DATE: 1995-05-17
aagatgaactctcaatcctaaatatctatgccccaaatacaagggcacctacatacgtaaaagaaaccttactaaagctcaaagcacacattgcacctcacacaataataatgggagatttcaacacaccactctcatcaatggacagatcatggaaacagatattaagcaatgatgtcgacagactaagagaagccatgagccaaatgggcttaacggatatttatagaacattctatcctaaagcaaaaggatataccttcttctcagctcctcatggtactttctccaaaattgaccatataattggtcaaaaaacgggcctcaacaggtacagaaagatagaaataatcccatgcgtgctatcggaccaccacggcctaaaactggtcttcaataacaataagggaagaatgcccacatagacgtggaaattgaacaatgctatactcaatgataacctggtcaaggaagaaataaagaaagaaattaaaaactttttagaatttaatgaaaatgaagatacaacatacccaaacttatgggacacaatgaaagctgtgctaagaggaaaactcatagcgctgagtgcctgcagaaagaaacaggaaagagcatatgtcagcagcttgacagcacacctaaaagctctagaacaaaaagaagcaaatacacccaggaggagtagaaggcaggaaataatcaaactcagagctgaaataaaccaagtagaaacaaaaagtaccatagaaagaatcaacagaaccaaaagttggttctttgagaaaatcaacaagatagataaacccttagccacactaacgagaggacacagagagtgcgtccaaattaacaaaatcagaaatgaaaagggagacataactacagattcagaggaaattcaaaaaatcatcagatcttactataaaaacctatattcaaaaaaacttgaaaattttcaggaaatggacaatttcctagacagataccaggtattgaagttaaatcaggaacagataaaccagttaaacaaccccataactcctaaggaaatagaagcagtcattaaaggtctcccaaccaaaaagagcccaggtccagacgggtttagtgcagaattc

SEQ ID NO: 9239 - protein, 140 aa, Rattus norvegicus
  ref <308>: DATABASE ACCESSION NUMBER: SWISS-Prot / CAA29032
  ref <309>: DATABASE ENTRY DATE: 2002-06-01
DELSILNIYAPNTRAPTYVKETLLKLKAHIAPHTIIMGDFNTPLSSMDRSWKQILSNDVDRLREAMSQMGLTDIYRTFYPKAKGYTFFSAPHGTFSKIDHIIGQKTGLNRYRKIEIIPCVLSDHHGLKLVFNNNKGRMPT

SEQ ID NO: 9240 - DNA, 1121 bp, Rattus norvegicus; identical to SEQ ID NO: 9238
  ref <308>: DATABASE ACCESSION NUMBER: EMBL / X05472
  ref <309>: DATABASE ENTRY DATE: 1995-05-17

SEQ ID NO: 9241 - DNA, 1121 bp, Rattus norvegicus; identical to SEQ ID NO: 9238
  ref <308>: DATABASE ACCESSION NUMBER: EMBL / X05472
  ref <309>: DATABASE ENTRY DATE: 1995-05-17

SEQ ID NO: 9242 - DNA, 1121 bp, Rattus norvegicus; identical to SEQ ID NO: 9238
  ref <308>: DATABASE ACCESSION NUMBER: EMBL / X05472
  ref <309>: DATABASE ENTRY DATE: 1995-05-17

SEQ ID NO: 9243 - protein, 140 aa, Rattus norvegicus; identical to SEQ ID NO: 9239
  ref <308>: DATABASE ACCESSION NUMBER: SWISS-Prot / CAA29032
  ref <309>: DATABASE ENTRY DATE: 2002-06-01

SEQ ID NO: 9244 - DNA, 1121 bp, Rattus norvegicus; identical to SEQ ID NO: 9238
  ref <308>: DATABASE ACCESSION NUMBER: EMBL / X05472
  ref <309>: DATABASE ENTRY DATE: 1995-05-17

SEQ ID NO: 9245 - DNA, 1121 bp, Rattus norvegicus; identical to SEQ ID NO: 9238
  ref <308>: DATABASE ACCESSION NUMBER: EMBL / X05472
  ref <309>: DATABASE ENTRY DATE: 1995-05-17

SEQ ID NO: 9246 - DNA, 1121 bp, Rattus norvegicus; identical to SEQ ID NO: 9238
  ref <308>: DATABASE ACCESSION NUMBER: EMBL / X05472
  ref <309>: DATABASE ENTRY DATE: 1995-05-17

SEQ ID NO: 9247 - protein, 140 aa, Rattus norvegicus; identical to SEQ ID NO: 9239
  ref <308>: DATABASE ACCESSION NUMBER: SWISS-Prot / CAA29032
  ref <309>: DATABASE ENTRY DATE: 2002-06-01

SEQ ID NO: 9248 - DNA, 1121 bp, Rattus norvegicus; identical to SEQ ID NO: 9238
  ref <308>: DATABASE ACCESSION NUMBER: EMBL / X05472
  ref <309>: DATABASE ENTRY DATE: 1995-05-17

SEQ ID NO: 9249 - DNA, 1121 bp, Rattus norvegicus; identical to SEQ ID NO: 9238
  ref <308>: DATABASE ACCESSION NUMBER: EMBL / X05472
  ref <309>: DATABASE ENTRY DATE: 1995-05-17

SEQ ID NO: 9250 - DNA, 1121 bp, Rattus norvegicus; identical to SEQ ID NO: 9238
  ref <308>: DATABASE ACCESSION NUMBER: EMBL / X05472
  ref <309>: DATABASE ENTRY DATE: 1995-05-17

SEQ ID NO: 9251 - protein, 140 aa, Rattus norvegicus; identical to SEQ ID NO: 9239
  ref <308>: DATABASE ACCESSION NUMBER: SWISS-Prot / CAA29032
  ref <309>: DATABASE ENTRY DATE: 2002-06-01

SEQ ID NO: 9252 - DNA, 1121 bp, Rattus norvegicus; identical to SEQ ID NO: 9238
  ref <308>: DATABASE ACCESSION NUMBER: EMBL / X05472
  ref <309>: DATABASE ENTRY DATE: 1995-05-17

SEQ ID NO: 9253 - protein, 140 aa, Rattus norvegicus; identical to SEQ ID NO: 9239
  ref <308>: DATABASE ACCESSION NUMBER: SWISS-Prot / CAA29032
  ref <309>: DATABASE ENTRY DATE: 2002-06-01

SEQ ID NO: 9254 - DNA, 1121 bp, Rattus norvegicus; identical to SEQ ID NO: 9238
  ref <308>: DATABASE ACCESSION NUMBER: EMBL / X05472
  ref <309>: DATABASE ENTRY DATE: 1995-05-17

SEQ ID NO: 9255 - DNA, 1121 bp, Rattus norvegicus; identical to SEQ ID NO: 9238
  ref <308>: DATABASE ACCESSION NUMBER: EMBL / X05472
  ref <309>: DATABASE ENTRY DATE: 1995-05-17

SEQ ID NO: 9256 - protein, 140 aa, Rattus norvegicus; identical to SEQ ID NO: 9239
  ref <308>: DATABASE ACCESSION NUMBER: SWISS-Prot / CAA29032
  ref <309>: DATABASE ENTRY DATE: 2002-06-01

SEQ ID NO: 9257 - DNA, 1121 bp, Rattus norvegicus; identical to SEQ ID NO: 9238
  ref <308>: DATABASE ACCESSION NUMBER: EMBL / X05472
  ref <309>: DATABASE ENTRY DATE: 1995-05-17

SEQ ID NO: 9258 - DNA, 1121 bp, Rattus norvegicus; identical to SEQ ID NO: 9238
  ref <308>: DATABASE ACCESSION NUMBER: EMBL / X05472
  ref <309>: DATABASE ENTRY DATE: 1995-05-17

SEQ ID NO: 9259 - DNA, 1114 bp, Rattus norvegicus
  ref <308>: DATABASE ACCESSION NUMBER: EMBL / X05834
  ref <309>: DATABASE ENTRY DATE: 1995-04-11
acaattgctagtcttttgaaactagatagttatcctttctataaaacaccgtgacacatctccccacccccaccccccacacttgtttttcggagtatctgctactaatgtttttcttctattttgacagaatgtaaattgcccaattgaatgcttcatgccgttggacgtgcaggctgacagagatgattccagagagtaatctttccatccagcccaagccaacaagtgtctctctaccaaggtcaatccacaccccagtgatgttagcagaccctccatttctgagtggtcatttcacccttaagccttctgctctggagtcaagttctcagcttcagctcaacttacagcttctccaagcatcgccccgcgggatgttttgagacttccctcttaaatggtgacagttggtgccctgttctgcttcagggtattcagtactgctcagtattattgtctaagagaatcaaaagttcttgtgatttggtctgggatcaaagggaaacacaggtagccaaccacgatgcaatgaattgaatggtagtacccaagagcgggagcaggaagttaaaccagacagttctgctttcttttgccgtctgatctgcagcactgtcaggaggcctgtcctgtggctgtgtccaaacaccccacaggactcactgtcccaacaatcctaattgcctagaaatatctttctcttacctgttatttatcaatttttcccagtatttttatacggaaaaaattgtattgaagacactttgtatgcagttgataagaggaattcagtataattatggttggtgactatttttataatgtacatgccaacactttactactgtggaaagacaagtgttttaataaaaagatttacattccatgatgtggaggtcatttcttttttaacataatgtacctagagagaaaaatcataatcttcatgaatgtcctttagtctctgtgttgggctagggtggtttctgcacatgaactcctgctggtcttacagaagcaccgatactttttgtcattttgtgttctgtgttctcagttgtgatttaaatggactcaaatgtatgcaagcttgctagctagcttatagaag

SEQ ID NO: 9260 - protein, 2477 aa, Rattus norvegicus
  ref <308>: DATABASE ACCESSION NUMBER: SWISS-Prot / CAA29281
  ref <309>: DATABASE ENTRY DATE: 2002-06-15
MLRGPGPGRLLLLAVLCLGTSVRCTETGKSKRQAQQIVQPPSPVAVSQSKPGCFDNGKHYQINQQWERTYLGNALVCTCYGGSRGFNCESKPEPEETCFDKYTGNTYKVGDTYERPKDSMIWDCTCIGAGRGRISCTIANRCHEGGQSYKIGDKWRRPHETGGYMLECLCLGNGKGEWTCKPIAEKCFDHAAGTSYVVGETWEKPYQGWMMVDCTCLGEGNGRITCTSRNRCNDQDTRTSYRIGDTWSKKDNRGNLLQCVCTGNGRGEWKCERHVLQSASAGSGSFTDVRTAIYQPQTHPQPAPYGHCVTDSGVVYSVGMQWLKSQGDKQMLCTCLGNGVSCQETAVTQTYGGNSNGEPCVLPFHYNGRTFYSCTTEGRQDGHLWCSTTSNYEQDQKYSFCTDHAVLVQTRGGNSNGALCHFPFLYSNRNYSDCTSEGRRDNMKWCGTTQNYDADQKFGFCPMAAHEEICTTNEGVMYRIGDQWDKQHDLGHMMRCTCVGNGRGQWACIPYSQLRDQCIVDDITYNVNDTFHKRHEEGHMLNCTCFGQGRGRWKCDPIDRCQDSETRTFYQIGDSWEKFVHGVRYQCYCYGRGIGEWHCQPLQTYPGTTGPVQVIITETPSQPNSHPIQWNAPEPSHITKYILRWRPKTSTGRWKEATIPGHLNSYTIKGLTPGVIYEGQLISIQQYGHQEVTRFDFTTSASTPVTSNTVTGETAPFSPVVATSESVTEITASSFVVSWVSASDTVSGFRVEYELSEEGDEPQYLDLPSTATSVNIPDLLPGRKYIVNVYQISEEGKQSLILSTSQTTAPDAPPDPTVDQVDDTSIVVRWSRPQAPITGYRIVYSPSVEGSSTELNLPETANSVTLSDLQPGVQYNITIYAVEENQESTPVFIQQETTGVPRSDDVPAPKDLQFVEVTDVKVTIMWTPPNSAVTGYRVDVLPVNLPGEHGQRLPVNRNTFAEVTGLSPGVTYLFKVFAVHQGRESKPLTAQQTTKLDAPTNLQFVNETDRTVLVTWTPPRARIAGYRLTVGLTRGGQPKQYNVGPMASKYPLRNLQPGSEYTVTLMAVKGNQQSPKATGVFTTLQPLRSIPPYNTEVTETTIVITWTPAPRIGFKLGVRPSQGGEAPREVTSDSGSIVVSGLTPGVEYTYTIQVLRDGQERDAPIVNRVVTPLSPPTNLHLEANPDTGVLTVSWERSTTPDITGYRITTTPTNGQQGTALEEVVHADQSSCTFENRNPGLEYNVSVYTVKDDKESAPISDTVIPEVPQLTDLSFVDITDSSIGLRWTPLNSSTIIGYRITVVAAGEGIPIFEDFVDSSVGYYTVTGLEPGIDYDISVITLINGGESAPTTLTQQTAVPPPTDLRFTNIGPDTMRVTWAPPPSIELTNLLVRYSPVKNEEDVAELSISPSDNAVVLTNLLPGTEYLVSVSSVYEQHESIPLRGRQKTGLDSPTGFDSSDVTANSFTVHWVAPRAPITGYIIRHHAEHSAGRPRQDRVPPSRNSITLTNLNPGTEYIVTIIAVNGREESPPLIGQQSTVSDVPRDLEVIASTPTSLLISWEPPAVSVRYYRITYGETGGNSPVQEFTVPGSKSTATINNIKPGADYTITLYAVTGRGDSPASSKPVSINYQTEIDKPSQMQVTDVQDNSISVRWLPSTSPVTGYRVTTAPKNGLGPTKSQTVSPDQTEMTIEGLQPTVEYVVSVYAQNRNGESQPLVQTAVTNIDRPKGLAFTDVDVDSIKIAWESPQGQVSRYRVTYSSPEDGIHELFPAPDGDEDTAELHGLRPGSEYTVSVVALHGGMESQPLIGVQSTAIPAPTNLKFTQVSPTTLTAQWTAPSVKLTGYRVRVTPKEKTGPMKEINLSPDSTSVIVSGLMVATKYEVSVYALKDTLTSRPAQGVVTTLENVSPPRRARVTDATETTITISWRTKTETITGFQVDAIPANGQTPVQRTISPDVRSYTITGLQPGTDYKIHLYTLNDNARSSPVVIDASTAIDAPSNLRFLTTTPNSLLVSWQAPRARITGYIIKYEKPGSPPREVVPRPRPGVTEATITGLEPGTEYTIYVIALKNNQKSEPLIGRKKTDELPQLVTLPHPNLHGPEILDVPSTVQKTPFVTNPGYDTENGIQLPGTSHQQPSVGQQMIFEEHGFRRTTPPTAATPVRLRPRPYLPNVDEEVQIGHVPRGDVDYHLYPHVPGLNPNASTGQEALSQTTISWTPFQESSEYIISCQPVGTDEEPLQFQVPGTSTSATLTGLTRGVTYNIIVEALHNQRRHKVREEVVTVGNTVNEGLNQPTDDSCFDPYTVSHYAVGEEWERLSDSGFKLTCQCLGFGSGHFRCDSSKWCHDNGVNYKIGEKWDRQGENGQRMSCTCLGNGKGEFKCDPHEATCYDDGKTYHVGEQWQKEYLGAICSCTCFGGQRGWRCDNCRRPGAAEPSPDGTTGHTYNQYTQRYHQRTNTNVNCPIECFMPLDVQADRDDSRE

SEQ ID NO: 9261 - DNA, 7680 bp, Homo sapiens
  ref <308>: DATABASE ACCESSION NUMBER: EMBL / X02761
  ref <309>: DATABASE ENTRY DATE: 1999-10-01
gaagagcaagaggcaggctcagcaaatggttcagccccagtccccggtggctgtcagtcaaagcaagcccggttgttatgacaatggaaaacactatcagataaatcaacagtgggagcggacctacctaggtaatgtgttggtttgtacttgttatggaggaagccgaggttttaactgcgaaagtaaacctgaagctgaagagacttgctttgacaagtacactgggaacacttaccgagtgggtgacacttatgagcgtcctaaagactccatgatctgggactgtacctgcatcggggctgggcgagggagaataagctgtaccatcgcaaaccgctgccatgaagggggtcagtcctacaagattggtgacacctggaggagaccacatgagactggtggttacatgttagagtgtgtgtgtcttggtaatggaaaaggagaatggacctgcaagcccatagctgagaagtgttttgatcatgctgctgggacttcctatgtggtcggagaaacgtgggagaagccctaccaaggctggatgatggtagattgtacttgcctgggagaaggcagcggacgcatcacttgcacttctagaaatagatgcaacgatcaggacacaaggacatcctatagaattggagacacctggagcaagaaggataatcgaggaaacctgctccagtgcatctgcacaggcaacggccgaggagagtggaagtgtgagaggcacacctctgtgcagaccacatcgagcggatctggccccttcaccgatgttcgtgcagctgtttaccaaccgcagcctcacccccagcctcctccctatggccactgtgtcacagacagtggtgtggtctactctgtggggatgcagtggttgaagacacaaggaaataagcaaatgctttgcacgtgcctgggcaacggagtcagctgccaagagacagctgtaacccagacttacggtggcaacttaaatggagagccatgtgtcttaccattcacctacaatggcaggacgttctactcctgcaccacggaagggcgacaggacggacatctttggtgcagcacaacttcgaattatgagcaggaccagaaatactctttctgcacagaccacactgttttggttcagactcaaggaggaaattccaatggtgccttgtgccacttccccttcctatacaacaaccacaattacactgattgcacttctgagggcagaagagacaacatgaagtggtgtgggaccacacagaactatgatgccgaccagaagtttgggttctgccccatggctgcccacgaggaaatctgcacaaccaatgaaggggtcatgtaccgcattggagatcagtgggataagcagcatgacatgggtcacatgatgaggtgcacgtgtgttgggaatggtcgtggggaatggacatgcattgcctactcgcaacttcgagatcagtgcattgttgatgacatcacttacaatgtgaacgacacattccacaagcgtcatgaagaggggcacatgctgaactgtacatgcttcggtcagggtcggggcaggtggaagtgtgatcccgtcgaccaatgccaggattcagagactgggacgttttatcaaattggagattcatgggagaagtatgtgcatggtgtcagataccagtgctactgctatggccgtggcattggggagtggcattgccaacctttacagacctatccaagctcaagtggtcctgtcgaagtatttatcactgagactccgagtcagcccaactcccaccccatccagtggaatgcaccacagccatctcacatttccaagtacattctcaggtggagacctaaaaattctgtaggccgttggaaggaagctaccataccaggccacttaaactcctacaccatcaaaggcctgaagcctggtgtggtatacgagggccagctcatcagcatccagcagtacggccaccaagaagtgactcgctttgacttcaccaccaccagcaccagcacacctgtgaccagcaacaccgtgacaggagagacgactcccttttctcctcttgtggccacttctgaatctgtgaccgaaatcacagccagtagctttgtggtctcctgggtctcagcttccgacaccgtgtcgggattccgggtggaatatgagctgagtgaggagggagatgagccacagtacctggatcttccaagcacagccacttctgtgaacatccctgacctgcttcctggccgaaaatacattgtaaatgtctatcagatatctgaggatggggagcagagtttgatcctgtctacttcacaaacaacagcgcctgatgcccctcctgacccgactgtggaccaagttgatgacacctcaattgttgttcgctggagcagaccccaggctcccatcacagggtacagaatagtctattcgccatcagtagaaggtagcagcacagaactcaaccttcctgaaactgcaaactccgtcaccctcagtgacttgcaacctggtgttcagtataacatcactatctatgctgtggaagaaaatcaagaaagtacacctgttgtcattcaacaagaaaccactggcaccccacgctcagatacagtgccctctcccagggacctgcagtttgtggaagtgacagacgtgaaggtcaccatcatgtggacaccgcctgagagtgcagtgaccggctaccgtgtggatgtgatccccgtcaacctgcctggcgagcacgggcagaggctgcccatcagcaggaacacctttgcagaagtcaccgggctgtcccctggggtcacctattacttcaaagtctttgcagtgagccatgggagggagagcaagcctctgactgctcaacagacaaccaaactggatgctcccactaacctccagtttgtcaatgaaactgattctactgtcctggtgagatggactccacctcgggcccagataacaggataccgactgaccgtgggccttacccgaagaggccagcccaggcagtacaatgtgggtccctctgtctccaagtaccccctgaggaatctgcagcctgcatctgagtacaccgtatccctcgtggccataaagggcaaccaagagagccccaaagccactggagtctttaccacactgcagcctgggagctctattccaccttacaacaccgaggtgactgagaccaccatcgtgatcacatggacgcctgctccaagaattggttttaagctgggtgtacgaccaagccagggaggagaggcaccacgagaagtgacttcagactcaggaagcatcgttgtgtccggcttgactccaggagtagaatacgtctacaccatccaagtcctgagagatggacaggaaagagatgcgccaattgtaaacaaagtggtgacaccattgtctccaccaacaaacttgcatctggaggcaaaccctgacactggagtgctcacagtctcctgggagaggagcaccaccccagacattactggttatagaattaccacaacccctacaaacggccagcagggaaattctttggaagaagtggtccatgctgatcagagctcctgcacttttgataacctgagtcccggcctggagtacaatgtcagtgtttacactgtcaaggatgacaaggaaagtgtccctatctctgataccatcatcccagctgttcctcctcccactgacctgcgattcaccaacattggtccagacaccatgcgtgtcacctgggctccacccccatccattgatttaaccaacttcctggtgcgttactcacctgtgaaaaatgaggaagatgttgcagagttgtcaatttctccttcagacaatgcagtggtcttaacaaatctcctgcctggtacagaatatgtagtgagtgtctccagtgtctacgaacaacatgagagcacacctcttagaggaagacagaaaacaggtcttgattccccaactggcattgacttttctgatattactgccaactcttttactgtgcactggattgctcctcgagccaccatcactggctacaggatccgccatcatcccgagcacttcagtgggagacctcgagaagatcgggtgccccactctcggaattccatcaccctcaccaacctcactccaggcacagagtatgtggtcagcatcgttgctcttaatggcagagaggaaagtcccttattgattggccaacaatcaacagtttctgatgttccgagggacctggaagttgttgctgcgacccccaccagcctactgatcagctgggatgctcctgctgtcacagtgagatattacaggatcacttacggagaaacaggaggaaatagccctgtccaggagttcactgtgcctgggagcaagtctacagctaccatcagcggccttaaacctggagttgattataccatcactgtgtatgctgtcactggccgtggagacagccccgcaagcagcaagccaatttccattaattaccgaacagaaattgacaaaccatcccagatgcaagtgaccgatgttcaggacaacagcattagtgtcaagtggctgccttcaagttcccctgttactggttacagagtaaccaccactcccaaaaatggaccaggaccaacaaaaactaaaactgcaggtccagatcaaacagaaatgactattgaaggcttgcagcccacagtggagtatgtggttagtgtctatgctcagaatccaagcggagagagtcagcctctggttcagactgcagtaaccaacattgatcgccctaaaggactggcattcactgatgtggatgtcgattccatcaaaattgcttgggaaagcccacaggggcaagtttccaggtacagggtgacctactcgagccctgaggatggaatccatgagctattccctgcacctgatggtgaagaagacactgcagagctgcaaggcctcagaccgggttctgagtacacagtcagtgtggttgccttgcacgatgatatggagagccagcccctgattggaacccagtccacagctattcctgcaccaactgacctgaagttcactcaggtcacacccacaagcctgagcgcccagtggacaccacccaatgttcagctcactggatatcgagtgcgggtgacccccaaggagaagaccggaccaatgaaagaaatcaaccttgctcctgacagctcatccgtggttgtatcaggacttatggtggccaccaaatatgaagtgagtgtctatgctcttaaggacactttgacaagcagaccagctcagggtgttgtcaccactctggagaatgtcagcccaccaagaagggctcgtgtgacagatgctactgagaccaccatcaccattagctggagaaccaagactgagacgatcactggcttccaagttgatgccgttccagccaatggccagactccaatccagagaaccatcaagccagatgtcagaagctacaccatcacaggtttacaaccaggcactgactacaagatctacctgtacaccttgaatgacaatgctcggagctcccctgtggtcatcgacgcctccactgccattgatgcaccatccaacctgcgtttcctggccaccacacccaattccttgctggtatcatggcagccgccacgtgccaggattaccggctacatcatcaagtatgagaagcctgggtctcctcccagagaagtggtccctcggccccgccctggtgtcacagaggctactattactggcctggaaccgggaaccgaatatacaatttatgtcattgccctgaagaataatcagaagagcgagcccctgattggaaggaaaaagacagacgagcttccccaactggtaacccttccacaccccaatcttcatggaccagagatcttggatgttccttccacagttcaaaagacccctttcgtcacccaccctgggtatgacactggaaatggtattcagcttcctggcacttctggtcagcaacccagtgttgggcaacaaatgatctttgaggaacatggttttaggcggaccacaccgcccacaacggccacccccataaggcataggccaagaccatacccgccgaatgtaggacaagaagctctctctcagacaaccatctcatgggccccattccaggacacttctgagtacatcatttcatgtcatcctgttggcactgatgaagaacccttacagttcagggttcctggaacttctaccagtgccactctgacaggcctcaccagaggtgccacctacaacatcatagtggaggcactgaaagaccagcagaggcataaggttcgggaagaggttgttaccgtgggcaactctgtcaacgaaggcttgaaccaacctacggatgactcgtgctttgacccctacacagtttcccattatgccgttggagatgagtgggaacgaatgtctgaatcaggctttaaactgttgtgccagtgcttaggctttggaagtggtcatttcagatgtgattcatctagatggtgccatgacaatggtgtgaactacaagattggagagaagtgggaccgtcagggagaaaatggccagatgatgagctgcacatgtcttgggaacggaaaaggagaattcaagtgtgaccctcatgaggcaacgtgttacgatgatgggaagacataccacgtaggagaacagtggcagaaggaatatctcggtgccatttgctcctgcacatgctttggaggccagcggggctggcgctgtgacaactgccgcagacctgggggtgaacccagtcccgaaggcactactggccagtcctacaaccagtattctcagagataccatcagagaacaaacactaatgttaattgcccaattgagtgcttcatgcctttagatgtacaggctgacagagaagattcccgagagtaaatcatctttccaatccagaggaacaagcatgtctctctgccaagatccatctaaactggagtgatgttagcagacccagcttagagttcttctttctttcttaagccctttgctctggaggaagttctccagcttcagctcaactcacagcttctccaagcatcaccctgggagtttcctgagggttttctcataaatgagggctgcacattgcctgttctgcttcgaagtattcaataccgctcagtattttaaatgaagtgattctaagatttggtttgggatcaataggaaagcatatgcagccaaccaagatgcaaatgttttgaaatgatatgaccaaaattttaagtaggaaagtcacccaaacacttctgctttcacttaagtgtctggcccgcaatactgtaggaacaagcatgatcttgttactgtgatattttaaatatccacagtactcactttttccaaatgatcctagtaattgcctagaaatatctttctcttacctgttatttatcaatttttcccagtatttttatacggaaaaaattgtattgaaaacacttagtatgcagttgataagaggaatttggtataattatggtgggtgattattttttatactgtatgtgccaaagctttactactgtggaaagacaactgttttaataaaagatttacattccaca

SEQ ID NO: 9262 - protein, 2386 aa, Homo sapiens
  ref <308>: DATABASE ACCESSION NUMBER: SWISS-Prot / P02751
  ref <309>: DATABASE ENTRY DATE: 2002-06-15
MLRGPGPGLLLLAVQCLGTAVPSTGASKSKRQAQQMVQPQSPVAVSQSKPGCYDNGKHYQINQQWERTYLGNALVCTCYGGSRGFNCESKPEAEETCFDKYTGNTYRVGDTYERPKDSMIWDCTCIGAGRGRISCTIANRCHEGGQSYKIGDTWRRPHETGGYMLECVCLGNGKGEWTCKPIAEKCFDHAAGTSYVVGETWEKPYQGWMMVDCTCLGEGSGRITCTSRNRCNDQDTRTSYRIGDTWSKKDNRGNLLQCICTGNGRGEWKCERHTSVQTTSSGSGPFTDVRAAVYQPQPHPQPPPYGHCVTDSGVVYSVGMQWLKTQGNKQMLCTCLGNGVSCQETAVTQTYGGNSNGEPCVLPFTYNGRTFYSCTTEGRQDGHLWCSTTSNYEQDQKYSFCTDHTVLVQTQGGNSNGALCHFPFLYNNHNYTDCTSEGRRDNMKWCGTTQNYDADQKFGFCPMAAHEEICTTNEGVMYRIGDQWDKQHDMGHMMRCTCVGNGRGEWTCIAYSQLRDQCIVDDITYNVNDTFHKRHEEGHMLNCTCFGQGRGRWKCDPVDQCQDSETGTFYQIGDSWEKYVHGVRYQCYCYGRGIGEWHCQPLQTYPSSSGPVEVFITETPSQPNSHPIQWNAPQPSHISKYILRWRPKNSVGRWKEATIPGHLNSYTIKGLKPGVVYEGQLISIQQYGHQEVTRFDFTTTSTSTPVTSNTVTGETTPFSPLVATSESVTEITASSFVVSWVSASDTVSGFRVEYELSEEGDEPQYLDLPSTATSVNIPDLLPGRKYIVNVYQISEDGEQSLILSTSQTTAPDAPPDPTVDQVDDTSIVVRWSRPQAPITGYRIVYSPSVEGSSTELNLPETANSVTLSDLQPGVQYNITIYAVEENQESTPVVIQQETTGTPRSDTVPSPRDLQFVEVTDVKVTIMWTPPESAVTGYRVDVIPVNLPGEHGQRLPISRNTFAEVTGLSPGVTYYFKVFAVSHGRESKPLTAQQTTKLDAPTNLQFVNETDSTVLVRWTPPRAQITGYRLTVGLTRRGQPRQYNVGPSVSKYPLRNLQPASEYTVSLVAIKGNQESPKATGVFTTLQPGSSIPPYNTEVTETTIVITWTPAPRIGFKLGVRPSQGGEAPREVTSDSGSIVVSGLTPGVEYVYTIQVLRDGQERDAPIVNKVVTPLSPPTNLHLEANPDTGVLTVSWERSTTPDITGYRITTTPTNGQQGNSLEEVVHADQSSCTFDNLSPGLEYNVSVYTVKDDKESVPISDTIIPAVPPPTDLRFTNIGPDTMRVTWAPPPSIDLTNFLVRYSPVKNEEDVAELSISPSDNAVVLTNLLPGTEYVVSVSSVYEQHESTPLRGRQKTGLDSPTGIDFSDITANSFTVHWIAPRATITGYRIRHHPEHFSGRPREDRVPHSRNSITLTNLTPGTEYVVSIVALNGREESPLLIGQQSTVSDVPRDLEVVAATPTSLLISWDAPAVTVRYYRITYGETGGNSPVQEFTVPGSKSTATISGLKPGVDYTITVYAVTGRGDSPASSKPISINYRTEIDKPSQMQVTDVQDNSISVKWLPSSSPVTGYRVTTTPKNGPGPTKTKTAGPDQTEMTIEGLQPTVEYVVSVYAQNPSGESQPLVQTAVTNIDRPKGLAFTDVDVDSIKIAWESPQGQVSRYRVTYSSPEDGIHELFPAPDGEEDTAELQGLRPGSEYTVSVVALHDDMESQPLIGTQSTAIPAPTDLKFTQVTPTSLSAQWTPPNVQLTGYRVRVTPKEKTGPMKEINLAPDSSSVVVSGLMVATKYEVSVYALKDTLTSRPAQGVVTTLENVSPPRRARVTDATETTITISWRTKTETITGFQVDAVPANGQTPIQRTIKPDVRSYTITGLQPGTDYKIYLYTLNDNARSSPVVIDASTAIDAPSNLRFLATTPNSLLVSWQPPRARITGYIIKYEKPGSPPREVVPRPRPGVTEATITGLEPGTEYTIYVIALKNNQKSEPLIGRKKTDELPQLVTLPHPNLHGPEILDVPSTVQKTPFVTHPGYDTGNGIQLPGTSGQQPSVGQQMIFEEHGFRRTTPPTTATPIRHRPRPYPPNVGEEIQIGHIPREDVDYHLYPHGPGLNPNASTGQEALSQTTISWAPFQDTSEYIISCHPVGTDEEPLQFRVPGTSTSATLTGLTRGATYNIIVEALKDQQRHKVREEVVTVGNSVNEGLNQPTDDSCFDPYTVSHYAVGDEWERMSESGFKLLCQCLGFGSGHFRCDSSRWCHDNGVNYKIGEKWDRQGENGQMMSCTCLGNGKGEFKCDPHEATCYDDGKTYHVGEQWQKEYLGAICSCTCFGGQRGWRCDNCRRPGGEPSPEGTTGQSYNQYSQRYHQRTNTNVNCPIECFMPLDVQADREDSRE

SEQ ID NO: 9263 - DNA, 988 bp, Rattus norvegicus
  ref <308>: DATABASE ACCESSION NUMBER: EMBL / X06150
  ref <309>: DATABASE ENTRY DATE: 1999-02-10
caggatggtggacagcgtgtaccgtacccgctccctgggggtggcggccgaagggatccccgaccagtatgcggatggggaggccgcacgtgtgtggcagctgtacatcggggacacccgcagccgtactgcagagtacaaggcgtggttgcttgggctgctgcgccagcacgggtgccaccgggtgctggacgtggcctgtggcacaggagtggactcgattatgctggtggaagagggctttagcgtcacgagtgtggatgccagcgacaagatgctgaaatacgcactgaaggagcgctggaaccggaggaaggagccagcctttgacaagtgggtcattgaagaagccaactggttgactctggacaaagatgtgccagcaggagatggctttgacgctgtcatctgccttgggaacagttttgctcacctgccggacagcaaaggtgaccagagtgagcaccggctggcgctaaagaacatcgcaagcatggtgcggcccgggggcctgctggtcatcgaccaccgcaactacgactacatcctcagcacgggctgtgcacccccagggaagaacatctactataagagtgacctgaccaaggacattacgacgtcagtgctgacagtaaacaacaaagcccacatggtaaccctggactacacagtgcaggtgccaggtgctggcagagatggcgctcctggcttcagtaagtttcggctctcttactacccacactgtttggcgtctttcacggagttggtccaagaagcctttgggggcaggtgccagcacagcgtcctgggtgacttcaagccttacaggcccggccaggcctacgttccctgctacttcatccacgtgctcaagaagacaggctgagcctggctccggctcccaccctaagaccatcgcctaccacagatattgcagagatgtggggggcaggcaaacagggagtcgacaatacagccttcccttgcc

SEQ ID NO: 9264 - protein, 292 aa, Rattus norvegicus
  ref <308>: DATABASE ACCESSION NUMBER: SWISS-Prot / P13255
  ref <309>: DATABASE ENTRY DATE: 2002-06-15
VDSVYRTRSLGVAAEGIPDQYADGEAARVWQLYIGDTRSRTAEYKAWLLGLLRQHGCHRVLDVACGTGVDSIMLVEEGFSVTSVDASDKMLKYALKERWNRRKEPAFDKWVIEEANWLTLDKDVPAGDGFDAVICLGNSFAHLPDSKGDQSEHRLALKNIASMVRPGGLLVIDHRNYDYILSTGCAPPGKNIYYKSDLTKDITTSVLTVNNKAHMVTLDYTVQVPGAGRDGAPGFSKFRLSYYPHCLASFTELVQEAFGGRCQHSVLGDFKPYRPGQAYVPCYFIHVLKKTG

SEQ ID NO: 9265 - DNA, 744 bp, Homo sapiens
  ref <308>: DATABASE ACCESSION NUMBER: EMBL / BG820239
  ref <309>: DATABASE ENTRY DATE: 2001-05-30
cacgcgtcgccacgcgtcggccttctgcggctggcagatttgacaagctggtgtttgtgggggcaaatgaggaccgggcctcccagctacgcgttctaagtgccatcacacgcaaattcaagctagagccatctgtgagcctggtaaacgtgctagattgctgccctccccagctgacgggcgcggacctctactctctctgctctgatgctatgacagctgccctcaaacgcagggttcatgacctggaggaagggctggaacaaggtagctcagcactgatgctcaccatggaggacttgctgcaggctgccgccggctgcaaccctcagtcagtgagcaggagctgctccggtacaagcgcatccagcgcaagtttgctgcctgctaggagccccccaggtctgggaccccgtcagcatggctgcaggaaaacacaacatccacccccgcccccacttaaaggagccccaggcagaatgaacagtgttcctggtgactgggctgggggagcctggctagacctgcataccccacttgtcgaaggcgggctcgtgccgccggttccagcgctccttaagtgcatacttcagcatcttgtcactggcatccacactcgtcacactgaagccctcttccaccagcataatggagtccaccctgagtacggcagcgaggagaggcagagagaggcagttaggggagcctgggagggcaggaggagacctgcattggaaacttttg

SEQ ID NO: 9266 - protein, 980 aa, Homo sapiens
  ref <308>: DATABASE ACCESSION NUMBER: SWISS-Prot / Q13608
  ref <309>: DATABASE ENTRY DATE: 2001-10-16
MALAVLRVLEPFPTETPPLAVLLPPGGPWPAAELGLVLALRPAGESPAGPALLVAALEGPDAGTEEQGPGPPQLLVSRALLRLLALGSGAWVRARAVRRPPALGWALLGTSLGPGLGPRVGPLLVRRGETLPVPGPRVLETRPALQGLLGPGTRLAVTELRGRARLCPESGDSSRPPPPPVVSSFAVSGTVRRLQGVLGGTGDSLGVSRSCLRGLGLFQGEWVWVAQARESSNTSQPHLARVQVLEPRWDLSDRLGPGSGPLGEPLADGLALVPATLAFNLGCDPLEMGELRIQRYLEGSIAPEDKGSCSLLPGPPFARELHIEIVSSPHYSTNGNYDGVLYRHFQIPRVVQEGDVLCVPTIGQVEILEGSPEKLPRWREMFFKVKKTVGEAPDGPASAYLADTTHTSLYMVGSTLSPVPWLPSEESTLWSSLSPPGLEALVSELCAVLKPRLQPGGALLTGTSSVLLRGPPGCGKTTVVAAACSHLGLHLLKVPCSSLCAESSGAVETKLQAIFSRARRCRPAVLLLTAVDLLGRDRDGLGEDARVMAVLRHLLLNEDPLNSCPPLMVVATTSRAQDLPADVQTAFPHELEVPALSEGQRLSILRALTAHLPLGQEVNLAQLARRCAGFVVGDLYALLTHSSRAACTRIKNSGLAGGLTEEDEGELCAAGFPLLAEDFGQALEQLQTAHSQAVGAPKIPSVSWHDVGGLQEVKKEILETIQLPLEHPELLSLGLRRSGLLLHGPPGTGKTLLAKAVATECSLTFLSVKGPELINMYVGQSEENVREVFARARAAAPCIIFFDELDSLAPSRGRSGDSGGVMDRVVSQLLAELDGLHSTQDVFVIGATNRPDLLDPALLRPGRFDKLVFVGANEDRASQLRVLSAITRKFKLEPSVSLVNVLDCCPPQLTGADLYSLCSDAMTAALKRRVHDLEEGLEPGSSALMLTMEDLLQAAARLQPSVSEQELLRYKRIQRKFAAC

SEQ ID NO: 9267 - DNA, 3170 bp, Rattus norvegicus
  ref <308>: DATABASE ACCESSION NUMBER: EMBL / X06564
  ref <309>: DATABASE ENTRY DATE: 1995-04-03
ctgaggctggggctgtcactcattctccgctcagcggtgaacgcagctcggcagtggctggcaagaaacaattctgcaaaaataatcatatccagcctggcaattgtctgctcctcggtccattgctccgccgccgtccacagtcgcttgcaagggaaggcactgaatttaccgcggccagaacatccctcccagccggcagtttacaatgctgcgaactaaggatctcatctggactttgtttttcctgggaactgcagtttccctgcaggtagatattgttcccagccaaggagaaatcagcgttggagagtccaaattcttcctgtgtcaagtggcaggagatgccaaagataaggacatctcctggttctcccccaacggggagaaactgagcccaaaccagcagcggatctcagtggtgtggaacgatgatgactcctctaccctcaccatctacaacgccaacattgatgatgccggcatttacaagtgcgtggtcaccgctgaagacggcacccagtccgaggccactgtcaatgtgaagatcttccagaagctcatgttcaagaatgcgccaaccccacaggagtttaaggaaggggaagatgctgtgattgtctgtgatgtggtcagctctctgcccccaaccatcatctggaaacacaaaggccgagatgtcatcctgaaaaaagatgtccggttcatagtcctatccaacaactacctgcagatccgaggcatcaagaaaacagatgagggcacttaccgctgtgaaggcaggatcctggcccggggggagatcaacttcaaggacattcaggtcattgtgaatgtaccacccactgtccaggccagacagagcatcgtgaatgccactgccaacctgggccagtctgtcaccctggtgtgtgatgccgatggcttcccagagcccaccatgagctggacaaaggatggggaacccatagagaatgaggaggaagatgacgagaagcacatcttcagtgacgacagttcggagctgaccatcaggaatgtggacaaaaatgacgaagccgaatacgtctgcatcgctgagaacaaggctggcgagcaggatgcctccatccacctcaaggtcttcgcaaagcccaaaatcacctatgtagagaatcagacagccatggaactagaggagcaagtcactctgacatgtgaagcctccggagaccccattccttccatcacctggagaacgtccacccgaaacatcagcagtgaagaaaaggcatcgtggactcgaccagagaagcaagagactctagatgggcacatggtggtacgcagccatgctcgtgtgtcctccctgaccctgaagagcatccagtacacagatgctggagaatacatctgcactgccagcaacaccatcggccaggactcccagtccatgtaccttgaagttcaatatgctcccaagctccagggccctgtagctgtgtacacttgggaagggaaccaggtgaacatcacctgtgaggtctttgcctacccaagtgccacaatctcctggttccgagatggccagttgctgccaagctccaactacagcaatatcaagatctacaacaccccatctgcgagctatctggaggtaacccctgattccgaaaatgactttggaaactacaactgcacagcggtgaaccgtattggacaggagtccttggaattcatcctggttcaagcagatacaccatcttccccatccatcgaccgggtggaaccatactccagcacagcacaggtacaatttgatgagccagaagccacaggtggagttcccatcctcaaatacaaggctgagtggaagtcgctgggtgaagaagcatggcattccaagtggtatgatgccaaagaagccaacatggaagggattgtcaccatcatgggcctgaagcctgagacaaggtacgcggtacgactggcggccctcaacggcaaggggctgggcgagatcagtgcagccactgagttcaagacacagccagtccgggaacccagcgcacccaagctggaagggcagatgggagaggacgggaactccatcaaggtgaacctgatcaagcaggatgacggcggctcccccatcagacactatctggtcaagtacagagcgctcgcctccgagtggaaaccagagatcaggctcccgtccggcagtgaccacgtcatgctcaagtccctagactggaacgccgagtacgaagtatatgtggtagctgagaaccagcaaggaaaatccaaggcagctcacttcgtgttcaggacttcagcccagcccacggccatcccagccaatggcagccccactgcaggcctgagcacaggcgccattgtgggcatcctcattgtcattttcgtcctactcctggtggtcatggacatcacctgctacttcctgaacaagtgtggcctgctcatgtgcatcgctgttaacctgtgcggcaaagcggggcccggagccaagggcaaagacatggaggagggcaaggctgctttctcgaaagatgagtctaaagaacccattgtagaggtccgaacggaggaggaacggactccaaaccatgacggagggaagcacacagagcccaacgagaccacaccactgacagagcccgagaagggtcctgtagaaacaaagtccgagccccaggagtcagaagcaaagccagcgccaactgaagtcaagacggtccccaatgaagccacacaaacgaaagagaatgagagcaaagcatgatgggtaccagcaaaaagcaaagatcaaaataacaaattgacacagcggcttcaccagagcatccccaaataaccccccccccctctctctctctctcacacacacacacacacacacacacacacacacacacacacactcactcctctagtgtcttttgccttttaaaaaaacaacaaaaaacagataaacatgggattgcctttttgtaggtttctagaaagggctcctttgttgcacactcacttgttaagaaaaaaaaagagacaaaaaggttaaacccacagccaaactaggacactccgttccctgaaaccatttaaaaatcaaacaaaagggccccaaattaagaatctaggaagctcagactgaagagaaaaacaag

SEQ ID NO: 9268 - protein, 858 aa, Rattus norvegicus
  ref <308>: DATABASE ACCESSION NUMBER: SWISS-Prot / P13596
  ref <309>: DATABASE ENTRY DATE: 2002-06-15
MLRTKDLIWTLFFLGTAVSLQVDIVPSQGEISVGESKFFLCQVAGDAKDKDISWFSPNGEKLSPNQQRISVVWNDDDSSTLTIYNANIDDAGIYKCVVTAEDGTQSEATVNVKIFQKLMFKNAPTPQEFKEGEDAVIVCDVVSSLPPTIIWKHKGRDVILKKDVRFIVLSNNYLQIRGIKKTDEGTYRCEGRILARGEINFKDIQVIVNVPPTVQARQSIVNATANLGQSVTLVCDADGFPEPTMSWTKDGEPIENEEEDDEKHIFSDDSSELTIRNVDKNDEAEYVCIAENKAGEQDASIHLKVFAKPKITYVENQTAMELEEQVTLTCEASGDPIPSITWRTSTRNISSEEKASWTRPEKQETLDGHMVVRSHARVSSLTLKSIQYTDAGEYICTASNTIGQDSQSMYLEVQYAPKLQGPVAVYTWEGNQVNITCEVFAYPSATISWFRDGQLLPSSNYSNIKIYNTPSASYLEVTPDSENDFGNYNCTAVNRIGQESLEFILVQADTPSSPSIDRVEPYSSTAQVQFDEPEATGGVPILKYKAEWKSLGEEAWHSKWYDAKEANMEGIVTIMGLKPETRYAVRLAALNGKGLGEISAATEFKTQPVREPSAPKLEGQMGEDGNSIKVNLIKQDDGGSPIRHYLVKYRALASEWKPEIRLPSGSDHVMLKSLDWNAEYEVYVVAENQQGKSKAAHFVFRTSAQPTAIPANGSPTAGLSTGAIVGILIVIFVLLLVVMDITCYFLNKCGLLMCIAVNLCGKAGPGAKGKDMEEGKAAFSKDESKEPIVEVRTEEERTPNHDGGKHTEPNETTPLTEPEKGPVETKSEPQESEAKPAPTEVKTVPNEATQTKENESKA

SEQ ID NO: 9269 - DNA, 2633 bp, Homo sapiens
  ref <308>: DATABASE ACCESSION NUMBER: EMBL / U63041
  ref <309>: DATABASE ENTRY DATE: 1999-07-02
ccgcggcaagaacatccctcccagccagcagattacaatgctgcaaactaaggatctcatctggactttgtttttcctgggaactgcagtttctctgcaggtggatattgttcccagccagggggagatcagcgttggagagtccaaattcttcttatgccaagtggcaggagatgccaaagataaagacatctcctggttctcccccaatggagaaaagctcaccccaaaccagcagcggatctcagtggtgtggaatgatgattcctcctccaccctcaccatctataacgccaacatcgacgacgccggcatttacaagtgtgtggttacaggcgaggatggcagtgagtcagaggccaccgtcaacgtgaagatctttcagaagctcatgttcaagaatgcgccaaccccacaggagttccgggagggggaagatgccgtgattgtgtgtgatgtggtcagctccctcccaccaaccatcatctggaaacacaaaggccgagatgtcatcctgaaaaaagatgtccgattcatagtcctgtccaacaactacctgcagatccggggcatcaagaaaacagatgagggcacttatcgctgtgagggcagaatcctggcacggggggagatcaacttcaaggacattcaggtcattgtgaatgtgccacctaccatccgggccaggcagaatattgtgaatgccaccgccaacctcggccagtccgtcaccctggtgtgcgatgccgaacggttcccagagcccaccatgagctggacaaaggatggggaacagatagagcaagaggaagacgatgagaagtacatcttcagcgacgatagttcccagctgaccatcaaaaaggtggataagaacgacgaggctgagtacatctgcattgctgagaacaaggctggcgagcaggatgcgaccatccacctcaaagtctttgcaaaacccaaaatcacatatgtagagaaccagactgccatggaattagaggagcaggtcactcttacctgtgaagcctccggagaccccattccctccatcacctggaggacttctacccggaacatcagcagcgaagaaaagactctggatgggcacatggtggtgcgtagccatgcccgtgtgtcgtcgctgaccctgaagagcatccagtacactgatgccggagagtacatctgcaccgccagcaacaccatcggccaggactcccagtccatgtaccttgaagtgcaatatgccccaaagctacagggccctgtggctgtgtacacttgggaggggaaccaggtgaacatcacctgcgaggtatttgcctatcccagtgccacgatctcatggtttcgggatggccagctgctgccaagctccaattacagcaatatcaagatctacaacaccccctctgccagctatctggaggtgaccccagactctgagaatgattttgggaactacaactgtactgcagtgaaccgcattgggcaggagtccttcgaattcatccttgttcaagcagacaccccctcttcaccatccatcgaccaggtggagccatactccagcacagcccaggtgcagtttgatgaaccagaggccacaggtggggtgcccatcctcaaatacaaagctgagtggagagcagtgggtgaagaagtatggcattccaagtggtatgatgccaaggaagccagcatggagggcatcgtcaccatcgtgggcctgaagcccgaaacaacgtacgccgtaaggctggcggcgctcaatggcaaagggctgggtgagatcagcgcggcctccgagttcaagacgcagccagtccaaggggaacccagtgcacctaagctcgaagggcagatgggagaggatggaaactctattaaagtgaacctgatcaagcaggatgacggcggctcccccatcagacactatctggtcaggtaccgagcgctctcctccgagtggaaaccagagatcaggctcccgtctggcagtgaccacgtcatgctgaagtccctggactggaatgctgagtatgaggtctacgtggtggctgagaaccagcaaggaaaatccaaggcggctcattttgtgttcaggacctcggcccagcccacagccatcccagccaacggcagccccacctcaggcctgagcaccggggccatcgtgggcatcctcatcgtcatcttcgtcctgctcctggtggttgtggacatcacctgctacttcctgaacaagtgtggcctgttcatgtgcattgcggtcaacctgtgtggaaaagccgggcccggggccaagggcaaggacatggaggagggcaaggccgccttctcgaaagatgagtccaaggagcccatcgtggaggttcgaacggaggaggagaggaccccaaaccatgatggagggaaacacacagagcccaacgagaccacgccactgacggagcccgagaagggccccgtagaagcaaagccagagtgccaggagacagaaacgaagccagcgccagccgaagtcaagacggtccccaatgacgccacacagacaaaggagaacgagagcaaagcatgatgggtgaagagaaccgagcaaagatcaaaataaaaagtgacacagcagc

SEQ ID NO: 9270 - protein, 761 aa, Homo sapiens
  ref <308>: DATABASE ACCESSION NUMBER: SWISS-Prot / P13592
  ref <309>: DATABASE ENTRY DATE: 2002-06-15
MLQTKDLIWTLFFLGTAVSLQVDIVPSQGEISVGESKFFLCQVAGDAKDKDISWFSPNGEKLTPNQQRISVVWNDDSSSTLTIYNANIDDAGIYKCVVTGEDGSESEATVNVKIFQKLMFKNAPTPQEFREGEDAVIVCDVVSSLPPTIIWKHKGRDVILKKDVRFIVLSNNYLQIRGIKKTDEGTYRCEGRILARGEINFKDIQVIVNVPPTIQARQNIVNATANLGQSVTLVCDAEGFPEPTMSWTKDGEQIEQEEDDEKYIFSDDSSQLTIKKVDKNDEAEYICIAENKAGEQDATIHLKVFAKPKITYVENQTAMELEEQVTLTCEASGDPIPSITWRTSTRNISSEEKTLDGHMVVRSHARVSSLTLKSIQYTDAGEYICTASNTIGQDSQSMYLEVQYAPKLQGPVAVYTWEGNQVNITCEVFAYPSATISWFRDGQLLPSSNYSNIKIYNTPSASYLEVTPDSENDFGNYNCTAVNRIGQESLEFILVQADTPSSPSIDQVEPYSSTAQVQFDEPEATGGVPILKYKAEWRAVGEEVWHSKWYDAKEASMEGIVTIVGLKPETTYAVRLAALNGKGLGEISAASEFKTQPVHSPPPPASASSSTPVPLSPPDTTWPLPALATTEPAKGEPSAPKLEGQMGEDGNSIKVNLIKQDDGGSPIRHYLVRYRALSSEWKPEIRLPSGSDHVMLKSLDWNAEYEVYVVAENQQGKSKAAHFVFRTSAQPTAIPATLGGNSASYTFVSLLFSAVTLLLLC

SEQ ID NO: 9271 - DNA, 2310 bp, Rattus norvegicus
  ref <308>: DATABASE ACCESSION NUMBER: EMBL / X06655
  ref <309>: DATABASE ENTRY DATE: 1995-07-13
aattcggagttccgggtggtcaaggagccccttggcttcgtgaaggtgctgcagtgggtctttgccatcttcgcctttgctacgtgtggcagctacaccggggagcttcggctgagcgtggagtgtgccaacaagacggagagtgccctcaacatcgaagttgaattcgagtaccccttcaggctgcaccaagtgtactttgatgcaccctcctgcgtcaaagggggcactaccaagatcttcctggttggggactactcctcgtcggctgaattctttgtcaccgtggctgtgtttgccttcctctactccatgggggccctggccacctacatcttcctgcagaacaagtaccgagagaacaacaaagggcctatgatggactttctggctacagccgtgttcgctttcatgtggctagttagttcatcagcctgggccaaaggcctgtccgatgtgaagatggccacggacccagagaacattatcaaggagatgcccatgtgccgccagacagggaacacatgcaaggaactgagggaccctgtgacttcaggactcaacacctcagtggtgtttggcttcctgaacctggtgctctgggttggcaacttatggttcgtgttcaaggagacaggctgggcagccccattcatgcgcgcacctccaggcgccccggaaaagcaaccagcacctggcgatgcctacggcgatgcgggctacgggcagggccccggaggctatgggccccaggactcctacgggcctcagggtggttatcaacccgattacgggcagccagccagcggtggcggtggctacgggcctcagggcgactatgggcagcaaggctatggccaacagggtgcgcccacctccttctccaatcagatgtaatctggtcagtgaagtccatgaagatcccacgggtgggcaatagctcaagagaaggcctgccccccttttcccatccccatatcctaggtctccacccctcaacccaggagaccctaactgtctttgctgtttatatatatatatattatatataaatatctatttatctgtctgagccctacattcacccacttctccatgcactagaggcccagtcctgaatgggctcctccccaaccctgaccttgcattcctcagcccctatctgttccccagccctgtcccttgaggtaaggggctctagaaaggggacaggaagggaaccagaccttggctgcatggagtgggttggtgtgactttctctccttcctcctctccctctgcccctcctaactctggccttggtcctccagcatcacctgaacttcagaagctctcgaatggaaatctgaccccaagagtagagcagtagactgagtggaggaggcttgggtgaaacgggcagagaggagataacctctgtagagagaggactagtcagccaagagttgaattccagacatactggatgtgcagtctaaaaggaaagtggtatcctaccgcattctgcaatggggctttaagtgaccagagagagtggttctaggaggggtgtggcttaaacacagcgggctccagagtgggcaggtttgggttggatccagcatctctagaaggggtgtgtcttggaacattcaggagtttgagcttgattccaaagagcttgagcaagggtagaagtgggttcagggatgatctaagcttgagatgaggtcctgcttaggattccagacaagcatatgaagagatgtgtggtggtctcagaagaggaaacccattctgtaatggggcagagaagaaaacacgttttcaattgagtggagtttgagggggtgcaggaggccatggttaggagctatgaggtgagttttgctaaaagcaggagggcgtactcctggcccctgcgaattgaggtaatgtggggaaagccaagtattgtggtttggattgtgaacaaaatgtcccttgcggactccctcaagagacagctagatcatcagaagacagagtctgcaggtctgtagggctggtctaccttctcccccctttctctgccctctccctccacactcccgtctgtcccggaatacttggaggctgggtctggagccccgatcctgtaccctctgctgtgtctgtgatgttggtagtgcctgtgatcgtgtgttgccattttgtctgactgtggtccctccctcttccctccagaccccctactttcctgtgcccttcggtattgtttgaagaccccctccccgaggaagagcaaatatgagaaattcccctcccccaaataaactcctcaactacct

SEQ ID NO: 9272 - protein, 307 aa, Rattus norvegicus
  ref <308>: DATABASE ACCESSION NUMBER: SWISS-Prot / P07825
  ref <309>: DATABASE ENTRY DATE: 1998-07-15
MDVVNQLVAGGQFRVVKEPLGFVKVLQWVFAIFAFATCGSYTGELRLSVECANKTESALNIEVEFEYPFRLHQVYFDAPSCVKGGTTKIFLVGDYSSSAEFFVTVAVFAFLYSMGALATYIFLQNKYRENNKGPMMDFLATAVFAFMWLVSSSAWAKGLSDVKMATDPENIIKEMPMCRQTGNTCKELRDPVTSGLNTSVVFGFLNLVLWVGNLWFVFKETGWAAPFMRAPPGAPEKQPAPGDAYGDAGYGQGPGGYGPQDSYGPQGGYQPDYGQPASGGGGYGPQGDYGQQGYGQQGAPTSFSNQM

SEQ ID NO: 9273 - DNA, 31737 bp, Homo sapiens
  ref <308>: DATABASE ACCESSION NUMBER: EMBL / AF196779
  ref <309>: DATABASE ENTRY DATE: 1999-11-04
gatcaggactcctcttccatgctgaagctgctgcggcggctgctggccttggagacagcaggggacactgaagagagcaggggatcggaggcagcccgcagtggggacagggcaccccccgacagtcctcccaccaccccctcctcctcctccatcagaatgtcctccagccccaggtggaaggggtctcccaggtcccccaggtggtcgctgggaaagtgcaggtccagaagggcatctgagggcggtgcagggggctgctgatggggagcattctgggcaggtcccccccctacatggaacgttgctgcgcctggcctgccctcctcctcaatgtccagctgctctggcttgaggctgtcagaagccgaagtcgtggccaaggaaagcagccctggagtgggaggtactggcaggccatggatctgggcctgcagttctagttcctgtaaaaaataggggttgggtgcaggataagtagggttcagagtccctcagaggcagaggagtataaaggttgaaaagggtaggttccctgggttggaattcagcttctgctactcactagttccaaaactttaggcaaggtgcttaacatctctgaagcttcagagtcgcaaactgtaaagtgggtatataataatggcccctaggctgggcgcggtggctcacgcctgtaatcactttgggaggccgaggcaggtggatcacctgaggtcaggagttcgagaccagcttgaccaacatggagaaaccccatctctactaaaaatacaaaaattagctgggtgtggtggtgcatgcctataatcctagctactcaggaggctgagacaggagaattgcttgaacccgggaggcggaggttgcggtgagccgagattgcgccattgcactccagcctgggcaacgagcgaaactccatctcaaaaataaataaataaataaataaataaaataatggcccctatctcatagaattctgaggattgaataagttagtggatataaagctcttgtcacagtacagagcacaagataaatgctatgtacattagcaatattattatccttgttaatattatgattattatttatcattatcactatcatcatcgtgtgatctgggaagcccagggatcccccaagtatgccaggaagggaaaccctggcctgctctctctctgcctccacctgcaggaagctctccccctcttcccccaccaccatctcctcttttcaaacctgaattcggagctgcaggctgcggttggcctgctccagggatcgctgccggctctccaggtctttggagcgctgctgctccttctgcagcttgcggatataatccacagaggccttcaggatggtgcccttgttccagcgcatctccctgtggggcccaagtgggaggcaagcaggaaatgccacatgaggagtttctcaggagctgaggcggggattgcaccaggtgggagcctcccaccacatgcttagaacttgaggctggggtctttcaaaggtatggagtatccagaggaaaacttcccgcctggaatcttacaatggtgccccatcacactccaaaccctggaagccgtctctgacctgaccccttaggattcctctcttccctatgtccctccgattgatctcactacagccacattggtctctcagtgctcctagaatatggaaaaccactcccatctcagggcatcaatcccagccgtgccctctgccttgaatactcttacccccagacacccatgcggctccccgccttgcctccttaggctctttattcaaacgtttccttgtcagttggggcctgccctgtcctcaccttccttatcccaaactaaccctccccaacattctcccattttccttccagtctttattcttctcataacactcatcataatggatctcatggatgtttacttatttactatttgtctgcccccactaaaacatcagtttcatgaggtctgttttgttccctctggtatctttagggcctaatatggtacctggcacaaaccagaggttcaaaaaataaatctttctcttttcctttttttttgcggggcggtgggggatggagtctcgctctgtcacccaggctggagagcagtggcacaatctcggctcactacaacctccacttcttgggttcaagcgattctcctgcctcagccttctgagtagctgagatgacaggcctacgccaccacgcccagctaattttttttgtattttttgtagagatggggtttcaccatgttggccaggctggtctcaaactcctgacctcaggtgatccacccgtctcggcctccccaagtgctgggattacaggtgcccaccaccacgccccgctaatttttatatttttaatagaaatggggtttcaccatgttggccagaatggtctcaatctcctgaccttgtgatccacccgcctcagcctcccaaagtgctgggattacaggcgtgagccactgcgcccggccatctttttttttgtttgtttttgagacaaagtcttgctctgtcacccaggctggagtgcagtggcaccatattggctcactgcaacctccacctcccgggttcaagtgattctcctgcctcagcatcccgagtagcggggattacaggtgcgtgccaccacgcccagctaaattttttttatttttagtggagacagggtttcaccatgttggccttcacctcctgacctcgtgatccgcctgccttggcctcccaaagtgccaggattacaagtgtgagccactgcacctggctaatttttgtattttttagtagagacggggtttcatcatgttggccaggctagtctgaaactcctgaccttaggtgatcgaccccgccttggcctcccaaagtgctgggattacaggcatgagccaccacacccggccaataaataaatcttgaataaataaaggaagtaccattgcaccactgcactccagcctgggtgacagcgtgagactccatctcaaaaaaaagaaaaaaaaaaaggaagtactaagtgaacagaaaagtaggtgcatatatcctacggggaccagatggggcacacagaccataacattatgtgcctaaaattttaggtgctgacatagtgagggtctgcaaccctgctcaggctgagaaagaaccagacagaggagaaatgcctgggccgagactgcctggtgagcccaccaaggcacaattttagtagcatgggacgcctgccccacctcccgctggcctgagggtcccagcccagactcacgggtcactggacttagggatgagagtgcccagttccttgatcctgtcgttaatgttgaatcgcctgcgacgctcaactttggagaggggaggagaggaagaaagagtgggagaaagagttgtcaattagccaaaaatggaagagacagaaagtagggagttgggaggctgttgcagggaaggagttccccatggggggccaggactcggggtgaggcaggcctgcacagcacccgggcaatgcacacgctctctggcttacttaggttgtgattgtctttcttctgccgttccttcaaaagggcctttgcctcggtctctggaaaagagtggagtgatcagggcctctgagcacaggaaggcaagaaacacatgcagatactaaggtagggtttggtagccaaaagcaggggaaatgccttttttaaaaagtgccttctttttactattttaagccatggtgataggctggttgttaaatccaagacgagaggaactgaagtggggtgaaagcaagaccacaagccatagggggaaaggggacaaacagcctccatttccatatgtccaaaccattcccctcagaatcaggcccatctctagacctggtaggcacagggctcacctggggtaaagtgtagggccatggggccaagaccctatcacctaccagagatctcccgtttgatgttgggcagctcagctgggcaggagttgctgacagtgatggctggtgtggccacgccttgactactgtacacatcaagcagattccctgacacaggcagctgggggcagagagggcagagaaccaccagttgggaacaaacccaggcttggctcctcctcagaaccaggttcctgagcttccacatatcccaaagatggggcaccctctaatgcaaggactggctgactcagcaccagaacccttgcttctccttcaaggcaaattcacatggcgaccaaacaggggaggacagagcaaactggacctaccttgcttcgctgggagactggagcctgcctggcctgcttatcacttcctccagtccctcatatccctcagtgacctctaaagcccctttcccaaaccccggggctggctctgagaagaaatgctggaaaaccacccttctcaggtctttgtcggctctgatgggacattccagtccgttagctcctcccagcacaacattccaatccagcattcttggaacactccaacccaatcttctccgaccttggtaaattgtcatgacaacattctatccaaaatctggccttctggagaattccaacctaatctccagtctttcactctgatcaagttgtaccatcttccactctgatcaagttgtaccatcttccacatcagggtctcctgctgctgtggaccaaggtcctgactccagtatcttcctgcacattctgttctctcaggagattcttatccaactattcaattagcactgctttatgtcagcctagtttttttttttttcctctccttcacactttcctggatatactccagaggagcacgtcaatcttaagtatacccagggccaggtgcagtggctcacgcctgtaatcccagcactttgggaggccgaggcgggcggatcacttgaggtcaggagttcgtgaccagcctggccaacatggtgaaactccgtctctactaaaaatacaaaacaacaaaaaaaattagccgagcatggtggcctgcacttgtagtcccagctacttgagaggctgaaacaggagagttgcttgaacccaggaggtagaggttgcagtgagccaagatcacaccactgcactccagcctgggcaacagagcaagactctatctcaaaataaataaataaataaataaataaataaataaatacaaataaaataaagtatatccaaatcccacttcttcatgagttttaatctctttttttttttttttttttttttgagacggagtatcgttctgtcacccaggctggagggcagtggcgcaatctcggctcactgcaagctctgcctcccgggttcacgccattctcctgcctcagcctcccgagtagctgggactacaggcacccgccaccacgcccagctaattttttcgtatttttagtagagacggggtttcactgtgttagccaggatggtctggatctcctgaccttgtgatctgcccgcctcagcctcccaaagtgctgggattacaggtgtgagccaccgtgcctggctgagctttaatctcttgaacccacttccagtctggtggatataaggtcccattctctagttgtgtccaaatcaataaaaagttctgataaattagtcccatttttatacatgcttccatcctattgataagttggaaaaaagcaaaactacagccacttggtatgctctaaagcaagttatgagaccaggcatggtggctatgtctgtaatcccagcactttgggaggccgaggtgggcagatggcttgagctcaggagttcgagaccagcctgggcaacacagtgagaccctgtctctactaaaaatgcaaaaaattagccaggcatggtgacacaagcctatggtcccagttacttgggaggctgaggtgggaggatcacttgagcccggaaggtggaggctgcagtgagccaggattacaccactgcactccagcctgggtgacagagcaagatcctgtctcaaaaataaataaataggccgggcgcagtggctcaagcctgtaatccgagaactttgggaggccgaggcaggtggatcacctgaggtcaggagttcgagaccagcctgaccaacatagtgaaaccccgtctctactaaaatacaaaaattagccaggcgtgctggcgggcacctgtaatctcggctacttgggaggctgaggcaggagaattgcttgaacccaggaggcagagggtgcaatgagcagagatcgcaccattgcattccagcctggacaaggagagtgaaactccatctcaaaaaaaaaaaaaaaaattcaataaaaaaaaaaaaataaataaataaagcaagttaggccaggcatggtggctcatgcctgtaatcccagcactttgggaggccgaggcaggcagatcacaaagtcaggagattgagataacctgggtaacacggtgaaaccccgtctctactaaaaatacaaaaattagccgggcatgggggcacgcgcctgtagtcccagttactcaggaggctgaggcaagagaatcgcttgaacttggtaggcggaggttccagtgagccgagatagcaccattgcgctccagcctgggtgacagagcaagactttgtctcaaaaaataaataaataaatataataaagcaagttatgagactcttggagtgttcaaaaccagaatgttacaatggtatatcccttgctctagaaagttttatctactgactagaaggactctgcctcctggcacagttcacttggtatattccaatcactacgagatccaactacttgttataacccacagcaagtttgaaaacttttgttatgcttcaaggccaggtgtggtggctcacacctgtaattccagcactttgggaggccaaggcaggtggatcacttgaagtcaggagttcaagaccagcctggctcacagggtgaaacccggtctctactaaaaatacaaaaattagccaagcgtagtggcgtacacctgtaatcccagctacgtgagaggctgaggcacgaaaatcgcttgaacccagaggctgcagtgagccaagatcgcaccgctgcactccagccagggtgacagagtgagactctgtcttaaaagaaaaaaaaggtaaaaataaaataaaacaaaatgctccaatcattacatggtctggtgtatatgtcccgatgacctgaatcccttggtacattcaagttgctataagatgctcatctcggccgggtgtggtggctcacgcctgtaatcccagtactttgggaggccgaggcaggcagatcacgaagtcaggagttcaagacccgcctgaccaacgtgatgaaaccccgtctctactaaaaatagaaaaattagcttggtatggtggcacgtgcctataatcccagctactcaggaggctgaggtaggagaatcgcttggacctgggaggcagaggttgcagtgagctgagaccgcgccactgcactctagcctgggtgacagagcgagactccgtctcgaaaaaaaaaaaaaaaaaagattatcatctcttggtacttctcacagcaaagcccaagcactttgatatgccctactgtctcagtgaactccccacctgtatctctcacagtctacatggtccacctctcaacacagtccaacaaggtccaaaggcattgttgacataccctgttctcgtcataaggcctccctctctatcttagcacaatcaaggcaagggtctcctatacacacagccagactgagtatggtcttggtgatacagaaatgccctaattttcagaccaacctcccatctcagggcctcaccgtgctggggagctgcagtcctgtggtgcctccgggcagatagctgagcatttcatcattgtaactggactccaggctgatgatctcatcaatgacatcatcaatctaggggaagaagtaaatattatacaggtttagaagaatttgggaggggaatgtgggaggaggtttggctgtagcctcttacctccttctctgagctggacccgatggtgagcagcgccatggggctgttgggcgcactgcctgtggggccggtagtgtgggcagcctcaggggcaggcagtggctgggcacttgcgggccccggcggtggggtgagggcctgggaagccagcttgggcccgagtgtggtggacaggtactgtttcacctgctgccggcgcgcctgctgcaggtggtagcgcgttgggttctccagatgggtctgcacctgtgaaataaggtagacaaggaaagagaggggacaaggcagaacaggactcaaaggggtgaattctgagccccagcctgaccctcctaactcattggtgcctagactcacgcagacaagctgggcccagaatctgagaacaccccaaaaatattagcgagtctcccccaggacccaaactctctttctcagaaatccttcacagctgccaagatccacccatgactgacaggatccctcgtagtttctggaaaaccctgtcacagtccccaagattccccacctagtctctgacaccacctaatagacctgggaaccatacaatgcttcccaagaccccctaatggccaaagaactaatgtatcccacacacatgaagctcttcctacaaagccagggcccacttggggcactcatgagcctccatggtccaccaagacatcctcatggcccccacgaactcctcgcaatttcacaagatcatctcagaaacccaaaacacatgagacatgaacacagataatttaaacagtaccagggaccttccttagagcccctaagaccttgcccccaaatcaccagtgcatcgaggccatccctagctcctaggatcactcctcagtcaccaggagccccctcccagggcctctggatctcaccttaccttgagcacctccctgggcacctgagcagggggtggacggctcaatgtgtggcccccagcagagacgccaaccacagagatggcaggagaggcaggtgcaggactggggaagggagccgcggcggcctgttcccgacgctcacgcctctcctgctcctgcgcctgggcccgcattagctgctgccgcagcaagaccctcgatgaagaagatgacgacatggcaggggtcctggagccccctgcagaagacgatgcagagagtgtagctggggtggctggtgtggcctgcagtgatattgggaggctgtggaatgggaaatatggggccatattttaggtaagctaaaagtctcatcccaagcctaaagggtcttagcgtgacggagcagacacaggaaccaggcctgttctctgccttccgaggccacaatgtagaagcagagacacaggaaccaggcttggtgatggctctcaggggtcacagtctgatgggggacacactggaggtcagtctggtgggggagttttagcctttggtccttatggtgaagcctagatttgagcctgttcacatattaagtggagatgctattgttcagctctgcaagggggggtttgtcctatttacaggagagcagaagaagcagaattgaggctttggcagcagaatgtggatacagagggctcctaagcccaatgtgaggctagagaagctctctgagctcctgggggtgggcgtcaggtgataggagaagccccaggttcctcttcttcccctgcctgggcctctggtcccaggagctagtcagtcttgaaaacctcggagatttcacaatactctcttcctgcccctcttccccctcccctcccctctctcagagcccgggccgatgactcagcacatttagacttccaagcttggggaaagaagagaccagcaggggctcctcaagggctgagggtgggtgagttggtagtgtgggaagggactgagttggggctagaggcatgtccccgcccacccggggacatgagtttaagcaggccacgccctatctctgagcactccaggccggctggaacacctgaggctgaaacacttgcatatgaatgggtgtgcaggtgggctgggggcaggcaggggaggtcttgacagagatactggaatcctagcttggccacctactttcctgtgtgacatgctctttctggtccctaattttaccaccactagaaaacgcaggctggtgaaagaatgggttgggctggtactgagggcctctgcccatcaagaggggagaggagggctgaggaattgggaggggaatcagatagacaagtcatacataccttgagcgaaggggtaagggttggcttttgagctcgtagaagctgtcaggatcaaggacgttttctaattctatgtcagcaacaatcccggattccggaagcaaagagttcaggctgagggggaggtggagtggtggtcagtgattgaatgaaggaccttattccccagccctcccctgagacagagaaagagacagagagcgggggagaacgaagaggagggtacaagcccctcatatttggccaccttgctgggtaccacaccaccatgaattcccacctccttcccccatccccctttcccttccccactgtgttactcatagtcccttaggagtcagaataataagaacgcctgcatcccaacccccacactgtaacaacctgggtttgaggaaaacagaatttaggaataacaattcactttatagaaggattcctgacttcctattcagagttctcccagcccccataccccctactttttttttttttttgagacagagtatcgctctgtcaccaggctggagtacagtggtgcgatctcagctcactgcaagctctgcctcctgggttcaagtgattctcacgcctcagcctcccgagtagctgggattacaggcacacgccaccacgtccggctaatttttgtatttttagtagagacggggtttcaccatattagccaggatggtctcgatctcctgacctcaagatccgcttgcctcggcctcccaaagtgctgggattacaggtgtgagccactgcgcccggccaaccccctgctattttctttacagctgaatgtgagcccaggtatatgtgtgtacacacacacacacacagagcaagtaggggcatccctcagcataacagtcccttgtaacacaaactgaatgcatcacaaagagaactggaaataattcacttgacgtaaagatctaccatttcacaaatgagtttctcccagccccagccagagttcatgggatgccaacacatgcctaaatataaaatagaaatatcaaaggctcccctcgctccaacagactggatttacaagagggagaatttgggtggttgatccactttatacaagcattcttttcttaccggaggagcctgcccagccttctcctgtttttttggatagatcaaaacacacacacacccccaacactaacacccactggcgcacaaaataagaagccatatacacccatccctttaactatgtccactactgcgatgatctaggttgttacagaggaattagaagatggtgaatcgatatacagaaaggctctgctcagccccagagagcaagggacagttaacacacacgtggatgaatatgcatccttcaatttagctaaacatttagaatgctgagagattgctggtgacttcacttgacaagaatcctctcccctccccaaggatctgtcttccttcctctcctcaccctcagatggagccctaaaaccacccaggaagttgggaagaggaagctcgggcaagccactgagctcagcacaatcccaggcacaaaggaggcaaagaccccccccacccagggctcacacacccattgcacagaagttggaagagatgggcactggggtgagcagggagggctggggctccaaagcccattgatgaaagtaaggatgagaagaggccagaggggatccacccaggcagggatggtgcaatctgtactcgttccagctctatggacagattcaagattacccccaggagctcggagatcgaaaagaagataaaaagaaaaggggtgtggggctagggagtgggaagggctgagaggctagagcgagtagcagcatgaacaagagcctcctctgggttcccaaacaaggtctgaggcctctgagctaagaggtaacatcatcgccctctgcctggctgtctatcttccattcaggcccttaacaggtgtgggaagagggcttttccactatccttgggatctgccccagctgggtaggcgggcagaggggaaaggattattctggtcaagtcttgctgaatgttgcttctcttgttcattcacacgcactcacaaggctggtcccaggcagcatatctgagatacctccaaatccctccagattcatgttatccccaaacacagcaaccagtcactgagaggcaccaagctcccaagacagcacttctgtccctcaggaccccttctcccacactgagggaaaaaagattctaggattcccttaaaaccagtgcctcacctgacagtgtcccctcaaattcattcccctcatgtccgactgaaaatccccgaattcagcctctaatcagagaccctgtctaccaagttcagctatctcagaccagtttctggatactccagaataggccccgctagacgcagtcaagggctccccaaacctgacccagaccccgcttaatgcactcccacgactcctttaataaagccacaatccaagcaggccactgccggattccttaggtgcccccccaagacgggcgccccgacgtcctccaaggctaggccgagggcctccaatcccagtccggggcccccgctgcccccgagatcaggcccctgggagccccagtcggcactcccagccccaggcggccccgcacctgagcagctgagccgagtcggccggcctgcgctcctccaacagcacgaacacggctcgagggccctccgcgctggcctctacgccatcccgagctggttcggccgcatgagacatgacgcccggccccgggcgagccctgccaggccggtcgggcctcggcccggtccccctaacaaaataagagtcccccctccccccagctcgccactgccgcctcctccgctaagccatggagctagcactgcgcgggcgggcggcgtctgggagatgggatgggctgtgagtcatcccccgcccagaacggaccgacgccccccctcaacctaaccccggacgaccgccctcctccccctcgtcttcttccccctcctccctcctcccagggatggggaaactccacaggaagtgaccgcactggggatggatggcccgtctggccacgacccattagcgaggcggccaatcgctgaacggcgattcgagggcccaccctaagcgacgcctccgacgcggaggaaaaacgcgattcggcccgccctcattccgagaagcagcacccagaccacgccctcaggggcagcgacaaataggcgagggttgatttggttgaaccacgcctctatgtttgcgtcgctttcggagccacgccctctcttctcaaattatccctctgcaaggtaatattaagccgctccttgggtcctctgcgcctgcgcatcgatggccagtcggcgcacggagggtctcctggccaagcttttagctgcggaaccgcgccctctttcggccaatatttgtaatatctgagccctagaccgcgctccaacctcgatctggctgtgctctctcagccaaagccataactatgaggcacaggcagctacattccctgaaggtgcgggccagaaacccccccctttcgctgtccgcagtccagccgcccagctggtcttccgggagtattccgcctgttccatgccatcgagagcggttgtactatgttcattgcgctgcgcaatatgtgcttaataaattcttgacgggtgaatgaatctggtcccttcggtgaatgacgacttctggaatcacaaagatccaggtttgaatagggaaggggacctcccctctcccagcctcagctttcctggcctgttaaatgggggtcaaaatacctgtctggcagggttgttctgaggattaaagataatgtatgaaaagtgctagcaggttgtttggcatacaagaagcttcccaaaattagttgattcactcatttgttcacttattcaacattcactgagcgcttctgtatgccagacgcatgcaagccggctcgcacaaggcggagggtctcactcatatatcctcaggtgcaaatagctcacaaaacacccagacctacagccttcccttcctctttcctgacatcccaagaccccaccctgagttgcgcctccaggaatttcaccgggctttcatttaccttggaccttcctgtattggcatcattatttcacaggtctgtcagttgctttcgtaaactcatccatactcacacacaaccatctcgtacaagggggaaacctctacataataaagatgacttctggccgggcgcggtggctcatgcctgtaatcccagcactttgggaggccgaggcgggtggatcacctgaggtcaggagtttgagaccagcctggccaacacggtgaaaccccgtctctactaaaaatacaaaaaattagccgggcgtggtggcgggcgcctgtaatcccaactactcgggaggctgaggcaggagaatcccttgaaccaggaagcagaggttgcagtgaaccaagatagtgtcactgcactgcagcctgggtgacagagtgagactcagtctcaaaaaaaaaaaaaaaagaaaaaagaatacattaccaattgtaccaatcaaaactctaaaacggaacttgtagatccaatgttaaaattcctatgatgccttaaacatgtaagaatgggccgggcacggtggctcacacctgtaatccagcagtttgggaggccaaggttggtgggtcgcttgaggccagaagttcgataccagcctggccaacatggcaaaacctcgtctctacaaaaatacaaaaattagccgggcgtggtggtctgcgcctggcctgtagtcccagctactcgggaggctgaggcaggagaatagcttgaacccgacaggcggaggttgcagtgagccgagatcacgccactgcactccagcctggggcgacagagtgagactctgtctcaaaaacaaaaacaatggcccagtgcggtggctcacgcctgtaatcccagcactttgagaggccgaggcaggtggatcacttgaggtcagaagttcaagaccagcctggccaacgtggcaaaaccctgtctctactaaaaatacaaaaaaattagccaggcatggtggcgtgcgcctgtaatcccagctactagggaggctgaggcacaagaatcgcttgaacccgggaggtggaggttgcagtgagccaagatcgtgccactgcactccagcttgggagacagagctagactccgtctcaaaaaaaacaaaaacaaacatgtaagaatggctaattttacaaaagaagaaagaggagggtctggcggggtggttcccacctgtaatcccaacactttgggaggccaaggtgggagaattgcttgagcccgggagtttgagactagtctgggaaacatagggagaccccgtctgtacaaaaaaacttttaaaaaattaggccgggcatggtggctcacgcctgtaatcccagcactttgggaggctgaggcgggaggatcacaaggtcaagggattgaggccatcctggccaacatggtgaaaccccgtctctactaaaaatacaaaaattagctgggcatggtggcacgcgcctggcctgtagtcccagctacttgggaggctgaggcaggagaatctcttgaacccaggaggcggaggttgcagtgagccgagattgcaccactgcactccagcctggggacaaagtgagactctgtctcagaaaaaaagaaaaaaaaagaaaagaaaagaaaagaaaaattagccaggtatggtggtgcacacctgtggtcccaactacttgggaggctgaggcaggaggatcgcttgagcctggaaagtttgaagttgcagtgagccgtgtttgtaccactaccctccagcctggacgacagaatgagactctgtatcaattaatcaataaataaaactacatactgtctgatgaaagatgctacaaagttaaaagacttacaacagactggcaacaaatatttatagcagtagagccacagagtaattatcttgtcacacatcccaatcctacaaacaccagcttcacacacgcatctcaaatgtctccatgacaagtgatatcccatgacaccctgcatgatatgcctaccctgcatctttctgggtttctctctctcttttctttttcttttttttttgagacagagtctcgctcttgcccaggctggagtgcagtggcacgatctcggctcactgcaagctccgcctcccgggttcacgccattctcctgcctcagcctccccagtagctgggactacaggcacccgctactatgcccggctaatttttttgtatgtttagtagagacggggtttcaccatgttagccaggatggtcttgatctcctgacctcgtgatccgcctgcctcggcctcccaaagtgctgggattacaggcgtgagccactgcacccggacttcttttttctttttctctctctcttttttttttttttttttgagatggaatctcgctctgtcacccaggctgaggtgcagtggcactatctcggctcactgcagcctctgcctcctgggttcaggcgattctcctgcctcagcctcccaagtaactgggattacaggtgcccgccaccgcggccagctaattttttttgtatttttagtagagacagggtttccccatgttggccaggctggtttcaaactcctgacctcaagtgatccgcccgcctcagcctcccatagcgctgggattaaaggcatgagccacatgcccggccctagtttctatcaatatctcattctcaactttctcaatacttgcacccctgccatatagttggagttcctttctttctttctttcttttttttttggagacagggtttcgctctgtcatccaggctggagtgcagtggtgcgatctcggctcactgcaaccttatctggggtttcactgcaagacaacttcaaggtgctgtgaaggggacatgtggagcgaagtgggagggcagctggatggtgaagttgggggtatttagggatagatatgagtggtgattgaaggtggcttgggggtgagtttgggttctacaacaggacagtttgcaggcaattgaaggatcatttgaaggtctttgggaggaatggggcttcaataagacagtttaagaatgcaggtgggagctattgggagggtggattgggaatacggttaatgggtggaggatggtttggggtacagttggagggaatataggaagatgggtttttagagatagagttcggccttctgtaaggtggtttaaggaacagatgttaactgtcataagatgttgtggtaggctgaataatcccctccacccctgccaatatatttatgtcctatgtcctaatccctggaatttttttttaattaattaattttttttagacaaagtctcactctgtcacccaggctggagtgcagtggtgtgatcttggctcactgcaacctccggctcctgggttcaagccattctcctccctcagactctcgagtagctgggactacaggcaggcacccgccaccacgcccggctaattttttgtatttttaggagagacggggtttcaccgtgttagccaggatggtcttgatctcctgacctcgtgatctgcccgcctcggcctcccaaagtgctggtattacaggtgtgagccaccgcatccggccaaggaactctttttttttaaagagtcttgctctgtcacccaggctggagtgcagtggtgtgatctcagctcactgcaacttcgtcttcctggttcaagcgaatctcttgcctcagcctcccaagtagctgggattacaggcatgctgcaccatgccccattaatttttgtatttttagtagtgacagagtttcaccatgttggccaggctagccttgaactcctgacctcaagcaatctgcctgcctccgcctcccaaagtgctgggattacaggcatgaggcatggcgcctgccccctcacccattttttttgtttgttttttgagtcaaggtctcactctgtcacccaggctggagtgcagtggcatgatcacggctcactgcagcctccatctcctggactcaagcagccctcccgcctcagcctcccgagtagctgggactacagatgtgtgacagcatgcctggttaattccctggaacctttgaatgctactttatgtgacaaaaggactttgcaggtgtgattaagttaaggattttgggatgaggagattgttctggattagctggtagaccctaactgtaatcctaaatgttcttataagaggtaggcagaagcaaattcgactgacagaaaaggaggaggcaatttgaccacggaggcagactgtagtgatatgactgccaaaagccaaagaatgcctgaagaggcaacagatagtcctttttgtttgtttgtttgtttgtttgtttcagatggaatctcgctctgtcacccaggctggagtgcaatggtgcagtcttggctcactgcaacctctgcctcctgggttcaagcggttctcctgcctcagcctcccaagtagctgggactacaggcgcccgccaccatgcctgattaatttttgtatttttagtagagacggggtttcgccatgttggccaggctggtctggaattcctgacttcaggtgatccacctgcctcggccttccaaattgctggcattacatgtgtgagccacctcacctggcctaaagacaatttttccatggagtgtggtgggggatggtttcggaatgaaactgttccacctcagatgatcaggcattagttagattttcataaggagaatcttgtaagcatgtaacctggatcccttgcatgcacagttcacaatagggtttgctctcctatgagaatctaatgccgctgctgctgtgacagaagctggagttcaggtgttaatgcttgcttgcctgccactcaggctcctaacaggccactgactggtacttgtccttggcccaggggttggagatccctgccttatagcctccagagggagtgcagctctggtgacaccttaattttggcccagtgcaactgattttagacttctggcccttaaaactgtgaaagaatacatttctgttttttgtttgtttttaagagaggtagctatttatttatttatttatttagagatggagtctcgctctattgccctggctggagtgcagtggcatgatcttggctcactgcaacctccacctcccaggttcaagcgatgctcccacctcggcctccctagtagctgggactacaccatgcctggctaatttttgttaaatttttttagtagagacgggatctggccatgttgtccaggctggtctcaaactcctggcctcaagtgatctgccagcctgggcctcccaaagtggtggtattacaagggtgagccacgcaaatttctgtttttgtttcttcttcttttcttttctttttttctttttttgttttttttgagacggagtcttgctctgtcgccaggctggagtgcagtggcgagatctcggctcactgcaacctccgcctcccaggttcaagcgattctcctgcctcagccccacgaatagctgggattacaggcatgtgccaccatgcccggctaattttgtatttttagtaaagacggggtttcaccatgttggccaggatggtctccatctcttgatctcttaatctgcccaccttggcctcccaaagtgttgggattacaggtgtgggccatcctgcccggccctctttgtttttttaagccaccaagtttgcagtaattggttacaacagccacagggaagaactacagatggctttggggaagagttgggggtcactggaaggacttagggctacgttgggggttaccaagggcagtttgagagtataattagaggctgtgggaaagcatttgggtgcagttggagccatcaaagggaaaattgaggtgggatttggggggtcattggagggtggatgggaggtatagttgggagactgtggggaggtaaaggggaaatgtttacaggtagcattgggtgctattagagggcagtttagggtgtagttgggagttcttggagggtggtttgggtggtattgttgggaaaaattgaaagatgttttgtgggtgtagttgctcataatttaagacaaggttggggctgggcgcagtggctcacacctgtaatcctagcacttggggaggctgaggcgggcagatcacctgaggtcgggagttcgagaccagcctgaccaacatggagaaaccccgtctttactaaaaatacaaaattagccgggcgtggtgacacatgcctgtaatcccagctactcgtggggctgaggcaggagaatcgcttgaacccaggaggcgaaggttgcagtgagcagagatctcaccattgcactccagcctgggcaacaacagccaaactgcatctccaaaaaaaaaaaaaaaaaaaaaaaaaagacaaggttgggcatggcggtcagtgaagagtggtttgaggttacagtctgggtctgcagttctgggaccaaaggaaggtagttagtgggtagagtcatggctggggctgttggaaggggaattttaggggtggggtttggaattgttggagagtagtttagttaggtttgggtattactgaaaaggcattttggggatattcttgggagttgataaagggcagtttgaggatgtagagcagactgctggaaggtggtttaggggtgaagatgaggctcgggagggaagtttagtgatgatatttggggattatagagtggtctggggtacagttgagggctggtaggtatggtccagtgtgcagtttgggggtctgttttgaagtctggatgtcagaggggtgttttgagttgtggttgaggagctattggtgggtaatttggagagaagttaaagatcattggatagactactgttcagcaataaaaggaacaaaccactgttacatgctaccacacggatgaacctcaaaaacatcaagctaaatgaaagatgtgagacacaaaaaatccacatattgcatttttatgaaatgtccaagaaaggcaaatttatagagacagaaagtagatttgtggttgcctatggttgggaatgggaatggcattcagtcatgagggatttttttggggtaatggaaatgctctaaaactgggctatagcgattgttgcacactttggtaaatatttttttcttttttttttcttttctttttttttttttttgagacagagtcttgctctgtcgcccaggctggagtgcagtggcatgatctcagctcactgcaacctccgccttccaggttcaagctattctcctgcctcagccccctgagtagctgggattacaggtgcctgccaccacgcctggctaatttttgtatttttagtagagatggggtttcaccatgttggccaggctggtcctgaactcctgacctcaggtgatctgcccaccttggcctctcaaagtgctaggattacaagtgtgagccactgtgcctcacttaggtaaatttactaaagttgttgcattgcacacttaatcgtggatgacttttatggtacataattatcattattattttttgagatggagtctcactctgttgcccaggttagagtgcagtggcactatcttggctcactgcaacctccacctcctgggtttaagcgattctcctgcctcagcctcctgagtagctgggattacaggtgtgagccatcatgcccagctacttttttgtatttttagtagagacggggtttcaccatgttggccaggctggtcttgaactcttggcctcaagtgatccactcgccttggcctcccaaagtgccgggattacaagtgtgagccactgttcccggcctggtacgtaaattatatcccggttaagttgttttaagaaaaaaatcactgagagtgctttgtaatttaggtcacttaagtatgatccagggtgcaagtaagtctttggagggcttaggggacacatttggggccactggagtatgatttgggagcccaattgggtaactacagcaggatggttggtggctattcggaggtacagttgaggactgttggagagtgtttgaggtgcagtttgggtcagtggagtgtgggttagaggtgtagatggtgctggagggtggcttgaaatgcagttgaaagaccacagaaagtatagttgggttatatggcacagtgataggggctgttggaaggtaattttgtggggatacgaggggaggtcaatgaaaggtggctgggtaagaggggtccatggaacatggtttggaggtagtgtgggtgactgttggaattattttgtggtgcaggtgaggcccacgttgagggtaattaggaatgtttgggctggtgttgggggctcctggagagccattttgggtcaatggagtatggtttggagggtacatggagaggagtttggggtcaatggagggtgttacgggtgcacattggaagtagatagcaggtgatttggacatgctgtttggagggtaatggtttcagggctgattgcagatggtttgatggagcaaactgggggtagtgtaaggtagtttactgccacagcttgggtgtccatagagggtggactggaggtaccgcttggaatcaacagacagtagtttggggatataatttggaggataatggaggttggtttggagtgcatttgaggaacaacagggagggtagctggggtttacaggtgtggggatagcttacagagagcagcttggggtactgcttgagggtccctgggggacgacttggggtgaggggcgccagtaggctccctgaggggcgtggcctcggcgagggagggctccgccgccctcgagaaagcgtgtgcgcacgcgctcccagcttgttcgctcctggcgctcccagggcaagaaaaatcgaagacccgagccggcgcttgcgcacttagtctccgccactgctgtggtctcgtgccccgccccccggtccccccaccctctaggctaggctgagcggcggaggtggccgtgccgctggaagcggacagacccgagttagaggtgggggcgggggtccatcgcccgcggccgggccggcgctcccctcctaccctccccgcgacccccgtctggcccccacggctaacggtagcgcagccgaacacggcccacgggcagggcgccgaagaggagcaggcgcgcgcccggggacgagcagggcgcagtgagggaggggcgcgtccactgccccggccggccgaccgacaccgaccccgcctactgcggcgcggggacccttggtgagtaaccagccccgcctgcggaggaagggaggggacagggtggggtgaaggcccggaaacgccgacggggcgtacctgcgcgcgcacccgcgacctctgaccccgtggcctcagccctgaccccttacgacctgactacatcttttttaaacctcaacccctgctggccttggcctcaggaccttccatccgagccctgacctaaccatattctggcctggtatggtcctcaacccctgttttgtccccctaaatccagtcctgaccccaaaccccatccagttatgtcctggggatctttgacctgaccctgatccttgcctgaccccgtctcatctctgaaacatcttgccctatcctaatgcccaacactgaccccagtttctgtcctgacgcttgacctgtctgttccctaaactcttatccagtctccaaacctcttccagtcatgtcctgtccccctaaccacaatctggtgtagttctgtcctgattcctgccctctaacttctgtcctttctctgcaccctatgtgatatcctctcctatatactcgtgatctgcatcctggctcaccaccttcgtctcctgccttgtccctgcccctgactctgccccgtttttccctcttttcttgtcccatcaccatactcattcctatcctcattgtgtcctggtcttttcctgttcctgacctccatcctgaacctgcccttttccctgtcccctcctttgaccactggcttagcctttcctagtcatgtcttctgactgctgttctatgttaatcctgacccctgccctgctgttttgtctctttcttgtactttttctctgacccttgtcctgaaccccaccttatcccatcccctggccagtgttctggctcattccccatcctgcctcttgacctccatcctgtgataactctggctctatcttgtcccctacactccttcctgttctgtcccttcccatcccagccccagggtgttcttccccttaccatgcccctccaccctgttcagatcttcttccttcctaatatccacttgccatcccttctgagccgaggacaggggtcccattatactgtgcccggaacttgaagattctgctgttcccaggacctccgaagtacatcccaaatgcttctcttagcaagagcaagcagccctatgtgccctgcgtggctgatgggggtttttgtgtgtgatctcccctatccccaccctagtgatcttacatagagcttacatttctcttcctgccccaggagggcatgcaactgttcctacgcccctgccctctgcaagtgtgaaagaataccctaaattattcagtgactctctgggagtctgagaggtctgggtcatgtttccagtcttgctgtgttggggactgcctcatgttggggggaagagttaagaaaatatgaagagatgggggacccaggggtatgtatgaatcttctaggccatgtttgattctgggtgcatgatccctgctttcctggactgaaaaagaagaagtctattctaggccaaggctttgggacttggtatagaggagggatggggtcaaggattcattctccttctctcagcagtaagcaataaaaatcttggtgctaagtccactccacctctgtggggcttgtcttgggggagaaggccaggcagtcactggatttaagaatcaggcctatccagtggtaacagtaacaacaataatgcagtgttcccctcattgtccgaatctccttgattctgaggatgatggggagaacttggatagctagagggtaatgtgttactcaattgggttttgttcctgcatttctcatagagactagtgagtttgaataacaagatgccagacctatcttatcctgaaaatctatccaaacctattgataacaaaacaagcattcctcactttcccaatctatttggtacctgaattctgagagggagagtgcccgaagttcagacagtgaaacctaccaagttatttgaaggtattttgttttcacatcttacatagtgagtagggaaaattgagataatgaagaataatgactaactaaaaaatgtatccaaatctatgaactttcctgagctccagggacaagagttgggatagtgagggtaccctgttatgtaaatggttcctgcattttgtttggagggtaaggaaagttcaagaatgagggataccagtcgtatctcaaaaatgtttctgaatccattcagttcttgcatttggatggtgagagttcagacaatttctctgaatgtatttggttcctgcatttttgatgttgagaaaggagaggttggatcatgagggaaacagctctgtttcaaatatgtctcatttggtgagcagggagggtaccgtgtctagatagcaagtgggatttggaagctgagggataccagttctgtctcaaaaatgcatctgaggccggtcgcggtggctcacgcctgtaatcccagcactttgggaggctgaggcgggtggatcacgaggtcaggagttcgagcccaccctggccaagatggtgaaaccccgtctctactaaaaatacaaaaattagctgggtgtggtggcacgcacctgtaatcccagctactcgggaggctgaagcagggaactgcttgaacccgggtggtggaggttgcagtgagccgagatcatgccactgcactccagcctgggtgacagggtgagactccgtctcaaaaaaaaaaaaaaaaaaaaaaaaaattgcgtctgaatacatttagtctctgattttggatagcaagagttcagacaagttatctgaggaaaaacaactgtttcaaatgtatcaagtgagactgaaggacaccagctctgtctggaaaaaatgtgtctgaatgtatctacttgattcctgacttcctgtggggaagaatacttgtaactgtgacagccaacatacactgagctcttaccaggcactgttctgcacaagctttaaatgtattaactgatttaatgctcacaatagccccgtgaggtacatactgttatcatcgtccccaattgacagagaggcacagagaggttaagtgacttgttcaagcagtcacacagctagtaagtggcagagctgggttgaatcccagactcaccatttactagtgacagcagggtcacgtgaggcccagggcccagctggggtagggcttagaggttgggtcctcttcgaggctattaaaagtcatggaccagggcaatgatgtgtgttagtgactgccccatttgtctgcctggcccaggaggtccagttacctgctctcccccagttacccccacaacagcccacctctgtgtgagtgtattaattgttgttagtaagagtcattaatgacatggtgtgtttccttgcactttgaaatgcctttcaaagttatttggggcctccattgtctctgtaaccaccttttacccattttacagatgaggagacctaagctttgagactcaatctacattgccagccagattctcatccctcttggctctgattttattactgtctcacttcccaacatctttggtggcccataagaggtgggagaggctgtggccgagaggacactccccaatgcccaccttaccactgcccgccccaggcagtgaagtggggagggcgatgaaaggggcctttgtgttccatgctggaaatctcacacccaggaagaaaggtgggcagggatggcgggaggccttaatagtatgagtctggggcattgctgattcagagtgagctcctctctaggctcagcccatctgcagcttttctcacttcaggtcatggtgtgggctgctgcaggggtctgggtagggcttgggccctgggtcacagagcagatggtcctgaatggagcacaggatgtgtgctgtgtgccgggactggcccagagctcaggtggtagtggtgatggtggtggtggtgatggtggtggtggtgggcggggtgaggggaggcagggacagtacgtcgtaaggactcaaagctctcatttccttctctggcatgaagcctgactctctgaagaagagagacccagcatggatgtgaagaagcatgagcccccttccctacttctccttcccacttgcaggagtagcctctgtctgcctcccagccaggacccagcccccggaaattctgatttcacctgctcttctgccactgtgatctgaatcaggcctcttcacctttccaggcctcagcttctgcatctataaaatggctgtgaggaggctgggtctgtgccatcctgctacatttgtaggaaccaagagggatcaaaacccataagtgttttgtagggtgtaagttgtgcttgatttattgagattatttcttctggagccacagaaggatcttgagacctgacctctccttagaaaggttgacttcctctgtccccaacttgggaaactattattccccagtgagggtgggaattgccccaaggccttctaccactgccttgccctgggaggaaagggtaggggcctcagaatgtgatgcttagtgccaagacacaaaaactcagtttacacccgaagcctcccatgtactttacagctccccacacctctatggcccagatccaagttgccccttgggtgggcagcgtctaatcctctgggaatttgggcagtaggagaggcagctgctactcccaccactctcagcccttcttcccagttttctgctaagtgtacggggtgaggaggcacaggcctccatgcctggccagttttaaaaaaaatttttgtagagatgggggtctcattatgttgcacagtctggccttgaactcttggcttcaagcaatcctcccacctcagcctcccaaagtgctgagattacaggcaccagctaccctgcctggcccaggctgtcttcttagacatgctgagcaccctgagtggacctggccctgaaactgcccccaggggtgaccctagtcctggtggcagacaggcaagggttaaaaggtgtgggccggcccagttcctggccaggtaggctgggccattacctagtgggaggtggccaaggcatctgccactgctgctgactgccactaccagccggagccagggcctggtcgagacaactatttttgaggtatctgaggctaccccacagcactctctggcattggtgagcacctgggagcagtgggcccagggtgcgagggggataagggcattggggagctggggcagggtgtactgaagttcccttcggtagagagctaggtctgtgggagaggcacaccaacaatgcagggcagggtggtggtgggggggtaggggggcagtgagaatggagggcctgaggacaggggcaaagcccaaaacaccaatttcctttcctggcaccaagccgattcccggccggaaatggacgaggagggatcggggaaaagagaagtatgagtccccccttctccaccctatccctgcttcctttcctccccgccaggagtagcctctgtcctcccccaacccagggcccagctctccaagaaagaccagactgggctactaagaaaccattactcaggcacctgcctgcctatgcctgatttgttcactgcagtggaggaagcaggggctctggggagggtaatggcccagacattgagattttgtatttgctctaatagtggcaggatgtggaaatgaccccccaagtgttggggtgccacccaggtgaggtatcttggttgtaaacagttattacagccaggaatttctttctcggctgtggtgtcagaatggcagacctgaaaaacctgccgggcccgcctctgggtgtggggggtgccctctactgctctcccgctgcagctggtccctgggacaggatgggggccatggggtcactggtagggggagacctggggttggtgtgggggtgtgctggggaggggtttgctgggatccctttctcgccatctgggcggggatgaggcagctccaggccccaaggcaagtatgcagagggcaggtgagcggaggcagaagcttaggaactgggtgtgggggtgtggggcgttgactgtgtctagcctgcccagtgaccccatgactcatactctaactatgtccccccgaggtcgggctgatagggaggagttggggttcctgtgtggaccctgtctggacttccaggacgctctgagaaattagagaagaaaggattggctgggtgcagtgcctcacgcatgtaatcccagcactttgggaggccgaggcgggtggatcacctgaggtcaggagttcgagaccagcctggccaacatggtgaaacccaatttctactaaaaatacaaaagtagccaggcatggtggcgtgcacctgtaatcccagctactttggaggctgaagtgggagaattgcttgaacctgggaagtggaggctgcagtgagccaagatcgtgccaccactgcattccagcctaagtgacagagccaggccctatctccaaaaaaaaaaaaaaaaaaaaaaaaaaaagaatcgaagcagcccagcatggaattgggattggattgggaccaatgctggcaagggggaccgtggatggagttgggttcctgtgggggtaaaggaaggttccagggaaccctgtgagagttccttgggcctaaatgggggctgggaaagttggagccccagtgatctgggatgtggaggaacccctgccatgctgggaagtgtcagaccttagatgagtggggatgtggggcctgggtttgtcaaaaggctttagggactgatccccacccctgctgttgaaggcagggcaccactgcttcaagagaggggtacaggccctatggggcaggcaggaggactgcagagaaacatgacaccttacaagcagcttggcctcaccccacaatacacagatggggaaggggcttgaacccatgcctccttggttggctgggtcttcctcacaccaggctaacatgtcatgacaagctgccgacttcaaggtaggtgataatggagctctgtggccccataaagccctcccagtcacctgccacctaggttaggccaggtggtgggaggtgatgtcactcagctgcccagctggggactgagcatgatgtggaaggaagggagcaaactccagaggaggggtggccagccaaggcaggttccatggtcagctgagccatcgggggcagagaaggaggcaggaggcaggtggttcgttatttgcagctgtggactttgcttctcacaaatcccagcaggaggacttccctacactaggctcaggacaggctgtcatggcaagaggggctggagggaccctgggtcaagtgaacattctccttgctacactagagctacagaatggagttgggacaagcacagacccacagatctgagcttgaaccctggctccaccgcctcctcatttacttactctatcttttattcattcagctggcacccattcattgagcacttgtgtgtacagccatgttcagggtgctggtgatgctgctgaaaatgggacagataatgtttcctgtcctcgtcgatgttccaggaggcacaatctcttgttggacaaccgtttgtgagaggatataactgtggaagtgataattaagttctagaatgataagtgtgatgcaggggctggggtggtgagaggttgaagaaagcacttcaggcagcatccacagcctgggcaaaggccctgaggcctgagggaccagggagcttatgaggaagttggtggagttagagcggttctcatgagcgagagtgtaggaccagaggggtgggcctggtttatgtctgtggctatgggccagttatttcacctctgtgccttcctttcctcatctctaaaatggggatacgaatctttccgggtggctctgaagattgagtgtggcatcatag

SEQ ID NO: 9274 - DNA, 1871 bp, Rattus norvegicus
  ref <308>: DATABASE ACCESSION NUMBER: EMBL / X06832
  ref <309>: DATABASE ENTRY DATE: 1999-02-24
caccaccatcaccgccactgccaccaccaccgctaccgcagtgctcccactggtgcagagctccagtggtcacagacccacttccgccatcctcctgcagcagctcgccctctctttccgcaccgtccggctcgctatgcgctcctccgcggctttggcgcttctgctgtgcgccgggcaagtctttgcccttcctgtgaacagccctatgacaaaaggggacactaaggtgatgaagtgtgtcctggaggtcatctccgactcgctgtccaaacccagccccatgcctgtcagccctgagtgtctggagaccctccaaggagatgagagggtcctctccatccttcgacaccagaatttgctgaaggaacttcaagacctggcgcttcaaggtgccaaggagcgggcccagcagcagcagcagcagcagcagcagcagcagcagcagcagcagcagcaacaacaacaacacagcagctttgaggatgaactctcggaagtatttgagaaccagagccctgcagccaagcatggagacgcagcatcagaagccccctccaaggacactgtagagaagagagaggattctgacaaggggcaacaggatgcctttgagggaaccacagaaggacccagacctcaggcctttccagagcccaagcaggagtcctctatgatgggaaacagtcaatctccaggggaggacacagccaacaatacccaatcaccaaccagcctccccagccaggagcatgggattccacagaccacagaaggcagtgagagaggtcccagtgcccagcagcaagccagaaaagccaagcaagaggagaaagaggaagaggaggaggagaaagaggaagaggaggaggagaaagaggagaaggcgatcgccagagagaaggctgggcctaaagaagtccccacggcagcatccagttctcacttctattcaggctacaagaagatccagaaagatgatgatggtcagtcggagtctcaggcagtgaatggaaagacaggggcttctgaagctgtgccatctgaagggaagggggagctggagcactctcagcaggaggaagatggggaagaggccatggcagggcccccccaaggtctcttcccaggtgggaagggccaggagctggaacgtaagcagcaggaggaggaagaggaagaggagcgtctgtccagagaatgggaggacaagcgatggagcaggatggaccagctggccaaggagctgacagcagagaagcggctggagggggaagatgaccctgaccggtccatgaagctctccttccgggcccgggcctatggcttcagggaccctgggcctcagctacgccggggctggaggccatcttccagagaagacagtgtggaggcccgaggcgactttgaggaaaagaaggaagaggagggcagcgccaaccgcagagcagaggaccaggagctagagagcctgtcagccatcgaggcagagctggagaaggtggcccaccagctgcaggctttgcgacggggatgaggcactggctggtggggtccggccatggcttcaaggcccaactgctgctcaagtagggaggcttccagcctcagagcccaggttaccccttgccccttcccttctcttgctctcagcccctgccctggacacttctgcagggcagccctgaaagtcaacacagattctttctcggaacacaggcagctttctagaagtttctcttccaccttctaatccatggggcacaactgcagtagttctgatctttgggcgaaagccgagaactcctgactattaagatattccagataaaatttattgaaggaagaataaacctgctttcgggctcttc

SEQ ID NO: 9275 - protein, 466 aa, Rattus norvegicus
  ref <308>: DATABASE ACCESSION NUMBER: SWISS-Prot / CAA29988
  ref <309>: DATABASE ENTRY DATE: 2002-06-15
MRSSAALALLLCAGQVFALPVNSPMTKGDTKVMKCVLEVISDSLSKPSPMPVSPECLETLQGDERVLSILRHQNLLKELQDLALQGAKERAQQQQQQQQQQQQQQQQQQQQHSSFEDELSEVFENQSPAAKHGDAASEAPSKDTVEKREDSDKGQQDAFEGTTEGPRPQAFPEPKQESSMMGNSQSPGEDTANNTQSPTSLPSQEHGIPQTTEGSERGPSAQQQARKAKQEEKEEEEEEKEEEEEEKEEKAIAREKAGPKEVPTAASSSHFYSGYKKIQKDDDGQSESQAVNGKTGASEAVPSEGKGELEHSQQEEDGEEAMAGPPQGLFPGGKGQELERKQQEEEEEEERLSREWEDKRWSRMDQLAKELTAEKRLEGEDDPDRSMKLSFRARAYGFRDPGPQLRRGWRPSSREDSVEARGDFEEKKEEEGSANRRAEDQELESLSAIEAELEKVAHQLQALRRG

SEQ ID NO: 9276 - DNA, 1994 bp, Homo sapiens
  ref <308>: DATABASE ACCESSION NUMBER: Refseq / NM_001275
  ref <309>: DATABASE ENTRY DATE: 2000-10-31
gctgccaccgctcctgccactgcagtgctcgagccccgtgcaggggagcttgcgggaggatcgaccgacagacggacgcacgccgaggcactgcgcccccagccccgcgccggtgccaccgcagcccgaccccggccgccagtccagccgcccctcgcccggtgcctaggtgcccggccccacaccgccagctgctcggcgcccgggtccgccatgcgctccgccgctgtcctggctcttctgctctgcgccgggcaagtcactgcgctccctgtgaacagccctatgaataaaggggataccgaggtgatgaaatgcatcgttgaggtcatctccgacacactttccaagcccagccccatgcctgtcagccaggaatgttttgagacactccgaggagatgaacggatcctttccattctgagacatcagaatttactgaaggagctccaagacctcgctctccaaggcgccaaggagagggcacatcagcagaagaaacacagcggttttgaagatgaactctcagaggttcttgagaaccagagcagccaggccgagctgaaagaggcggtggaagagccatcatccaaggatgttatggagaaaagagaggattccaaggaggcagagaaaagtggtgaagccacagacggagccaggccccaggccctcccggagcccatgcaggagtccaaggctgaggggaacaatcaggcccctggggaggaagaggaggaggaggaggaggccaccaacacccaccctccagccagcctccccagccagaaatacccaggcccacaggccgagggggacagtgagggcctctctcagggtctggtggacagagagaagggcctgagtgcagagccagggtggcaggcaaagagagaagaggaggaggaggaggaggaggaggctgaggctggagaggaggctgtccccgaggaagaaggccccactgtagtgctgaacccccacccgagccttggctacaaggagatccggaaaggcgagagtcggtcggaggctctggctgtggatggagctgggaagcctggggctgaggaggctcaggaccccgaagggaagggagaacaggagcactcccagcagaaagaggaggaggaggagatggcagtggtcccgcaaggcctcttccggggtgggaagagcggagagctggagcaggaggaggagcggctctccaaggagtgggaggactccaaacgctggagcaagatggaccagctggccaaggagctgacggctgagaagcggctggaggggcaggaggaggaggaggacaaccgggacagttccatgaagctctccttccgggcccgggcctacggcttcaggggccctgggccgcagctgcgacgaggctggaggccatcctcccgggaggacagccttgaggcgggcctgcccctccaggtccgaggctaccccgaggagaagaaagaggaggagggcagcgcaaaccgcagaccagaggaccaggagctggagagcctgtcggccattgaagcagagctggagaaagtggcccaccagctgcaggcactacggcggggctgagacaccggctggcagggctggccccagggcaccctgtggccctggctctgctgtccccttggcaggtcctggccagatggcccggacgctgcttccggtagggaggcagcctccagcctgcccaagcccaggccaccctatcgccccctacgcgccttgtctcctactcctgactcctacctgccctggaacatcctttgcagggcagccccacaactttaaacattgacgattccttctctgaacacaggcagctttctagaagtttcccttcctccatcctatccactgggcacaactgcaataacttctgaccttttggtgaaagctgagaactcctgactgtaacatattctgtatgaactttatctaaagaaaaataaatctgttctgggctctttcctctg

SEQ ID NO: 9277 - protein, 457 aa, Homo sapiens
  ref <308>: DATABASE ACCESSION NUMBER: SWISS-Prot / P10645
  ref <309>: DATABASE ENTRY DATE: 2002-06-15
MRSAAVLALLLCAGQVTALPVNSPMNKGDTEVMKCIVEVISDTLSKPSPMPVSQECFETLRGDERILSILRHQNLLKELQDLALQGAKERAHQQKKHSGFEDELSEVLENQSSQAELKEAVEEPSSKDVMEKREDSKEAEKSGEATDGARPQALPEPMQESKAEGNNQAPGEEEEEEEEATNTHPPASLPSQKYPGPQAEGDSEGLSQGLVDREKGLSAEPGWQAKREEEEEEEEEAEAGEEAVPEEEGPTVVLNPHPSLGYKEIRKGESRSEALAVDGAGKPGAEEAQDPEGKGEQEHSQQKEEEEEMAVVPQGLFRGGKSGELEQEEERLSKEWEDSKRWSKMDQLAKELTAEKRLEGQEEEEDNRDSSMKLSFRARAYGFRGPGPQLRRGWRPSREEDSLEAGLPLQVRGYPEEKKEEEGSANRRPEDQELESLSAIEAELEKVAHQLQALRRG

SEQ ID NO: 9278 - DNA, 743 bp, Rattus norvegicus
  ref <308>: DATABASE ACCESSION NUMBER: EMBL / X06889
  ref <309>: DATABASE ENTRY DATE: 1993-09-12
tcggcttcttctggggcccggtcgccagcgcagtcgccacggtccgtgtcgccagcttgtctcagtttagagagggcaagatggcctcagccacagactctcgatatgggcagaaggagtcctcagaccagaacttcgactatatgttcaagatcctgatcattggtaacagcagtgtgggcaaaacctcattccttttccgctacgcagacgactcttttactccagcctttgtcagcactgtgggcatagacttcaaggtcaaaaccatctaccgcaatgacaagaggatcaagctgcagatctgggacacagcaggacaagagcggtaccgaaccatcaccacagcctactaccggggcgccatgggcttcattctaatgtatgacatcaccaatgaggagtccttcaatgcagtgcaggactggtccactcagatcaaaacttactcatgggacaatgcccaggtgctgctggtggggaacaagtgcgacatggaggacgagcgagtggtgtcctcagaacgaggccggcagctggccgaccacctgggctttgagttctttgaggccagcgccaaggacaacattaatgtcaagcagacctttgaacgtctggtggacgtgatctgtgagaagatgtcggagtccctagatactgcagaccttgcagtcacgggtgccaagcagggcccacagctcaccgaccagcaggcaccacctcatcaggattgcgcctgctga

SEQ ID NO: 9279 - protein, 220 aa, Rattus norvegicus
  ref <308>: DATABASE ACCESSION NUMBER: SWISS-Prot / P05713
  ref <309>: DATABASE ENTRY DATE: 2002-06-15
MASATDSRYGQKESSDQNFDYMFKILIIGNSSVGKTSFLFRYADDSFTPAFVSTVGIDFKVKTIYRNDKRIKLQIWDTAGQERYRTITTAYYRGAMGFILMYDITNEESFNAVQDWSTQIKTYSWDNAQVLLVGNKCDMEDERVVSSERGRQLADHLGFEFFEASAKDNINVKQTFERLVDVICEKMSESLDTADPAVTGAKQGPQLTDQQAPPHQDCAC

SEQ ID NO: 9280 - DNA, 777 bp, Homo sapiens
  ref <308>: DATABASE ACCESSION NUMBER: EMBL / M28210
  ref <309>: DATABASE ENTRY DATE: 2000-03-04
gaattccgcgtagtcgccgttgcatcggtgcagggcaagatggcatcggccacagactcgcgctatgggcagaaggagtcctcggatcagaacttcgactacatgttcaagattctcatcatcggcaacagcagcgtgggcaagacgtccttcctcttccgctatgctgacgactcgttcacgcctgccttcgtcagcaccgtgggcatcgacttcaaggtcaagaccatctatcgcaacgacaagaggatcaagctgcagatctgggacacagcagggcaagagcggtaccggaccatcaccaccgcatactaccggggcgccatgggcttcatcctcatgtatgacatcaccaacgaggaatccttcaatgcagtgcaggactggtccacccagatcaagacctactcatgggacaatgcccaggtgctgctggtaggaaacaagtgtgacatggaggatgagcgggtggtgtcatcagaacgtggccggcagctagctgaccaccttgggttcgagttctttgaggcaagcgccaaggacaacattaacgtcaagcagacctttgagcgcctggtggatgtcatctgcgagaagatgtccgagtcgttggacacggcggaccctgcggtcacaggcgccaagcagggcccacagctcagtgaccagcaggtgccaccgcaccaggactgcgcctgctgagagccatcccactccctttcccctcttccctgtcttccccaccttcccgcaactgacccggcctgacccggcccc

SEQ ID NO: 9281 - protein, 220 aa, Homo sapiens; identical to SEQ ID NO: 8506
  ref <308>: DATABASE ACCESSION NUMBER: SWISS-Prot / P20336
  ref <309>: DATABASE ENTRY DATE: 2002-06-15

SEQ ID NO: 9282 - DNA, 2288 bp, Rattus norvegicus
  ref <308>: DATABASE ACCESSION NUMBER: EMBL / X06942
  ref <309>: DATABASE ENTRY DATE: 1993-09-12
gcggtagcgtgtgacaggaggcctatggcacctgcccagtcctacctcagcccatcttgaaaaaatccttagacaacatggaaccaccacgaggccctcctgctagtggggctgagccatctcgggcagttggcactgtcaaagtgtacctgcctaacaagcaacgcacagtggtgactgtccgggatggcatgagtgtctatgactctttggacaaggccctcaaggtgcggggtctcaatcaggactgctgtgtggtctacagactcatcaaaggaagaaagacagtcactgcctgggacacagccattgcacctctggatggcgaggagctcattgtggaggtcctggaagatgtgccactgaccatgcacaattttgtacggaagacattcttcagtttggccttctgtgacttctgccttaagtttctgttccacggctttcgctgccaaacctgtggctacaagttccaccagcattgttcctccaaggtccccacggtctgcgttgacatgagtaccaaccgccgacagttctaccacagcatccaggatttgtctggaggctccaggcagcaggaggttccctcaaatctctctgtgaatgagctgctaaccccccagggtcccagtccctttacccagcaacgtgaccaggagcacttctccttccctgcccctgccaatcccccactgcagcgcatccgctccacatctactcctaacgtccacatggtcagcaccacagctcccatggactccagcctcatgcagtttactgctcagagcttcagcaccgatgctgctggtagaggtggtgatggagctcctcggggtagccctagcccagctagtgtgtcttcagggaggaagtccccacattccaagttacctgcagaacagcgggaacggaagtccttggcagatgaaaagaaaaaagtgaagaacctggggtaccgggactcaggctattactgggaggtgccacccagtgaggtacagctgttgaagaggatcgggacaggctcttttggcactgtgtttcgggggcgttggcatggcgatgtagctgtgaaagtgctcaaggtggcccaacctaccgctgagcaggcccaggccttcaagaatgagatgcaggtgctcaggaagacacgacatgtcaacattttgctgtttatgggtttcatgactcggccagggtttgccatcatcacacagtggtgtgagggttccagcctctaccaccacctacatgtggctgacacgcgctttgacatggtccagctcattgatgtggcccggcagactgcccagggcatggactacctccacgccaagaacatcattcaccgagacctaaagtccaacaatatcttcctacatgaggggctcacagtcaagattggtgacttcggcctggccacagtgaagacacgatggagtggggcccagcccttagagcagccctcagggtctgtgctgtggatggcagctgaggtgatccgaatgcaggacccgaacccctacagcttccagtcggatgtctatgcctatggtgttgtgctctatgagcttatgaccggctcactgccctacagccacattggcagccgtgaccagatcatctttatggtgggtcgtggctatctgtctccggacctcagcaaaatcttcagtaattgccccaaagccatgaggcgcttgctgactgactgcctcaagttccagcgggaggagcggcctctatttccccagattctggccacgatcgagctgctgcagcggtcactccccaagattgagcggagtgcctccgaaccctccttgcaccgtacccaggctgatgagttgcctgcctgccttctcagcgcagcccgccttgtgccttagactccactcccagcccactagggagccattttcagcttaccatgccaaggcacccccttcctaccagccaatcattgttctgtctgtgccctgatactgcctcaggattccctatcccacaccctgggaaatttgggggactccaaaaactgaggtcccctgcttcctccataatttggtctcctcttggctttggggatagttctaatttggagagctgttttacctccaatggctgggattcagtgcaaagattccactcggaacctctttataaagttttcgcctgacatgtcttcactgaattatggggttcccagcaccccatgcggatttgggagtttccctttgtctccccccactattcaaggactctcctctttaccaagaagcaca

SEQ ID NO: 9283 - protein, 604 aa, Rattus norvegicus
  ref <308>: DATABASE ACCESSION NUMBER: SWISS-Prot / P14056
  ref <309>: DATABASE ENTRY DATE: 2001-10-16
MEPPRGPPASGAEPSRAVGTVKVYLPNKQRTVVTVRDGMSVYDSLDKALKVRGLNQDCCVVYRLIKGRKTVTAWDTAIAPLDGEELIVEVLEDVPLTMHNFVRKTFFSLAFCDFCLKFLFHGFRCQTCGYKFHQHCSSKVPTVCVDMSTNRRQFYHSIQDLSGGSRQQEVPSNLSVNELLTPQGPSPFTQQRDQEHFSFPAPANPPLQRIRSTSTPNVHMVSTTAPMDSSLMQFTAQSFSTDAAGRGGDGAPRGSPSPASVSSGRKSPHSKLPAEQRERKSLADEKKKVKNLGYRDSGYYWEVPPSEVQLLKRIGTGSFGTVFRGRWHGDVAVKVLKVAQPTAEQAQAFKNEMQVLRKTRHVNILLFMGFMTRPGFAIITQWCEGSSLYHHLHVADTRFDMVQLIDVARQTAQGMDYLHAKNIIHRDLKSNNIFLHEGLTVKIGDFGLATVKTRWSGAQPLEQPSGSVLWMAAEVIRMQDPNPYSFQSDVYAYGVVLYELMTGSLPYSHIGSRDQIIFMVGRGYLSPDLSKIFSNCPKAMRRLLTDCLKFQREERPLFPQILATIELLQRSLPKIERSASEPSLHRTQADELPACLLSAARLVP

SEQ ID NO: 9284 - DNA, 2458 bp, Homo sapiens; identical to SEQ ID NO: 4854
  misc_feature (1)..(2458): n=a, c, g or t
  ref <308>: DATABASE ACCESSION NUMBER: EMBL / X04790
  ref <309>: DATABASE ENTRY DATE: 1996-07-23

SEQ ID NO: 9285 - protein, 606 aa, Homo sapiens [sequence omitted]

SEQ ID NO: 9286 - DNA, 2971 bp, Rattus norvegicus
  ref <308>: DATABASE ACCESSION NUMBER: EMBL / X07266
  ref <309>: DATABASE ENTRY DATE: 1993-09-12
cggcggccgagtgcgaggcagagagcgagatctgtacggtgtgcgagcgagggcgatcacagcctgcgaacaagcaaagaaagagagcgagtgagcggcgaggcgcctgcgcgatgctcgggcccctgagcccgcggccctgagctagccgggacggacatgcgcgggagggcgccgcggggccccgctcccctgggggaatgaaagctactggttgacttaagagcacctggccttcacagattcgtggccatcccagggtgggcacaatgtcaacagcaggagttgctgctcaggatattcgagtcccattaaaaactggatttctccataatggccaggctttggggaatatgaagacctgctggggcagtcgcaatgagtttgaaaagaattttttaaatatcgatccaataaccatggcctacaatctgaactcccctgctccggagcatctaacaaccctcggatgtgcttctccgtccgctccagggagcggtcacttctttgcagagcgtggtccatctccaaagtcaagcttgccccctcttgttatcccaccaagtgaaagctcgggacagcgtgaagaggatcaagttctgtgtggttttaagaaactctcagtgaatggggtgtgcgcttccacacctccacttacacccattcaaagctgctcttccccgtttccctgtgcagctccctgtgatcgcagttcccgaccgctcccaccattgcccatctctgaggacccatctctggatgaggccgactgtgaggtggaatttctaaccagtgcagatacagacttccttttagaagactgcgtgccttccgatttcaaatacgatgttcctggcaggcgaagcttccgtgggtgcggacagatcaattatgcgtattttgacagcccaactgtttctgtggcagatcttagctgtgcatctgaccagaacagagttgttccagatccaaaccctcccccgcctcaaagccatcgcagattaaggaggtctcactcaggaccagccgggtcgtttaacaagccagccatccggatatctagctgcacacacagagcctctcctagctcggatgaagacaagcctgagatcccgccccgggttcctatacctcccaggccagccaagccagactacagaaggtggtcagcagaagtgacctctaacacatacagtgatgaagataggcctcccaaagtccccccgagagaacctttgtctcggagtaactcccgtaccccaagtcctaaaagccttccgtcttacctcaatggggtcatgcctccaacacagagctttgcccccgaccccaagtatgtcagcagcaaagccctgcagagacagagcagcgaagggtctgccaaggccccctgcatcctgcccatcattgagaatgggaagaaggtcagctccacgcattattacctactacctgagagaccgccataccttgacaaatatgagaagtattttagggaagcagaagaagcaaacccaagcacccagattcagccattacctgctgcctgtggtatggtctctgccacagacaagctggcctccagaatgaaaatggatgtgggcggccacgggaagcgcaaacacttatcctacgtggtttctccgtagatatggggtcatggttcaacagaagttacatggaacggatggctgccaagtttccaatttgaggttcatagaacagtgtcaagtggcaacatgaagtggtggactctgccttggtgaggaaggcatagagccgttatgaggtgctgttgtgctgggagtccctgacctatcagcataggaagaaaaaagtatgatttaaagatgtgctagagggacacttttacatttgactacattatatacctatgtataaacgtgcggtgtaaccatagaccatagctgcaggataaccaattagtcactctagagtaatctatattcagaacaattcaaacgagctggaggcacagctccagacagtgtgaaaattgagcaaacgggagagagcagtactgttgatcagttataaatgtagagattcctggcattcaggcctgctatctagtttgttttcttccccttccctgccagcagtcttctccatacacgacagggcgtgctcttcgccaggcctgtaacgtcttgttgaaatcgttctatggcctaatacttgccgctctgggcgtttgtcttgagaggagaggacagccgtttctggaccatgttatctatcacctgtgtatgtctctcttggaaatggacagaattggtgacttttccatgctattcctgcttttcccgtccactgaagaggctttcaagagtgcagttgagtggtgctggccgtcagtgttgggtataagttttatagaccagcccagtgattagccatgattgagagttatcgtggggtgtatgggatgttgttttgtttttgagactttaaagtacaacacaagctggtcttgtgttgttggttcctattcagtatttcctggggattgtttgctttttaagtgaaacacttctgaccaatagcacagaacgtcttaatgccagaggtcacttcagcatcttcctgcttagaaaactcacagctggctgcctcactgccctgagagtcagtgagacgcatagcttgtgttcaatttttacatcctctgattgtttatcttgtatagataagcacaaagagaaggtgcttgctaacagagggacaccgctgccatgtcccaacaagctgttcagtttaaactgctgaatgacattatttgagctatttaaagcttatttttagtatgaactaaatgaaggttaaaacatgctttagaaaatgcactgatctccgcactgtgtgtacagtattggacaaaggatttgttcattttgttgcattattttgaatattgtcttttcattttaataaagttatattacttatt

SEQ ID NO: 9287 - protein, 459 aa, Rattus norvegicus
  ref <308>: DATABASE ACCESSION NUMBER: SWISS-Prot / CAA30252
  ref <309>: DATABASE ENTRY DATE: 1997-11-01
MSTAGVAAQDIRVPLKTGFLHNGQALGNMKTCWGSRNEFEKNFLNIDPITMAYNLNSPAPEHLTTLGCASPSAPGSGHFFAERGPSPKSSLPPLVIPPSESSGQREEDQVLCGFKKLSVNGVCASTPPLTPIQSCSSPFPCAAPCDRSSRPLPPLPISEDPSLDEADCEVEFLTSADTDFLLEDCVPSDFKYDVPGRRSFRGCGQINYAYFDSPTVSVADLSCASDQNRVVPDPNPPPPQSHRRLRRSHSGPAGSFNKPAIRISSCTHRASPSSDEDKPEIPPRVPIPPRPAKPDYRRWSAEVTSNTYSDEDRPPKVPPREPLSRSNSRTPSPKSLPSYLNGVMPPTQSFAPDPKYVSSKALQRQSSEGSAKAPCILPIIENGKKVSSTHYYLLPERPPYLDKYEKYFREAEEANPSTQIQPLPAACGMVSATDKLASRMKMDVGGHGKRKHLSYVVSP

SEQ ID NO: 9288 - DNA, 3099 bp, Homo sapiens
  ref <308>: DATABASE ACCESSION NUMBER: Refseq / NM_018948
  ref <309>: DATABASE ENTRY DATE: 2002-11-05
tgcgaggcagagtgctagcgggagcgcgagccagcaagaggcgcctgcgcgatgtccgggcccctgagcccgcggcgctgagccagccgggacggacatgcgcgggagggcgccgcggggcagccgccgctcctccgggggaatgaaagctactggttgattttaaagtgcctgggcctcacaggtttggagatgtcccagaataaggcacaatgtcaatagcaggagttgctgctcaggagatcagagtcccattaaaaactggatttctacataatggccgagccatggggaatatgaggaagacctactggagcagtcgcagtgagtttaaaaacaactttttaaatattgacccgataaccatggcctacagtctgaactcttctgctcaggagcgcctaataccacttgggcatgcttccaaatctgctccgatgaatggccactgctttgcagaaaatggtccatctcaaaagtccagcttgccccctcttcttattcccccaagtgaaaacttgggaccacatgaagaggatcaagttgtatgtggttttaagaaactcacagtgaatggggtttgtgcttccacccctccactgacacccataaaaaactccccttcccttttcccctgtgcccctctttgtgaacggggttctaggcctcttccaccgttgccaatctctgaagccctctctctggatgacacagactgtgaggtggaattcctaactagctcagatacagacttccttttagaagactctacactttctgatttcaaatatgatgttcctggcaggcgaagcttccgtgggtgtggacaaatcaactatgcatattttgataccccagctgtttctgcagcagatctcagctatgtgtctgaccaaaatggaggtgtcccagatccaaatcctcctccacctcagacccaccgaagattaagaaggtctcattcgggaccagctggctcctttaacaagccagccataaggatatccaactgttgtatacacagagcttctcctaactccgatgaagacaaacctgaggttccccccagagttcccatacctcctagaccagtaaagccagattatagaagatggtcagcagaagttacttcgagcacctatagtgatgaagacaggcctcccaaagtaccgccaagagaacctttgtcaccgagtaactcgcgcacaccgagtcccaaaagccttccgtcttacctcaatggggtcatgcccccgacacagagctttgcccctgatcccaagtatgtcagcagcaaagcactgcaaagacagaacagcgaaggatctgccagtaaggttccttgcattctgcccattattgaaaatgggaagaaggttagttcaacacattattacctactacctgaacgaccaccatacctggacaaatatgaaaaattttttagggaagcagaagaaacaaatggaggcgcccaaatccagccattacctgctgactgcggtatatcttcagccacagaaaagccagactcaaaaacaaaaatggatctgggtggccacgtgaagcgtaaacatttatcctatgtggtttctccttagaccttggggtcatggttcagcagaggttacataggagcaaatggttctcaattttccagtttgattgaagtgcagagaaaaatcccttagattgcaaaataaaatagttgaactctctgtcttcatgtggaaggtttagagcagttgtgagatgctgttatgctgagaaaccctgactttgttagtgttggaaaaaagtcttacaagtctataatttaaagatgtgatggtggggaggggaggatggggaagctttttatatatgcatacattacatacctatatataaacttgtggtataaccatagaccatagctgcaggttaaccaattagttactatcgtagagtaatatatattcagaataataaactcaagctggagaaatgagtcctgatagactgaaaattgagcaaatggaagaagatacagtattgtttagatcagaatcattaaaaaatatttttgtttagtaagtttgaagatttctggcttttaggccttttctattttgttccatttatttttgcaggcaatcttttccatggagggcagggtatccattctttaccatgggtgtacctgcttaggttaaaaatcataccaaggcctcatacttccaggtttcatgttgcgtcttgttgagggagggagagcaggttacttggcaaccatattgtcacctgtacctgtcacacatcttgaaaaataaaacgataatagaactagtgactaattttcccttacagttcctgcttggtcccacccactgaagtagctcatcgtagtgcgggccgtattagaagcagtggggtacgttagactcagatggaaaagtattctaggtgccagtgttaggatgtcagttttacaaaataatgaagcaattagctatgtgattgagagttattgtttggggatgtgtgttgtggttttgcttttttttttttagactgtattaataaacatacaacacaagctggccttgtgttgctggttcctattcagtatttcctggggattgtttgctttttaagtaaaacacttctgacccatagctcagtatgtctgaattccagaggtcacatcagcatctttctgctttgaaaactctcacagctgtggctgcttcacttagatgcagtgagacacatagttggtgttccgattttcacatccttccatgtatttatcttgaagagataagcacagaagagaaggtgctcactaacagaggtacattactgcaatgttctcttaacagttaaacaagctgtttacagtttaaactgctgaatattatttgagctatttaaagcttattatattttagtatgaactaaatgaaggttaaaacatgcttaagaaaaatgcactgatttctgcattatgtgtacagtattggacaaaggattttattcattttgttgcattattttgaatattgtcttttcattttaataaagttataatacttaaaaaaaaaaaaaaaaaaaaaa

SEQ ID NO: 9289 - protein, 462 aa, Homo sapiens
  ref <308>: DATABASE ACCESSION NUMBER: Refseq / NP_061821
  ref <309>: DATABASE ENTRY DATE: 2002-11-05
MSIAGVAAQEIRVPLKTGFLHNGRAMGNMRKTYWSSRSEFKNNFLNIDPITMAYSLNSSAQERLIPLGHASKSAPMNGHCFAENGPSQKSSLPPLLIPPSENLGPHEEDQVVCGFKKLTVNGVCASTPPLTPIKNSPSLFPCAPLCERGSRPLPPLPISEALSLDDTDCEVEFLTSSDTDFLLEDSTLSDFKYDVPGRRSFRGCGQINYAYFDTPAVSAADLSYVSDQNGGVPDPNPPPPQTHRRLRRSHSGPAGSFNKPAIRISNCCIHRASPNSDEDKPEVPPRVPIPPRPVKPDYRRWSAEVTSSTYSDEDRPPKVPPREPLSPSNSRTPSPKSLPSYLNGVMPPTQSFAPDPKYVSSKALQRQNSEGSASKVPCILPIIENGKKVSSTHYYLLPERPPYLDKYEKFFREAEETNGGAQIQPLPADCGISSATEKPDSKTKMDLGGHVKRKHLSYVVSP

SEQ ID NO: 9290 - DNA, 1388 bp, Rattus norvegicus
  ref <308>: DATABASE ACCESSION NUMBER: EMBL / X07320
  ref <309>: DATABASE ENTRY DATE: 1993-09-12
gaattcctgtcacttccattcaagagcctacaagaacctaactaggtgcttgggatcccctgagatccagctgaccatgacccgggatgaggccctccctgactctcattctgcacagaatttctatgagaactacgagcccaaggagatcctgggcaggggagtcagcagcgtggtcaggagatgcattcacaaacctacgtgccaagaatacgcagtaaaaatcatcgacatcaccggcggaggaagctttagctccgaggaggtacaggagcttcgggaagccaccctgaaggaggtggacattctgcagaaggtctcaggacaccccaacatcatacagctgaaggacacttacgagaccaacactttcttcttcttggtatttgatctgatgaagagaggggaactctttgactatctcacagagaaggtcaccttgactgagaaggaaaccagaaagatcatgcgggccctgctggaggtggtctgcaccttgcacaaactcaacattgtccatcgggacctgaagccggagaacatccttctggatgacaacatgaacatcaagctcactgacttcgggttttcctgccagctgcagccaggagagaagctccgagaggtttgtgggactcccagttatctggcccccgaaatcatccagtgctccatggacgaaggccatcctggctatggaaaggaggtggacatgtggagcacaggagtcatcatgtatacgctgctggctggctccccgcccttctggcaccggaagcaaatgctaatgttgaggatgatcatggatggcaaataccagttcggctcaccagagtgggatgactactcagataccgtgaaagacttggtatctcgcttcttggtggtgcaaccccaggaccgctgctcggcggaagaggccttggcgcatcctttcttccaggagtacgtggtggaagaggtgcggcacttcagccctcgagggaagttcaaggtcatctgtctaactgtgctggcctcggtaaggatctactaccagtaccgtcgggtgaagccggtaaccagggagatcgtcatccgagacccctacgccctacggccattgcgcagactcatcgacgcctatgctttccgcatctacggccactgggtgaagaaagggcaacagcagaacagagctgccctcttcgagaacacgcccaaggcagtgctcctctccttggctgaggaggaggacttctgaggggtggcggggcacaggggagaaagcaaacagggtacgcgcccccagaactgtgagaagaggatgcctcaaggaggaggcttctgcaaaggagctgtgaccctactctgcactctcaaaggctcgccactagatgcgggaattc

SEQ ID NO: 9291 - protein, 387 aa, Rattus norvegicus
  ref <308>: DATABASE ACCESSION NUMBER: SWISS-Prot / P13286
  ref <309>: DATABASE ENTRY DATE: 2002-06-15
TRDEALPDSHSAQNFYENYEPKEILGRGVSSVVRRCIHKPTCQEYAVKIIDITGGGSFSSEEVQELREATLKEVDILQKVSGHPNIIQLKDTYETNTFFFLVFDLMKRGELFDYLTEKVTLTEKETRKIMRALLEVVCTLHKLNIVHRDLKPENILLDDNMNIKLTDFGFSCQLQPGEKLREVCGTPSYLAPEIIQCSMDEGHPGYGKEVDMWSTGVIMYTLLAGSPPFWHRKQMLMLRMIMDGKYQFGSPEWDDYSDTVKDLVSRFLVVQPQDRCSAEEALAHPFFQEYVVEEVRHFSPRGKFKVICLTVLASVRIYYQYRRVKPVTREIVIRDPYALRPLRRLIDAYAFRIYGHWVKKGQQQNRAALFENTPKAVLLSLAEEEDF

SEQ ID NO: 9292 - DNA, 1377 bp, Homo sapiens; identical to SEQ ID NO: 3869
  ref <308>: DATABASE ACCESSION NUMBER: Refseq / NM_006213
  ref <309>: DATABASE ENTRY DATE: 2000-11-01

SEQ ID NO: 9293 - protein, 386 aa, Homo sapiens; identical to SEQ ID NO: 3870
  ref <308>: DATABASE ACCESSION NUMBER: SWISS-Prot / Q16816
  ref <309>: DATABASE ENTRY DATE: 2002-06-15

SEQ ID NO: 9294 - DNA, 1290 bp, Rattus norvegicus
  ref <308>: DATABASE ACCESSION NUMBER: EMBL / X07636
  ref <309>: DATABASE ENTRY DATE: 1993-09-12
tcttagcacaaacccaattctagctctaaggaaatctcaattcagtcccagatctgtctccagcctgagggcccatcatggagaaggactttcaagatatccagcagctggactctgaggaaaacgaccatcagctcattggcgatgaggaacaaggctctcatgtgcagaatcttaggacagaaaatccacgttggggaggacagcctccttccaggccctttccacagcgcctctgctccaagttccgcctcagtctgctcgccctggccttcaacattctcctgctggtggtcatctgtgtggtttcatcccaaagcatgcagctgcaaaaggagttctggaccctgaaagaaaccttgagcaacttctccaccaccaccctgatggagttcaaggctctggactcccacggaggtagcaggaatgacaacttgacttcttgggaaaccatactggagaaaaagcagaaggacataaaagcagatcactccacgctgctcttccacctgaagcacttccccctggatctgcgaaccctgacctgtcagctggcgttcttcctgagcaacggcacagaatgctgccccgttaactgggtggagtttggtggaagctgctactggttttctcgggatgggctcacctgggctgaggctgaccagtactgccaaatggagaatgcccatctgctggtcatcaactccagggaggagcaggaattcgttgtaaagcacaggggcgcgtttcacatttggataggtctcaccgacaaggatggctcctggaaatgggtggatgggacggaatatagaagtaacttcaagaattgggctttcactcagccagataactggcagggccatgaagaggggggaagtgaagactgtgctgaaatcctgtcagatggcctctggaatgacaacttctgccagcaggtgaaccgctgggcttgtgaaaggaaacgggacatcacctactaggagtctgctctactatgtctttgtcaaccctccccccaacccccgcatcactcattaggagtctgctctaccatgtctctgccccaccccatcaccgcatcaccccaacattttcactggggatattggagcaagaaagagagacagagtcccaggcatgaggggggttatgggagaatggaaagggggtggctctatggtctcatacgttaggaagactgagattccacccctcttcacaacttattacaattgttataaatttcaacaatggagtaggaaagaaaaaaataaacaataccagaaa

SEQ ID NO: 9295 - protein, 301 aa, Rattus norvegicus
  ref <308>: DATABASE ACCESSION NUMBER: SWISS-Prot / P08290
  ref <309>: DATABASE ENTRY DATE: 2000-05-30
MEKDFQDIQQLDSEENDHQLIGDEEQGSHVQNLRTENPRWGGQPPSRPFPQRLCSKFRLSLLALAFNILLLVVICVVSSQSMQLQKEFWTLKETLSNFSTTTLMEFKALDSHGGSRNDNLTSWETILEKKQKDIKADHSTLLFHLKHFPLDLRTLTCQLAFFLSNGTECCPVNWVEFGGSCYWFSRDGLTWAEADQYCQMEIAHLLVINSREEQEFVVKHRGAFHIWIGLTDKDGSWKWVDGTEYRSNFKNWAFTQPDNCQGHEEGGSEDCAEILSDGLWNDNFCQQVNRWACERKRDITY

SEQ ID NO: 9296 - DNA, 1309 bp, Homo sapiens
  ref <308>: DATABASE ACCESSION NUMBER: EMBL / M11025
  ref <309>: DATABASE ENTRY DATE: 1999-07-02
gccagggttgcctgcgggagccaggcgtccgctctccacacctttcacagccccagccctcagagcaacctcagcccagcccagcccagctccagctccagctccagcccgggccccatcatggccaaggactttcaagatatccagcagctgagctcggaggaaaatgaccatcctttccatcaaggtgaggggccaggcactcgcaggctgaatcccaggagaggaaatccatttttgaaagggccacctcctgcccagcccctggcacagcgtctctgctccatggtctgcttcagtctgcttgccctgagcttcaacatcctgctgctggtggtcatctgtgtgactgggtcccaaagtgagggtcacagaggtgcacagctgcaagccgagctgcggagcctgaaggaagctttcagcaacttctcctcgagcaccctgacggaggtccaggcaatcagcacccacggaggcagcgtgggtgacaagatcacatccctaggagccaagctggagaaacagcagcaggacctgaaagcagatcacgatgccctgctcttccatctgaagcacttccccgtggacctgcgcttcgtggcctgccagatggagctcctccacagcaacggctcccaaaggacctgctgccccgtcaactgggtggagcaccaaggcagctgctactggttctctcactccgggaaggcctgggctgaggcggagaagtactgccagctggagaacgcacacctggtggtcatcaactcctgggaggagcagaaattcattgtacaacacacgaaccccttcaatacctggataggtctcacggacagtgatggctcttggaaatgggtggatggcacagactataggcacaactacaagaactgggctgtcactcagccagataattggcacgggcacgagctgggtggaagtgaagactgtgttgaagtccagccggatggccgctggaacgatgacttctgcctgcaggtgtaccgctgggtgtgtgagaaaaggcggaatgccaccggcgaggtggcctgaccccagcacacctctggctaacccataccccacacctgcccagctctggcttctctgttgaggattttgaggaaaggaagaaacactgagacaggggtatggggaagagctgagcaaagagagaaaggaggtagtttaagagtccctgaccctggaggactgagatcccacctccttctgtaattcattgtaattattataatcgtcagcctcttcaatggcgtaggaaagaagaaacaaatgcttgaatctc

SEQ ID NO: 9297 - protein, 311 aa, Homo sapiens
  ref <308>: DATABASE ACCESSION NUMBER: SWISS-Prot / P07307
  ref <309>: DATABASE ENTRY DATE: 2002-06-15
MAKDFQDIQQLSSEENDHPFHQGEGPGTRRLNPRRGNPFLKGPPPAQPLAQRLCSMVCFSLLALSFNILLLVVICVTGSQSEGHRGAQLQAELRSLKEAFSNFSSSTLTEVQAISTHGGSVGDKITSLGAKLEKQQQDLKADHDALLFHLKHFPVDLRFVACQMELLHSNGSQRTCCPVNWVEHQGSCYWFSHSGKAWAEAEKYCQLENAHLVVINSWEEQKFIVQHTNPFNTWIGLTDSDGSWKWVDGTDYRHNYKNWAVTQPDNWHGHELGGSEDCVEVQPDGRWNDDFCLQVYRWVCEKRRNATGEVA

SEQ ID NO: 9298 - DNA, 7776 bp, Rattus norvegicus
  ref <308>: DATABASE ACCESSION NUMBER: EMBL / X07944
  ref <309>: DATABASE ENTRY DATE: 1999-02-10
ggatcccggcatccgggcttggaaaggggttttagttgagaattaacaaaccattaacagcgtgtacatagtaacaagttggagttactcctaagtcttcccaatactgaatatgtaagtaaccagtcagtcccacttattctttaacaatgtaactttggtgggggctggggatttagctcagtggtagagcgcttacctaggaagcgcaaggccctgggttcggtccccagctccaaaaaaaaaaaaaaccaaaaaaaaaaaaacaaaaaaacaatgtaactttggtggatacaaattcactgcccagactcttttccggtccagacttctcaaagtgacttagttgtagctaccctgaaagatttaacagaataagggacagctgttggcttgaaacccctcaacctcttccctaacatgcgactcttgcttagataaaaggcattatcttagcatgcaactggtgcctagaatctagttggaagctaccaacgtaaaacggagtggctctccagcctctgctggcttgtctctcagcaagttttcaggcataggcacacagggtggtgaagcagggtcaatctacaccacgaagtctagtctacgtggcccgcacacaactcaaggcccatccatcctcggctcgcacctgcgatcccgccagggaataaatactacgcgctgaatgcaaagccgaggaagagttttgctagtcttccaggccagggctcagccgttaggacccggggagagactgcgtgattgaaccggttgcaagacggacgaccaagcgcctgtgcgcatgcaccggccgaatcccgcctgctgcccataggaccctgcggcaagctggtagtcaggactggtggtgtggtgcgcgtgcgcgggcctgccgcagggagtgtccggcacgaggccgggcggggagcgcgggcggatgggcggggggctgggcacgcgcggcgccccgccccactgacgcgccgggcccgcgcctcccgcctccggcgtcgggaaccgggttggccgccaaggagtccccgcccctcccccgcgcctcccggccggaaccgatcggggctggtttgagctggtgcgtctccatgacgacgtgctccgcctataagtagcggcgcgtcgcaccgtcgggctttgtcagtccctgcagccgccgccgccggccgccttcagtcagcagctcggcgccacctccggtcggcgactgcggcgggctcgacgaggcggctgacggggcggcggcgggaagacggccgggtgcgccttggggtttagtggcggcttctccatgggtccagccagccgcttccctgtgctgtgaggtaagcggggcgcgggaggattgtgcggccacgtgtcgcgaggcccggactgcggtcgccggcaggggacacgtggccggaggctggtgaccttgcgagcctccgccctgaaggcagcagctgttcctggcccttggctgcaagccctcggatcgccccatgggagcccgcatcgtgtcagccgggctcggcgctccacttgcccgggcggtgatggagggcaggtgcaggggagcccggccgctagcagccgccctgcagtttcctgctttctttagttttgctacgtgtacagagcagagctgatgactcgaagtggaagtcgatagacctaatttagtcagggagtccctgctaatgaatactcaccggctgtgacttggatttagaactgaactctttgaatgacttaggggtttacgggaaacggattcccggctgtcttggaagcccgactcagaatcctcaataactggtagaactggggagcagatcctgtcaggaatgtctgggagaggacaaaagaatgcagtggcttgttttattcaaacctaacatcgggcagaatttgactggagttcatttttgttttaattggcttgtatctcatccagatttaacttcttgtgctaattgtttaacaggatttagctgcttcccatgccaaagtgttagcattttttttcttttatcttttttttctttttctttttttttttttttttttttgtattgaggcaaagatagggaaaggcaaaataagtggtatttcaatgaaagttttccaggtttaagccggaaggctgcctggaaaatacttaacaagacctaaaattacaaagttactgccaaagcccattcatcagttctaagtgatatacaactgagttggctggcgctggtctgtagtcttcacttaagagaggtttatgcagctaacgaagttgaccagtgccaaaagtctccttaaagcttaaagtgtgctttatcatgcatggatttggatttatgacaggctcatccccgtggcctctcatagtgtcccgtgctagagcaaactggctcctaaccattgcccagccttggtgcatgtaggctgctggcactgaagtgggtcacacaatggaaaaaagttttacctggccacttgctgctggtgtccatttcataagacccaggcaggagcttttattaagcgtggtgatcttgcttatttttgttagtaaaaaagttggccaaaaatttcttccatatggttattatccataagtggatattagaaggcacttgaggactgttggattcccagaagtgcgcatttggtaggcaatccaggctctagaatactgatgtttcataacagtaacaatatactgtgaattgaatttttttaaatgctagtactgcataaaagttagggaagttttggtggattgcacactaacattgagtgctctggatacctgatatactgtattcactaagtcattcagcataactctgcaagtgggagaaaaagaccttttcaggactgcatgttactgtatgcccattaaagtttttgaagagctggaatggctcaaatgaagcagataggaacatgtaataatgccagtaattagactgttaactccgttccgttttggagaggggcagggattgagatgttctatgtgtatagagctgtggcattcagttttgaacagtgtggaatctatttgagtattggagatatttggggggggggtcttcacgtagttctgacctcacagttgatcttcctgtactgtgtactctctggtatactgttgcagtgtgtaacctttaatggtaagatttcaagggagatagcaacatgttgtgtttctactcactagtgtttccaccactccaggagacagcattcagagttgaccttgtgagagctggccataatttaattccatctctaggttttctgtgtaagtatcagtttatacttgtgaatttgtgttgaagcagtgctaagactttgagtgcattcacttattatctgcttattgtcagcttattgtttcagaggcacatcgagaaccaaccatgggcagctttactaaggaagagtttgactgccatatcctcgatgaaggtttcactgctaaggacattctggaccaaaaaatcaatgaagtttcttcctctgtaagtacgggaagcccacagccacaactcaaaagttccataaaagagcatgccttgccagagaatctagaatttgactgactgggctgtctagtgagtgtccatgtcagtactgctaacagggataggattttgttagggaagggggaaaaagatcttcagtgtggccaggtgcaagactgttaatgaggtccctgaacccactcactctcattccaggatgataaggatgctttctatgttgcggacctcggagacgttctaaagaagcatctgaggtggctgaaagctcttccccgtgttactcccttctatgctgtcaagtgtaatgacagcagagccatagtgagcaccctggctgccattgggacaggatttgattgtgcaagcaaggtaagactgcttatctcaccccaaaagggttatcagttgatgtgcttttgtttgtcaaactccgtctatatatactgatcttctctttcagactgaaatacagttggtgcaggggcttggggtgcctccagagaggattatctatgcaaatccttgtaagcaagtgtctcagatcaagtatgctgccagtaatggagtccagatgatgacttttgacagtgaaattgagttgatgaaagttgccagagcacatccaaaggcaaagtaagtcttctgattgagcacaaaaaggctgggcttgctaggcagactataatcttggttccttattcctatacatagtaagaaccaggctaaaccctgggttagaatcagacccacaagcagtagtgcctagacaggctgattggatgaacgtgtacagagtgcttacttggtgcatgcacttgtttctgtccacctaggttggttttgcggattgccactgatgattccaaagcagtttgtcggctcagtgttaagtttggtgccacactgaaaaccagcaggcttctcttggaacgggcaaaagagctaaatattgatgtcattggtgtcaggtgaggtctcagtgatagttacagactgagacattaaattttaaggcccttttttcctctgagaactagtcaaagaacagcatcttgtttttatttcagcttccatgtgggcagtgggtgtactgaccctgagaccttcgtgcaggcagtgtcagatgcccgctgtgtctttgacatgggagtaagtacatgactcctggaggagggctgtcttgattgaaataaccaaaccactgaatctagaatttgcctcttgtagaagctgtctgcataacagattttaaaaccatctgtcctgtgcatttaaacttgtgaatctagcaatttgacttccaaattttcttgattctagacagaagttggtttcagcatgtatctgcttgacattggtggtggctttcctgggtctgaagacacgaagcttaaatttgaggaggtaattattacaacattaacctacagacggtgagatatgtatttaccattgtggtgtttttactgattaaaggagccaacatgcctggtgttttgttctcactacttgttatttgcaactgtagcccaggctggccttgaactttcagttctcctgcctgtttcccatattttaatgtttagctcagtgcttatcactattgtactatgaagtagacagggtggaaggagttatatcttgttggcatgtattcagaattcagcatttggcccctcttgtaatccattttgtgctattttattaaatattaatataaactattcataatgtgttagaaagagatggtcctgaggggagtgggaagtggtgtatgtacagactagtttccagagaggtttgttgcttctgttgcctgatgacagacctgctatgctaggtcatgtcctgttcttacacacagcagtgtgatctttctcctcaactataacaaatggctgctcccttctctcacttagatcaccagtgtaatcaacccagctctggacaagtacttcccatcggactctggagtgagaatcatagctgagccaggcagatactacgtcgcatcagctttcacacttgcagtgaatatcattgccaaaaaaaccgtgtggaaggagcagaccggctcggacggtatgtggtggcaggatgagtgagtcatgtgggataacagttgatatgctgggtggtaattagggtgatctgtttttctagatgaagatgagtcaaacgagcaaactttgatgtattacgtgaatgatggagtgtatgggtcatttaactgcattctttatgaccatgcacatgtgaaggccctgctgcagaaggtgagttctgagcgcatgctctagcagtgagtgatgcataggatagagagaacattgggccgagagatggctcagcagttaagagcactgactgcttccagaggccctgagttcaatcccagcaacaacatggtggctcaccaccatctgtatgtaatgatgccctcttctggtgtgtctgaagaatagctacagtgtatttataatctttaaaaaaaaacaaacaaaaaacaaacattgtctttatacagagacccaagccagatgagaagtattactcatccagcatctggggaccaacatgtgatggccttgatcggatcgtcgagcgctgtagcctgcctgaaatgcatgtgggtgattggatgctgtttgagaacatgggtgcatacactgttgctgctgcttctactttcaatgggttccagaggccaaacatctactacgtaatgtcacggtcaatgtggtgagtggggctgtgcctgctcatgctcttttggttgctcagtgtaatgtttgcctactgtgagccagaagcctgggttatgcctgatgcacacacacacacatactatggggggaaggcagtatgtgctgaggggaaggatcacctgacctgtctcaaagggactgaatttgtgcttgctttttatgtttgataagttttttttttaccttgagctaaatacagaaatggagtttttccaagtaattactgctcatcttcagatatttactactaggagaggtcttacaagtaagccattagattcttttgcaactaaaatattcaagttagcatatgtgacctgtgggttccttaataatgaaattttacattggattgtttcctggtatagtgacagggtgaggtgtcaggagatctcttgggaggctgcccaatttggagggatttgggttttgaatatgccatatatgcctttgtttttcaggcaactcatgaagcaaatccagagccatggcttcccgccagaagtggaggagcaggatgttggcactctgcccatgtcttgtgcccaggagagcgggatggaccgtcaccctgcagcctgtgcttctgctagtatcaatgtatagatgccattcttgtagctcttacctgcaagtttagcttgagttcacggcatttggggggaccatttaacttaattactgctagtttggaatgtctttgtaagagtagggttggcaccaatgcagtatggaaagactaggagatgggggtcacacttactgtgttcctatggaaactttgaatattttatatggatttttattcacttttcagacctgatactaatgagtgcccctcggctgctgagcaagcatttgtagcttgtacattggcagaatgggctaaaagcttatgttgtgacccattttgaaaataaagtatcttgaaatgattggacattggagaatgtgtgcaagtatcccttacagaaggcacaaacttctgcacaggctgtgtgttacagcagtgagtctagcccagcagagatgtggatgatacaaagctgtgccccctctgtacagcatcaatgtgcttagcccatctcaagtgtttactgtgaacttggtgcccaaagtctcttaagagtgtcatctgcctagtggcctcttgacttggccacttcctaaggagagggcatctgaggctctttgaaccttgcctgcagaaaccctgactgctccctcaacccttggcctcagctgcatcaccacctagtaacagttgaagtatcgaacagcacttggcagtcaacttcctgtaataaattcaacaacagcaactactgtgttgtaaatttttaccttgacctttcatattatagtcctgctcagtttatacacctattgcatccccaaagaaatgccagactcttaacctagttagtattgaagacctgtaggtcaggaggaagggatcc

SEQ ID NO: 9299 - protein, 461 aa, Rattus norvegicus; identical to SEQ ID NO: 2550
  ref <308>: DATABASE ACCESSION NUMBER: SWISS-Prot / CAA30765
  ref <309>: DATABASE ENTRY DATE: 2002-06-15

SEQ ID NO: 9300 - DNA, 2062 bp, Homo sapiens; identical to SEQ ID NO: 2551
  ref <308>: DATABASE ACCESSION NUMBER: Refseq / NM_002539
  ref <309>: DATABASE ENTRY DATE: 2001-11-28

SEQ ID NO: 9301 - protein, 461 aa, Homo sapiens; identical to SEQ ID NO: 2552
  ref <308>: DATABASE ACCESSION NUMBER: SWISS-Prot / P11926
  ref <309>: DATABASE ENTRY DATE: 2002-06-15

SEQ ID NO: 9302 - DNA, 4964 bp, Rattus norvegicus
  ref <308>: DATABASE ACCESSION NUMBER: EMBL / X08056
  ref <309>: DATABASE ENTRY DATE: 1999-02-10
gaattctgatctctgctctgcacacattcactgcccctctgcacaacacccatgtacatttaaaaaaaattaagaaacaaaccaaaggggttggggatttagctcagtggtagagcgcttgcctaggaagcgcaaggccctgggtttggtccccagctctgaaaaaaagaaccaaaaaaaaaaaaaaagagagagaaacaaaccaaaaaccccaaaacaaaagtgttaactgtttcaattctaaactggaggccctggtctccactcctggtttttagcagttttccctgcctgtaaaatgagagtactaacagttactgctgtagcatcttctatgggttaagagtttcactgttcttctagcagttctcagaaaaatgatcatcttctaaaggttaagagtttcactgttcttctagcagttctcagaaaaatgatccgatcactacacctaacctgcccaagtgacccaggagctacagcgggtgaatgacaggtgtggattggactagctgggaaggaccggcttcttggacctcaccaggccaacgagtgtctaaacttgaggcatccagccaggcatggcggcacacgcctttaatcccagcagttcagaggtagaatcagacagaactcagagaaagggccatcttggcctacacagcaagctccaggccagccaggagctcctgtctctaaataaacagattaaagagaaataaaaaaaatcaactttttgatttgaggagcatcgtggagggcagctaggatcagcaagtttcacagcctcttcagacagtaagtagagtacccttgtcagccagccaagcaaatgcagaaagtcaagcttcattccaaatgtctggtaccagggagcttgccccgcacctcgcagaagccacaacagtacttctttcggtggcactggtcccactggtagtctctaagcgtccctccctacaccgcacgcacttcgcccctcaaggctacaacttcctgtctagataactaggctccgcccaggcccgtaggctccgccccactcataataaaagactggattcagctccacccacgaacaactaccccggccctaggccggcctcctaggcgccaacctcaccctagcggaaagctaggccggggctccagttttgcctctaccaggctaggccccacccgtgggagaagactaggcttcgccactagcagaaggcttggatttcatcctatcccataaacacctaccccatggctctgtcctcatccgtagcagaaagctggaccatccaccgtcccagccggctggccccgttccttagcttcttctctcatacttagcagaaagatgaccccaccccattgctccggtcccgcccctagcagaaggctggactctgccctaccctacaggctccatcctgtatggctcctgcctgcatccctcatacaagtctggattctgtccagcccacaggtctggccccatccatagcaaaaaggttggactcctccccagcccaccactaggtatgcgactctagagatcgggtaccgagctcggtacccggggttcctctacaccccccctgcaggacctatcccattccatagatccgcccctcacagaactttactccgggttccagccagtagcccctaccctgagcacgctccaccctgccctcagactccatccacccaggcccaggcccagtactaggctggccaccctcccggatcaaggcccaacccttttctaatgactggaccctccctatcccagcaaggcccgccccagctaataggccccgccacccggcccagcactggactccctcggggcacacaggtcccgcccccgcctcaggctcccacccaccccagtgcaaggctaaactcctctttgcagaggcgccgccccaccccgcctcctccagcctggtggttccgcagccgtactctcctggcctggtgtgcacagcctcaccatgagttcttctgcagccagcccgcttttcgcgcctggcgaggactgcggccccgcgtggcgcgcggcccccgcggcctatgatacgtctgacacgcacctgcagatcctgggcaagccagtaatggagcgttgggagaccccctacatgcattcgctggcggctgctgctgcctccagaggtactctgcccagaagaaacggaggctactgtttaaggagtgtaggagttcccatgcatgctgcatgcctgagtttccttacctgaggcactgagctgccttggggttaccttggcagggaagggaagagtgttggcaaaatgtagacgcaggcaagagaagccggctccgaactagaacttcctctcctggggaaaaagacttctacttcccggagctgggttggagggtggatcttcggaccacagcctcgagtggagcttagagaacatggaggggcgtgggacttgtgcgggtcgggaacctccgagtttccccaggctgttgctaagaatagcttgggaaaacggagcagagaggcagctgtccggtgctatggccctgaacttctggacgaggggtggtgtctgggacaccccagcctcaaacaggtcaatagccaaagggcttcaaagttcacccggagcacatgaggacctggtatcaagtgcggaatgaaacatggaggggttacagtgtcgggcctcagaaccaggcttggccctttataaccccacatagggccatagcacaaatagcgtgggtgggcatgggctcagagtccagggatccctggggccaagcccaaaagcacgtggccagtccctcaggctcccaggctcgccgctctgattggcagctggccagggcccacactctctgtgctactttgttctgtccacccactgctggctggctgtccttgaggcatgtgtgagaccggtccaccctaaccgtccccctcccccacccatgccagctgtagtgtttttgtcctcctagggggccgggtcctggaagtgggctttgggatggccattgcagcctccagggtgcagcaggcccccataaaggaacactggattattgaatgcaacgatggggtcttccagcgtctacaaaactgggccctgaagcagccacataaggtaccttctgtcactggagtaggaggctgggagtacccccccgggactagggagatcatcgggggtaccaatgtgaccccttatatccttctcttgctcccttctcctctccaaggttgttcccttgaaaggcctgtgggaggaggaggcacctacactgcctgatggtcactttgatgtgagggcactttgggagcctggcaagggggttggcctctgggtactgattggcagcctcttgggctatcataccctccttagctcagtggagcttgccgtcaagaatgaggaccagagtttgatccccaggatgcatgtggtgtaaggagagaatgggtgctcataagttgtcccctaccccaacaaatgcacctccaatgtgcactggggacatagcctccgggaaaaggctccatgaactggctagcagaggtgctaagggcagctgggcgggctgggcagtttggcctccaaggccatgggataggtgggatgaagcttgggcaaggctgtgccagccctgactggcaggcctgtgttcacgctgcaggggattctatacgacacatatccactgtctgaagagacctggcacactcaccagttcaactttattaaggtgggactgcagggccggggaccgagggccttggacggtcaggtgggcagggtgtgatatctacagaccagcagctctctgctcatggtccctccaccccttcttgtccatgccctttctctctctctgcagactcatgctttccgtttgctgaagcctgggggtatcctcacttactgcaacctcacgtcctggggggaactcatgaagtccaagtacacagacatcactgccatgtttgaggtacgctgcctcatagcaagtgggggctccgacccaaaagccaggcagtggcccggcaagtgtggtgttgagacccatgacatgggggagaggtccagtcagggcttctctgcagcccgaacctactgctctctgcctgtggggcggtgcctgagagatgcccaccagggccatcaggacagcttcccttcagcgcatgaggcagctcttggcacagaaaactcctcttgctcgagaggcctacagcaggcctgtgcaaggatgctggtctgagacacagctgaggtcatcaggaaaactcgttgcctgcatagaattcacactcacactaggccctgtcccgcatcatcagtggtgacctgtgacccctccctacaggagactcaggtgcctgcactgctggaagctggcttccagagagaaaacatctgtacagaggtgatggcgctggtgcccccagccgactgccgctactatgccttccctcagatgatcacacccctggtcaccaagcactgagcggctggcccagggctacaaggagaatatgtcctcctcagtgcctttgtagctggagtgtgggctccagcctctccactatccctgcagtgtgacatcctaacctctgcctggtacggccatctccccagagctcaggagtaaaataaatgctaccaagactagtagtgggttggctggcggtgagccggaggtgaggcccgcatctggttcagagcctgcctctccctgcctccatagatgtggctattccatcactggtgctcagtggcccccgacccagacatgaccaatcaaccattgtatgttttcaacagtggcccaggaagagcctggggtctcaccagggtcagggtagggagagcctccacgggtcccagcccagcacacagcaagtcatgcaaccctcatggcacgaccctactctgaacatctctggtacc

SEQ ID NO: 9303 - protein, 235 aa, Rattus norvegicus; identical to SEQ ID NO: 2488
  ref <308>: DATABASE ACCESSION NUMBER: SWISS-Prot / CAA30845
  ref <309>: DATABASE ENTRY DATE: 2002-06-15

SEQ ID NO: 9304 - DNA, 1086 bp, Homo sapiens
  ref <308>: DATABASE ACCESSION NUMBER: Refseq / NM_000156
  ref <309>: DATABASE ENTRY DATE: 2002-04-28
ccccggcccacaagcccctgcagggagcgggcccgggcggcgcgcgatcgaggtcgggtcgccgtccagcctgcagcatgagcgcccccagcgcgacccccatcttcgcgcccggcgagaactgcagccccgcgtggggggcggcgcccgcggcctacgacgcagcggacacgcacctgcgcatcctgggcaagccggtgatggagcgctgggagaccccctatatgcacgcgctggccgccgccgcctcctccaaagggggccgggtcctggaggtgggctttggcatggccatcgcagcgtcaaaggtgcaggaggcgcccattgatgagcattggatcatcgagtgcaatgacggcgtcttccagcggctccgggactgggccccacggcagacacacaaggtcatccccttgaaaggcctgtgggaggatgtggcacccaccctgcctgacggtcactttgatgggatcctgtacgacacgtacccactctcggaggagacctggcacacacaccagttcaacttcatcaagaaccacgcctttcgcctgctgaagccggggggcgtcctcacctactgcaacctcacctcctggggggagctgatgaagtccaagtactcagacatcaccatcatgtttgaggagacgcaggtgcccgcgctgctggaggccggcttccggagggagaacatccgtacggaggtgatggcgctggtcccaccggccgactgccgctactacgccttcccacagatgatcacgcccctggtgaccaaaggctgagcccccaccccggcccggccacacccatgccctcctccgtgccttcctggccgggagtccagggtgtcgcaccagccctgggctgatcccagctgtgtgtcaccagaagctttcccggcttctctgtgaggggtcccaccagcccagggctgatcccagctgtgtgtcaccagcagctttcccagcttctctgtgagggtcactgctgcccactgcagggtccctgaggtgaagtaaacgccggcgctgggcttggccagtcggcagtgaaaaaaaaaaaaaaaaaaaaaaaaaaaaa

SEQ ID NO: 9305 - protein, 236 aa, Homo sapiens; identical to SEQ ID NO: 2490
  ref <308>: DATABASE ACCESSION NUMBER: SWISS-Prot / Q14353
  ref <309>: DATABASE ENTRY DATE: 2002-06-15

SEQ ID NO: 9306 - DNA, 4964 bp, Rattus norvegicus; identical to SEQ ID NO: 9302
  ref <308>: DATABASE ACCESSION NUMBER: EMBL / X08056
  ref <309>: DATABASE ENTRY DATE: 1999-02-10

SEQ ID NO: 9307 - protein, 235 aa, Rattus norvegicus; identical to SEQ ID NO: 2488
  ref <308>: DATABASE ACCESSION NUMBER: SWISS-Prot / CAA30845
  ref <309>: DATABASE ENTRY DATE: 2002-06-15

SEQ ID NO: 9308 - DNA, 1086 bp, Homo sapiens; identical to SEQ ID NO: 9304
  ref <308>: DATABASE ACCESSION NUMBER: Refseq / NM_000156
  ref <309>: DATABASE ENTRY DATE: 2002-04-28

SEQ ID NO: 9309 - protein, 236 aa, Homo sapiens; identical to SEQ ID NO: 2490
  ref <308>: DATABASE ACCESSION NUMBER: SWISS-Prot / Q14353
  ref <309>: DATABASE ENTRY DATE: 2002-06-15

SEQ ID NO: 9310 - DNA, 1495 bp, Rattus norvegicus
  ref <308>: DATABASE ACCESSION NUMBER: EMBL / X12459
  ref <309>: DATABASE ENTRY DATE: 1993-09-12
caatccaagacaagatgtccagcaagggctctgtggttctggcctacagtggtggtctggacacctcctgcatcctcgtgtggctgaaggaacaaggctatgatgtcatcgcctacctggccaacattggccagaaggaagactttgaggaagccaggaagaaggcactgaagcttggggccaaaaaggtgttcattgaggatgtaagcaaggagtttgtggaagagttcatctggcctgctgtccagtccagtgcactctatgaggaccgctatctcctaggcacctctctcgccaggccttgcatagctcgcaaacaagtggaaattgcccagcgcgaaggggccaagtatgtgtctcacggcgccacggggaagggcaatgaccaggtccgctttgagctcacctgctactcgttagcaccccagattaaggtcatcgccccctggaggatgcccgagttttacaaccggttcaagggccgaaatgatttgatggaatacgcaaagcaacatggaatccccatccctgtcacccccaagagcccctggagcatggatgagaaccttatgcacatcagctacgaggctggaatcctggaaaaccccaagaaccaagcacctccaggtctctacacaaaaactcaggaccctgccaaagcacccaacaccccagatgtccttgagatagaattcaaaaaaggggtccctgtgaaggtgaccaacgtcaaagatggcactacccacagcacatccttggacctcttcatgtacctgaatgaagttgcgggcaagcatggagtagggcgcattgacatcgtggagaaccgcttcattggaatgaagtcccggggtatctacgagaccccagcagggaccatcctttaccacgctcatttagacatagaggccttcaccatggatcgggaagtacgcaaaatcaagcagggcctgggcctcaaattcgcagagctcgtatacaccggtttctggcacagccctgaatgtgaatttgttcgccactgcatcgacaagtcccaggaacgggtggaaggaaaggtgcaggtatctgtcttcaagggccaggtgtacatccttggccgggagtctccactttcactatacaatgaagagctggtgagcatgaacgtacagggtgactatgaacccattgatgccaccggcttcatcaatatcaactcgctcaggctgaaggagtaccatcgccttcagagcaaggtcaccgccaaatagaccgtgacaaagaggccgggcctccccgctctgcagctctcccaggctccagcattaattgttgtgataaatttgtaattgtagcttgttctcctaccacctgactggggctgctgtgccccccctcacctcccccccacccacaggctttgttccctggtcccctatagcctacaaaagtggtcatcgaagggaagggggggtggcaggcagctgcagaaagcgcgtaaaatgacaattaa

SEQ ID NO: 9311 - protein, 412 aa, Rattus norvegicus
  ref <308>: DATABASE ACCESSION NUMBER: SWISS-Prot / P09034
  ref <309>: DATABASE ENTRY DATE: 2002-06-15
MSSKGSVVLAYSGGLDTSCILVWLKEQGYDVIAYLANIGQKEDFEEARKKALKLGAKKVFIEDVSKEFVEEFIWPAVQSSALYEDRYLLGTSLARPCIARKQVEIAQREGAKYVSHGATGKGNDQVRFELTCYSLAPQIKVIAPWRMPEFYNRFKGRNDLMEYAKQHGIPIPVTPKSPWSMDENLMHISYEAGILENPKNQAPPGLYTKTQDPAKAPNTPDVLEIEFKKGVPVKVTNVKDGTTHSTSLDLFMYLNEVAGKHGVGRIDIVENRFIGMKSRGIYETPAGTILYHAHLDIEAFTMDREVRKIKQGLGLKFAELVYTGFWHSPECEFVRHCIDKSQERVEGKVQVSVFKGQVYILGRESPLSLYNEELVSMNVQGDYEPIDATGFININSLRLKEYHRLQSKVTAK

SEQ ID NO: 9312 - DNA, 1560 bp, Homo sapiens
  ref <308>: DATABASE ACCESSION NUMBER: EMBL / X01630
  ref <309>: DATABASE ENTRY DATE: 1993-09-12
cgagcccgagtggttcactgcactgtgaaaacagattccagacgccgggaactcacgcctccaatcccagacgctatgtccagcaaaggctccgtggttctggcctacagtggcggcctggacacctcgtgcatcctcgtgtggctgaaggaacaaggctatgacgtcattgcctatctggccaacattggccagaaggaagacttcgaggaagccaggaagaaggcactgaagcttggggccaaaaaggtgttcattgaggatgtcagcagggagtttgtggaggagttcatctggccggccatccagtccagcgcactgtatgaggaccgctacctcctgggcacctctcttgccaggccctgcatcgcccgcaaacaagtggaaatcgcccagcgggagggggccaagtatgtgtcccacggcgccacaggaaaggggaacgatcaggtccggtttgagctcagctgctactcactggccccccagataaaggtcattgctccctggaggatgcctgaattctacaaccggttcaagggccgcaatgacctgatggagtacgcaaagcaacacgggattcccatcccggtcactcccaagaacccgtggagcatggatgagaacctcatgcacatcagctacgaggctggaatcctggagaaccccaagaaccaagcgcctccaggtctctacacgaagacccaggacccagccaaagcccccaacacccctgacattctcgagatcgagttcaaaaaaggggtccctgtgaaggtgaccaacgtcaaggatggcaccacccaccagacctccttggagctcttcatgtacctgaacgaagtcgcgggcaagcatggcgtgggccgtattgacatcgtggagaaccgcttcattggaatgaagtcccgaggtatctacgagaccccagcaggcaccatcctttaccatgctcatttagacatcgaggccttcaccatggaccgggaagtgcgcaaaatcaaacaaggcctgggcttgaaatttgctgagctggtgtataccggtttacggcctagccctgagtgtgaatttgtccgccactgcatcgccaagtcccaggagcgagtggaagggaaagtgcaggtgtccgtcctcaagggccaggtgtacatcctcggccgggagtccccactgtctctctacaatgaggagctggtgagcatgaacgtgcagggtgattatgagccaactgatgccaccgggttcatcaacatcaattccctcaggctgaaggaatatcatcgtctccagagcaaggtcactgccaaatagacccgtgtacaatgaggagctggggcctcctcaatttgcagatcccccaagtacaggcgctaattgttgtgataatttgtaattgtgacttgttctccccggctggcagcgtagtggggctgccaggccccagctttgttccctggtccccctgaagcctgcaaacgttgtcatcgaagggaagggtggggggcagctgcggtggggagctataaaaatgacaattaaaagagaaaaaaaaaaaaa

SEQ ID NO: 9313 - protein, 412 aa, Homo sapiens
  ref <308>: DATABASE ACCESSION NUMBER: SWISS-Prot / P00966
  ref <309>: DATABASE ENTRY DATE: 2002-06-15
MSSKGSVVLAYSGGLDTSCILVWLKEQGYDVIAYLANIGQKEDFEEARKKALKLGAKKVFIEDVSREFVEEFIWPAIQSSALYEDRYLLGTSLARPCIARKQVEIAQREGAKYVSHGATGKGNDQVRFELSCYSLAPQIKVIAPWRMPEFYNRFKGRNDLMEYAKQHGIPIPVTPKNPWSMDENLMHISYEAGILENPKNQAPPGLYTKTQDPAKAPNTPDILEIEFKKGVPVKVTNVKDGTTHQTSLELFMYLNEVAGKHGVGRIDIVENRFIGMKSRGIYETPAGTILYHAHLDIEAFTMDREVRKIKQGLGLKFAELVYTGFWHSPECEFVRHCIAKSQERVEGKVQVSVLKGQVYILGRESPLSLYNEELVSMNVQGDYEPTDATGFININSLRLKEYHRLQSKVTAK

SEQ ID NO: 9314 - DNA, 1269 bp, Rattus norvegicus
  ref <308>: DATABASE ACCESSION NUMBER: EMBL / X12535
  ref <309>: DATABASE ENTRY DATE: 1994-06-22
tggcgttgtgtctcctcctctgttgaccctgcgcttcaaggatgacctctaggaagaaagtgttgctgaaggtcatcatcctgggagactctggtgttggaaagacatcgctcatgaaccagtatgtgaataagaagttcagtaaccagtacaaagccacaataggagcagactttctgaccaaggaggtgatggtggatgacagacttgttaccatgcagatctgggacacagctggtcaagaacggttccagtctcttggtgtggccttctacagaggtgcagattgctgcgttctggtgtttgatgtgactgcccccaacacattcaaaacccttgacagctggagagacgagtttctcatccaggccagcccccgggatcctgagaacttcccttttgttgtgttgggaaacaagattgacctggaaaacagacaagtggccacaaagagggcacaggcttggtgctacagcaaaaacaacattccttacttcgagaccagtgccaaggaggccatcaatgtggaacaggccttccagacaattgctcggaatgcccttaaacaggaaacggaagtggagctgtacaatgaattccctgaacccatcaaactggacaagaacgagcgggccaaggcctccgcagagagctgcagctgttgaagaggcagtgagcacagagcacagagtccttcacagaccaagaacacacacgtaggccttcaacacgcgtccctcctcctctaaacagaccagaacgtgagctctcacatccagctgccaaaagaaactccacacacacacatacacacatgcacacacacacagacatacacacacagcaagcaatcaccgcctgtgcctgtcagggctcctggggacgtctgccaccgtgagcctgtgtatggacatatggcggagaccctgggtgctctggggtgcgtgggtagccggaagcttactctttttgtccactggaaagtgagagaactgttcacagttcatctgtgtctaattatctgattttttttttaacggtcttgtggtcttttacccctaccctccttgaaggtcctgtgggaaggctggtgcccaggctccgttctgagcaggctgttttgtatgtatctgttaatgcttgttacttttaatcaatcagatctttttacagtatccatttattatgtaatgcttcttagaaaagaatcttatagtacatgttaatatatgcaaccaattaaaatgtataaattagtgtaaggaattc

SEQ ID NO: 9315 - protein, 207 aa, Rattus norvegicus
  ref <308>: DATABASE ACCESSION NUMBER: SWISS-Prot / CAA31053
  ref <309>: DATABASE ENTRY DATE: 1996-10-01
MTSRKKVLLKVIILGDSGVGKTSLMNQYVNKKFSNQYKATIGADFLTKEVMVDDRLVTMQIWDTAGQERFQSLGVAFYRGADCCVLVFDVTAPNTFKTLDSWRDEFLIQASPRDPENFPFVVLGNKIDLENRQVATKRAQAWCYSKNNIPYFETSAKEAINVEQAFQTIARNALKQETEVELYNEFPEPIKLDKNERAKASAESCSC

SEQ ID NO: 9316 - DNA, 1269 bp, Rattus norvegicus; identical to SEQ ID NO: 9314
  ref <308>: DATABASE ACCESSION NUMBER: EMBL / X12535
  ref <309>: DATABASE ENTRY DATE: 1994-06-22

SEQ ID NO: 9317 - protein, 207 aa, Rattus norvegicus; identical to SEQ ID NO: 9315
  ref <308>: DATABASE ACCESSION NUMBER: SWISS-Prot / CAA31053
  ref <309>: DATABASE ENTRY DATE: 1996-10-01

SEQ ID NO: 9318 - DNA, 1422 bp, Rattus norvegicus
  ref <308>: DATABASE ACCESSION NUMBER: EMBL / X13016
  ref <309>: DATABASE ENTRY DATE: 1995-03-31
gtctccagtgtcacaggcagcttctcaaagtattatgtacttcaaaaaacggagatggtttctgatcctggaatcgcttttgctgtctttggtaactggatttcaagatcaatcagtaccaaatgtaaatgccataaccggcagcaacgtaaccctgacaatcctgaagcacccacttgcatcgtatcaacgtctcacctggcttcatactaccaaccagaagattttagagtacttccctaatggtaaaaaaactgtcttcgagtctgtatttaaagacagggtcgatcttgacaaaacaaatggtgcacttcgtatctataatgtctcgaaagaggacagaggtgactactacatgagaatgttgcacgaaactgaggaccagtggaagataaccatggaagtatacgatcttgtgtccaagcctgccatcaaaatcgagaagactaaaaatttgactgactcctgtcacctgaggctatcatgtaaggtagaggaccaaggtgttgactatacttggtatgaggactcggggccctttccccaaaggaatccaggatatgtactcgaaatcaccatcactccacacaacaagtctacattttacacctgccaagtcagcaatcctgtaagcagcgagaacgacacactgtactttattccaccttgtacgctggccagatcttctggagtccattggattgcagcttggctagtggtcacgttatccatcattcccagcatcctgctagcctgacaagatctctcctcagtcaagaaggaaacatcaaagccgtatcttgccttcatcccctgcactgctcctaaccattgacgctgctctggctccgtggagcaaaggaaagtgtgttattgttatctgtgctggtttgaatgcatgctctatggagtaagcacaggacctagtacagtgctacatcactgatctttacaaagattctaagctaattttttaaaaactgggggtagcatctaattttatataccctagttgtttcctaacattcattgaagataaatgcattccttttaccaaaatatgtggctatcttatactaatgttgtttatatcactctttttttataaagataaatgcattcctttaccaaaatatgtgactatatcatgctaatgttgtttatatcactcctttttgtgaagataaatgcattccttttaccaaaatatgtgactatgtcatgctaatgttgtttatatcactcttttttataaagataaatgcattccttttaccaaaaacatgtggctatattatactaatgttgtttatatcactcttttttataaagataaatgcattccttctaccaaaatatgtgactatatcatgctaatgttgtttatatcacctttttaaaaataaaatcttttcacatact

SEQ ID NO: 9319 - protein, 240 aa, Rattus norvegicus
  ref <308>: DATABASE ACCESSION NUMBER: SWISS-Prot / P10252
  ref <309>: DATABASE ENTRY DATE: 2002-06-15
MYFKKRRWFLILESLLLSLVTGFQDQSVPNVNAITGSNVTLTILKHPLASYQRLTWLHTTNQKILEYFPNGKKTVFESVFKDRVDLDKTNGALRIYNVSKEDRGDYYMRMLHETEDQWKITMEVYDLVSKPAIKIEKTKNLTDSCHLRLSCKVEDQGVDYTWYEDSGPFPQRNPGYVLEITITPHNKSTFYTCQVSNPVSSENDTLYFIPPCTLARSSGVHWIAAWLVVTLSIIPSILLA

SEQ ID NO: 9320 - DNA, 1058 bp, Homo sapiens
  ref <308>: DATABASE ACCESSION NUMBER: EMBL / M37766
  ref <309>: DATABASE ENTRY DATE: 1999-07-02
gggaagttctggaaggaagcatgtgctccagaggttgggattcgtgtctggctctggaattgctactgctgcctctgtcactcctggtgaccagcattcaaggtcacttggtacatatgaccgtggtctccggcagcaacgtgactctgaacatctctgagagcctgcctgagaactacaaacaactaacctggttttatactttcgaccagaagattgtagaatgggattccagaaaatctaagtactttgaatccaaatttaaaggcagggtcagacttgatcctcagagtggcgcactgtacatctctaaggtccagaaagaggacaacagcacctacatcatgagggtgttgaaaaagactgggaatgagcaagaatggaagatcaagctgcaagtgcttgaccctgtacccaagcctgtcatcaaaattgagaagatagaagacatggatgacaactgttatctgaaactgtcatgtgtgatacctggcgagtctgtaaactacacctggtatggggacaaaaggcccttcccaaaggagctccagaacagtgtgcttgaaaccacccttatgccacataattactccaggtgttatacttgccaagtcagcaattctgtgagcagcaagaatggcaccgtctgcctcagtccaccctgtaccctggcccggtcctttggagtagaatggattgcaagttggctagtggtcacggtgcccaccattcttggcctgttacttacctgagatgagctcttttaactcaagcgaaacttcaaggccagaagatcttgcctgttggtgatcatgctcctcaccaggacagagactgtataggctgaccagaagcatgctgctgaattatcaacgaggattttcaagttaacttttaaatactggttattatttaattttatatccctttgttgttttctagtacacagagatatagagatacacatgcttttttcccacccaaaattgtgacaacattatgtgaatgttttattattttttaaaataaacatttgatataattatcaattaactgaa

SEQ ID NO: 9321 - protein, 243 aa, Homo sapiens
  ref <308>: DATABASE ACCESSION NUMBER: SWISS-Prot / P09326
  ref <309>: DATABASE ENTRY DATE: 2002-06-15
MCSRGWDSCLALELLLLPLSLLVTSIQGHLVHMTVVSGSNVTLNISESLPENYKQLTWFYTFDQKIVEWDSRKSKYFESKFKGRVRLDPQSGALYISKVQKEDNSTYIMRVLKKTGNEQEWKIKLQVLDPVPKPVIKIEKIEDMDDNCYLKLSCVIPGESVNYTWYGDKRPFPKELQNSVLETTLMPHNYSRCYTCQVSNSVSSKNGTVCLSPPCTLARSFGVEWIASWLVVTVPTILGLLLT

SEQ ID NO: 9322 - DNA, 1150 bp, Rattus norvegicus
  ref <308>: DATABASE ACCESSION NUMBER: EMBL / X13044
  ref <309>: DATABASE ENTRY DATE: 1993-09-12
gcagcagcagcagcaccagcagcacttgggggaaaagctagaggctagagtcatggatgaccagcgcgacctcatctctaaccatgagcagctgcccatcctgggccagcgtgctagagccccagaaagcaattgcaaccgtggagtcctgtacaccagtgtctctgtcctggtggctctgctcttggctgggcaggccaccactgcttacttcctgtaccagcagcagggccgcctggacaagctgaccgtcacctcccagaacctgcaactggagaaccttcgcatgaagcttccgaaatctgccaaacctgtgagcccgatgcgcatggctactcccttgctgatgcgcccactgtccatggataacatgctccaagcgcccgtgaagaatgttaccaagtatggcaacatgacccaggaccacgtgatgcacctgcttacgaagtctggacccgtgaactacccacagctgaaggggagcttcccggagaatctgaagcaccttaagaactctatgaatggtctggactggaaggtctttgagagctggatgaaacagtggctgttgtttgaaatgagcaagaactccctggaggagaagcagcccacccagactccacctaaagagccactggacatggaagacccatcttctggcctgggagtgaccaagcaggatatgggccaaatgttcttgtgaagacagaagccagctctgcacggcggcacgtcccctgctcctcagcccttcttacactccctaacatcacacccattccgtcttcctgcacctgggcttgagactggtatctgcttcaccgtccctgacacaacaaatgaaaccggaacagaatgagaacactggagggagggccttgctgcctacccccatctaaaggacccccatttctgacccattagcagtctttaatgtggggctctgagatctaggcccactgacagggataggggatgccctacccttaatctaggctggatacatttgctgtcttctcaaggaagaggccaagccctcccagcaacccttcctcatgtcctgccgacgcccctgggatccctgctcagccaagcttgtcagcagcctgtaggaccatggttcacgtgacaataaaaggtagaaggtaaa

SEQ ID NO: 9323 - protein, 280 aa, Rattus norvegicus
  ref <308>: DATABASE ACCESSION NUMBER: SWISS-Prot / P10247
  ref <309>: DATABASE ENTRY DATE: 2002-06-15
MDDQRDLISNHEQLPILGQRARAPESNCNRGVLYTSVSVLVALLLAGQATTAYFLYQQQGRLDKLTVTSQNLQLENLRMKLPKSAKPVSPMRMATPLLMRPLSMDNMLQAPVKNVTKYGNMTQDHVMHLLTKSGPVNYPQLKGSFPENLKHLKNSMNGLDWKVFESWMKQWLLFEMSKNSLEEKQPTQTPPKVLTKCQEEVSHIPDVHPGAFRPKCDENGNYMPLQCHGSTGYCWCVFPNGTEVPHTKSRGRHNCSEPLDMEDPSSGLGVTKQDMGQMFL

SEQ ID NO: 9324 - DNA, 1304 bp, Homo sapiens
  ref <308>: DATABASE ACCESSION NUMBER: Refseq / NM_004355
  ref <309>: DATABASE ENTRY DATE: 2002-11-05
ttcccagatgcacaggaggagaagcaggagctgtcgggaagatcagaagccagtcatggatgaccagcgcgaccttatctccaacaatgagcaactgcccatgctgggccggcgccctggggccccggagagcaagtgcagccgcggagccctgtacacaggcttttccatcctggtgactctgctcctcgctggccaggccaccaccgcctacttcctgtaccagcagcagggccggctggacaaactgacagtcacctcccagaacctgcagctggagaacctgcgcatgaagcttcccaagcctcccaagcctgtgagcaagatgcgcatggccaccccgctgctgatgcaggcgctgcccatgggagccctgccccaggggcccatgcagaatgccaccaagtatggcaacatgacagaggaccatgtgatgcacctgctccagaatgctgaccccctgaaggtgtacccgccactgaaggggagcttcccggagaacctgagacaccttaagaacaccatggagaccatagactggaaggtctttgagagctggatgcaccattggctcctgtttgaaatgagcaggcactccttggagcaaaagcccactgacgctccaccgaaagagtcactggaactggaggacccgtcttctgggctgggtgtgaccaagcaggatctgggcccagtccccatgtgagagcagcagaggcggtcttcaacatcctgccagccccacacagctacagctttcttgctcccttcagcccccagcccctcccccatgtcccaccctgtacctcatcccatgagacctggtgcctggctctttcgtcacccttgtacaagacaaaccaagtcggaacagcagataacaatgcagcaaggccctgctgcccaatctccatctgtcaacaggggcgtgaggtcccaggaagtggccaaaagctagacagatccccgttcctgacatcacagcagcctccaacacaaggctccaagacctaggctcatggacgagatgggaaggcacagggagaagggataaccctacacccagaccccaggctggacatgctgactgtcctctcccctccagcctttggccttggcttttctagcctatttacctgcaggctgagccactctcttccctttccccagcatcactccccaaggaagagccaatgttttggacccataatcctttctgccgacccctagttccctctgctcagccaagcttgttatcagctttcagggccatggttcacattagaataaaaggtagtaattag

SEQ ID NO: 9325 - protein, 296 aa, Homo sapiens
  ref <308>: DATABASE ACCESSION NUMBER: SWISS-Prot / P04233
  ref <309>: DATABASE ENTRY DATE: 2002-06-15
MHRRRSRSCREDQKPVMDDQRDLISNNEQLPMLGRRPGAPESKCSRGALYTGFSILVTLLLAGQATTAYFLYQQQGRLDKLTVTSQNLQLENLRMKLPKPPKPVSKMRMATPLLMQALPMGALPQGPMQNATKYGNMTEDHVMHLLQNADPLKVYPPLKGSFPENLRHLKNTMETIDWKVFESWMHHWLLFEMSRHSLEQKPTDAPPKVLTKCQEEVSHIPAVHPGSFRPKCDENGNYLPLQCYGSIGYCWCVFPNGTEVPNTRSRGHHNCSESLELEDPSSGLGVTKQDLGPVPM

SEQ ID NO: 9326 - DNA, 1150 bp, Rattus norvegicus; identical to SEQ ID NO: 9322
  ref <308>: DATABASE ACCESSION NUMBER: EMBL / X13044
  ref <309>: DATABASE ENTRY DATE: 1993-09-12

SEQ ID NO: 9327 - protein, 280 aa, Rattus norvegicus; identical to SEQ ID NO: 9323
  ref <308>: DATABASE ACCESSION NUMBER: SWISS-Prot / P10247
  ref <309>: DATABASE ENTRY DATE: 2002-06-15

SEQ ID NO: 9328 - DNA, 1304 bp, Homo sapiens; identical to SEQ ID NO: 9324
  ref <308>: DATABASE ACCESSION NUMBER: Refseq / NM_004355
  ref <309>: DATABASE ENTRY DATE: 2002-11-05

SEQ ID NO: 9329 - protein, 296 aa, Homo sapiens; identical to SEQ ID NO: 9325
  ref <308>: DATABASE ACCESSION NUMBER: SWISS-Prot / P04233
  ref <309>: DATABASE ENTRY DATE: 2002-06-15

SEQ ID NO: 9330 - DNA, 1150 bp, Rattus norvegicus; identical to SEQ ID NO: 9322
  ref <308>: DATABASE ACCESSION NUMBER: EMBL / X13044
  ref <309>: DATABASE ENTRY DATE: 1993-09-12

SEQ ID NO: 9331 - protein, 280 aa, Rattus norvegicus; identical to SEQ ID NO: 9323
  ref <308>: DATABASE ACCESSION NUMBER: SWISS-Prot / P10247
  ref <309>: DATABASE ENTRY DATE: 2002-06-15

SEQ ID NO: 9332 - DNA, 1304 bp, Homo sapiens; identical to SEQ ID NO: 9324
  ref <308>: DATABASE ACCESSION NUMBER: Refseq / NM_004355
  ref <309>: DATABASE ENTRY DATE: 2002-11-05

SEQ ID NO: 9333 - protein, 296 aa, Homo sapiens; identical to SEQ ID NO: 9325
  ref <308>: DATABASE ACCESSION NUMBER: SWISS-Prot / P04233
  ref <309>: DATABASE ENTRY DATE: 2002-06-15

SEQ ID NO: 9334 - DNA, 1150 bp, Rattus norvegicus; identical to SEQ ID NO: 9322
  ref <308>: DATABASE ACCESSION NUMBER: EMBL / X13044
  ref <309>: DATABASE ENTRY DATE: 1993-09-12

SEQ ID NO: 9335 - protein, 280 aa, Rattus norvegicus; identical to SEQ ID NO: 9323
  ref <308>: DATABASE ACCESSION NUMBER: SWISS-Prot / P10247
  ref <309>: DATABASE ENTRY DATE: 2002-06-15

SEQ ID NO: 9336 - DNA, 1304 bp, Homo sapiens; identical to SEQ ID NO: 9324
  ref <308>: DATABASE ACCESSION NUMBER: Refseq / NM_004355
  ref <309>: DATABASE ENTRY DATE: 2002-11-05

SEQ ID NO: 9337 - protein, 296 aa, Homo sapiens; identical to SEQ ID NO: 9325
  ref <308>: DATABASE ACCESSION NUMBER: SWISS-Prot / P04233
  ref <309>: DATABASE ENTRY DATE: 2002-06-15

SEQ ID NO: 9338 - DNA, 1509 bp, Rattus norvegicus
  ref <308>: DATABASE ACCESSION NUMBER: EMBL / X13411
  ref <309>: DATABASE ENTRY DATE: 1995-07-14
gaagctgtccgggagtttgccaaggagattgatgtgtcttttgtgaaaattgaagaggtcatcggagcaggggagtttggagaagtgtacaagggccgattgaagctgccaggcaagagggaaatctatgtggccatcaagaccctgaaagctgggtactcagagaaacagcgtcgggattttctgagcgaggcgagcatcatgggccagtttgaccatcccaacatcattcgcctagagggtgttgtcaccaagagccgacctgtcatgatcattacggagttcatggagaatggcgctttagactctttcctccggcaaaatgacggacagttcaccgtgatccagcttgtggggatgctgaggggcatcgctgctggcatgaagtacctatctgagatgaattatgtgcaccgggacctggctgctaggaacattctggtgaacagcaacctggtgtgcaaagtgtctgactttggcctctctcgctacctccaggatgacacctcagaccccacctacaccagctccttgggggggaagatacctgttagatggacagctccagaggccatcgcctaccgcaagtttacgtcagccagcgatgtctggagctacgggattgtcatgtgggaagtaatgtcatttggagagagaccttactgggatatgtccaatcaagatgtcatcaatgccattgagcaggactaccggctgccccctcctatggactgcccagctgccctgcaccagctcatgctggactgttggcagaaggatcgaaatagccggccccgttttgcagagatcgtcaacaccctggacaagatgatccggaacccagctagtctcaagactgtggcaaccatcaccgctgtgccttcccaacccctgcttgaccgctctatcccagacttcacggcctttaccaccgtggatgactggctaagtgccatcaaaatggtccagtacagggacagcttcctcaccgctggcttcacctccctccagctggtcacccagatgacatcagaagacctcctgagaataggggtcaccttggcaggccatcagaagaagattcttagcagcatccactcgatgagggtccagatgaaccagtcaccgtcggtaatggcatgagaactcgatgttcctaggggaggagaggaatgaaaaggaccagggtcaaaggggaaacagaggttgaccacggtggaatgtgccagaaagatcagcttcttggctgagaaacaacttcccacctgtgaagaatgaactggacctgctgcccatgggcaaccgccatttctcggccatggaagtgtgtagaagccgtgggaaaccaaacgcgtaatgattgacgataaagacagagaaaggtgatgctaaacagaagcgaagctgaaaccgtatgcgttgggaaccagggtgaactcagttcccatctgagagggactggagttccccgtctgcaggaagaaaggaaggaggtggagggaagagagg

SEQ ID NO: 9339 - protein, 984 aa, Rattus norvegicus
  ref <308>: DATABASE ACCESSION NUMBER: SWISS-Prot / CAA31777
  ref <309>: DATABASE ENTRY DATE: 2001-10-16
MALDCLLLFLLASAVAAMEETLMDTRTATAELGWTANPASGWEEVSGYDENLNTIRTYQVCNVFEPNQNNWLLTTFINRRGAHRIYTEMRFTVRDCSSLPNVPGSCKETFNLYYYETDSVIATKKSAFWSEAPYLKVDTIAADESFSQVDFGGRLMKVNTEVRSFGPLTRNGFYLAFQDYGACMSLLSVRVFFKKCPSIVQNFAVFPETMTGAESTSLVIARGTCIPNAEEVDVPIKLYCNGDGEWMVPIGRCTCKAGYEPENSVACKACPAGTFKASQEAEGCSHCPSNSRSPSEASPICTCRTGYYRADFDPPEVACTSVPSGPRNVISIVNETSIILEWHPPRETGGRDDVTYNIICKKCRADRRSCSRCDDNVEFVPRQLGLTECRVSISSLWAHTPYTFDIQAINGVSSKSPFPPQHVSVNITTNQAAPSTVPIMHQVSATMRSITLSWPQPEQPNGIILDYEIRYYEKEHNEFNSSMARSQTNTARIDGLRPGMVYVVQVRARTVAGYGKFSGKMCFQTLTDDDYKSELREQLPLIAGSAAAGVVFVVSLVAISIVCSRKRAYSKEAVYSDKLQHYSTGRGSPGMKIYIDPFTYEDPNEAVREFAKEIDVSFVKIEEVIGAGEFGEVYKGRLKLPGKREIYVAIKTLKAGYSEKQRRDFLSEASIMGQFDHPNIIRLEGVVTKSRPVMIITEFMENGALDSFLRQNDGQFTVIQLVGMLRGIAAGMKYLSEMNYVHRDLAARNILVNSNLVCKVSDFGLSRYLQDDTSDPTYTSSLGGKIPVRWTAPEAIAYRKFTSASDVWSYGIVMWEVMSFGERPYWDMSNQDVINAIEQDYRLPPPMDCPAALHQLMLDCWQKDRNSRPRFAEIVNTLDKMIRNPASLKTVATITAVPSQPLLDRSIPDFTAFTTVDDWLSAIKMVQYRDSFLTAGFTSLQLVTQMTSEDLLRIGVTLAGHQKKILSSIHSMRVQMNQSPSVMA

SEQ ID NO: 9340 - DNA, 3037 bp, Rattus norvegicus
  ref <308>: DATABASE ACCESSION NUMBER: EMBL / X13722
  ref <309>: DATABASE ENTRY DATE: 1995-03-22
ttgacccagtgcggcgtaggattgcagcccgcatacctggggcttgccacccaggttttgcagctgagacaccgtgggacccgtgatcctgtgtttgcagcgggaacatttcgggtctgtgatccgagtggggacgcgacgcagaggctgaggatgagcaccgcggatctgatgctacgctgggccatcgccctgctcctggctgctgctggagttgcagcagaagattcatgtggcaagaacgagttccagtgtagagacggaaaatgcatcgtcagcaagtgggtgtgtgacggcagccgcgagtgcccggatggctccgatgagtcccctgagacatgcatgtctgtcacctgtcgatccggtgagttcagctgtggaggccgcgtcagccgatgcattcctgactcctggagatgtgatgggcggaccgactgtgaaaatggctcggatgaactagactgctcccccaagacgtgctccctggatgagttccgctgccaggatggcaagtgcatctcccggcagtttgtgtgtgaccaagactgggattgcctggatggctctgacgaggcccactgtgcggccaccacttgtggccctgctcacttccgctgcaactcctcttcctgcatccccagcctgtgggcctgcgacggggaccgggactgtgacgatggctccgatgagtggccgcagaactgcggggccgaagacacggccgctgaggtggtcagcagcccctgctcctccctcgagttccactgtggcagtagtgagtgtatccatcgcagctgggtctgtgacggtgcggctgactgcaaggacaagtcggacgaggagaactgcgcggtgaccacctgccgacctgacgaattccagtgtgcagatggctcctgtattcacggtagccgccagtgtgaccgtgaacatgactgcaaagacatgagcgacgagcttggctgcatcaatgtgacccagtgcgatggccctaacaaattcaagtgccacagtggggagtgcatcagcttggacaaggtgtgcaactccgcccgggactgtcgtgactggtcggatgagcccatcaaggagtgcaagaccaacgagtgcttggacaacaatggtggctgttcccacatctgcaaggacctcaagattggctatgagtgcctatgtcccagcggtttccggttggtggacggccaccagtgtgaagatattgacgagtgtcaggagccagacacctgcagccagctctgtgtgaacctggagggcagcttcaagtgcgagtgtcgggccggcttccacatggaccctcacaccagggtctgcaaggctgtgggttccatagggtttctgctcttcaccaaccgccatgaggtacgtaagatgaccctggaccgcagcgagtataccagcctgatccccaacctgaagaatgtggtggcgctggacactgaggtggccaacaatagaatttactggtctgacctgtcccagagaaagatctacagcgccgtgatggaccagggcaccagcttgtcctatgatgccatcatcagtggggacctgcacgcccctgacgggctggcggtagactggatccatggcaacatctactggacggattcagttccgggcactgtttccgtggctgacaccaagggtgtcaggaggagaactctgttccgagagaaagggtccagacccagagccatcgtagtggaccctgtgcatggcttcatgtactggacagattgggggacacctgccaagatcaagaaagggggtttgaatggtgtagacatctactctctggtgaccgaggacatccagtggccaaatggcatcacactagatcttcccagtggccgcctctattgggttgattccaaactccactccatctccagcatcgatgtcaatgggggtggtcggaaaaccattttggaggatgagaagcagctagctcaccccttctccttggccatctatgaggacaaagtgtattggacagatgtcttaaatgaagccattttcagtgccaaccgcctcacgggttcagatgtgaatttggtggctaaaaacctcatgtccccggaggacattgtcctgtttcacaacgtcacgcagcctagaggggtaaactggtgtgaggcaacggttctccccaacggtggctgccagtacatgtgcctgcctgcccctcagatcagtgcccactcacccaagttcacctgcgcttgccctgatggtatgctactggccaaggacatgaggagctgcctcccagaagtcgacactgtaccgaccacccaggggacatccaccattgggcctgtggtcaccacatcagctgctgtgtcactgaagcgcaaggaggatccctcagctactaggcacaaggaggatccctcagctactaggcacaatgaggatccctcagctaccagcacctctaggcagcctggggataccccagagctcagcacagtggagtcggtgacagtgtcctcccaagtccaaggtgacatggctggcagaggggacgaggtgcagcggcacggtgtggggttcttgtccatcttcctccccattgcactggtggccctccttgtcttcggagccatcctcctgtggaggaactggcggctgaggaacattaacagcataaactttgacaacccagtctaccagaagaccacggaggacgagatccacatttgccgcagccaggatggctatacctacccctcgagacagatggtcagcctggaggatgatgtggcatgaacagctgaggggagccatctctttccgggatccgctgccacccttaggcaggaaggacgctttctcacacctccccgccctgcactggtccttccacctcagtggtctctgtgttgctcaaagcaagataagagcaaaactgggctggggccaagctcagcggcctgtctgccctgggtcctgttttatatatttattgtctggggacagaaaaggctactggccatgctccagatgggaattc

SEQ ID NO: 9341 - protein, 879 aa, Rattus norvegicus
  ref <308>: DATABASE ACCESSION NUMBER: SWISS-Prot / P35952
  ref <309>: DATABASE ENTRY DATE: 2001-10-16
MSTADLMLRWAIALLLAAAGVAAEDSCGKNEFQCRDGKCIVSKWVCDGSRECPDGSDESPETCMSVTCRSGEFSCGGRVSRCIPDSWRCDGRTDCENGSDELDCSPKTCSLDEFRCQDGKCISRQFVCDQDWDCLDGSDEAHCAATTCGPAHFRCNSSSCIPSLWACDGDRDCDDGSDEWPQNCGAEDTAAEVVSSPCSSLEFHCGSSECIHRSWVCDGAADCKDKSDEENCAVTTCRPDEFQCADGSCIHGSRQCDREHDCKDMSDELGCINVTQCDGPNKFKCHSGECISLDKVCNSARDCRDWSDEPIKECKTNECLDNNGGCSHICKDLKIGYECLCPSGFRLVDGHQCEDIDECQEPDTCSQLCVNLEGSFKCECRAGFHMDPHTRVCKAVGSIGFLLFTNRHEVRKMTLDRSEYTSLIPNLKNVVALDTEVANNRIYWSDLSQRKIYSAVMDQGTSLSYDAIISGDLHAPDGLAVDWIHGNIYWTDSVPGTVSVADTKGVRRRTLFREKGSRPRAIVVDPVHGFMYWTDWGTPAKIKKGGLNGVDIYSLVTEDIQWPNGITLDLPSGRLYWVDSKLHSISSIDVNGGGRKTILEDEKQLAHPFSLAIYEDKVYWTDVLNEAIFSANRLTGSDVNLVAKNLMSPEDIVLFHNVTQPRGVNWCEATVLPNGGCQYMCLPAPQISAHSPKFTCACPDGMLLAKDMRSCLPEVDTVPTTQGTSTIGPVVTTSAAVSLKRKEDPSATRHKEDPSATRHNEDPSATSTSRQPGDTPELSTVESVTVSSQVQGDMAGRGDEVQRHGVGFLSIFLPIALVALLVFGAILLWRNWRLRNINSINFDNPVYQKTTEDEIHICRSQDGYTYPSRQMVSLEDDVA

SEQ ID NO: 9342 - DNA, 542 bp, Homo sapiens
  ref <308>: DATABASE ACCESSION NUMBER: EMBL / S70123
  ref <309>: DATABASE ENTRY DATE: 2000-05-05
ctctgggcgacgttgctggcagaggaaatgagaagaagcccagtagcgtgagggctctgtccattgtcctccccatcgccacggagctgggtctctggtctcgggggcagctgtgtgacagagcgtgcctctccctacggtgctcctcgtcttcctttgcctgggggtcttccttctatggaagaactggcggcttaagaacatcaacagcatcaactttgacaaccccgtctatcagaagaccacagaggatgaggtccacatttgccacaaccaggacggctacagctacccctcgagacagatggtcagtctggaggatgacgtggcgtgaacatctgcctggagtcccgcccctgcccagaacccttcctgagacctcgccggccttgttttattcaaagacagagaagaccaaagcattgcctgccagagctttgttttatatatttattcatctgggaggcagaacaggcttcggacagtgcccatgcaatggcttgggttgggattttggtttcttcctttcctgtgaaggataa

SEQ ID NO: 9343 - protein, 837 aa, Homo sapiens
  ref <308>: DATABASE ACCESSION NUMBER: SWISS-Prot / AAF24515
  ref <309>: DATABASE ENTRY DATE: 2003-02-01
GDRCERNEFQCQDGKCISYKWVCDGSAECQDGSDESQETCLSVTCKSGDFSCGGRVNRCIPQFWRCDGQVDCDNGSDEQGCPPKTCSQDEFRCHDGKCISRQFVCDSDRDCLDGSDEASCPVLTCGPASFQCNSSTCIPQLWACDNDPDCEDGSDEWPQRCRGLYVFQGDSSPCSAFEFHCLSGECIHSSWRCDGGPDCKDKSDEENCAVATCRPDEFQCSDGNCIHGSRQCDREYDCKDMSDEVGCVNVTLCEGPNKFKCHSGECITLDKVCNMARDCRDWSDEPIKECGTNECLDNNGGCSHVCNDLKIGYECLCPDGFQLVAQRRCEDIDECQDPDTCSQLCVNLEGGYKCQCEEGFQLDPHTKACKAVGSIAYLFFTNRHEVRKMTLDRSEYTSLIPNLRNVVALDTEVASNRIYWSDLSQRMICSTQLDRAHGVSSYDTVISRDIQAPDGLAVDWIHSNIYWTDSVLGTVSVADTKGVKRKTLFRENGSKPRAIVVDPVHGFMYWTDWGTPAKIKKGGLNGVDIYSLVTENIQWPNGITLDLLSGRLYWVDSKLHSISSIDVNGGNRKTILEDEKRLAHPFSLAVFEDKVFWTDIINEAIFSANRLTGSDVNLLAENLLSPEDMVLFHNLTQPRGVNWCERTTLSNGGCQYLCLPASQINPHSPKFTCACPDGMLLARDMRSCLTEAEAAVATQETSTVRLKVSSTAVRTQHTTTRPVPDTSRLPGATPGLTTVEIVTMSHQALGDVAGRGNEKKPSSVRALSIVLPIVLLVFLCLGVFLLWKNWRLKNINSINFDNPVYQKTTEDEVHICHNQDGYSYPSRQMVSLEDDVA

SEQ ID NO: 9344 - DNA, 3085 bp, Rattus norvegicus
  ref <308>: DATABASE ACCESSION NUMBER: EMBL / X13804
  ref <309>: DATABASE ENTRY DATE: 1995-07-14
caccaggaggaggtgggcgagctgctcggtcagattcagggctgcggtgccgcgcaggcgcaggctcaggccgaggctcgggacgccctcaagtgcgacgtgacgtcggcgctgcgggagatccgcgcgcagctcgaaggacacacggtgcagagtacgctgcagtcagaggagtggttccgagtgagattggaccgactctcagaggcagccaaagtgaacacggatgctatgcgctctgcccaagaggagataactgagtaccggcggcagctgcaggccaggaccacagagttggaggcactgaaaagcaccaaggagtcactggagaggcagcgctctgagctggaggaccgtcatcaggtagacatggcctcctaccaggatgcaattcagcagctggacaatgagctgagaaacaccaaatgggagatggccgcgcagctccgagagtaccaggacctgctcaacgtcaagatggccctggatcttgagatcgctgcttacagaaaactcctggaaggcgaagagtgtcggattggctttggacccattcccttctctcttactgagggactcccaaaaattccctccatgtccactcacataaaagtcaaaagcgaagagaagataaaagtagtagaaaaatcggagaaggaaaccgtcattgtagaggaacagacagaagagatccaggtgacagaagaagtgacagaagaggaggacaaagaggcccaaggggaggaagaagaagaggcagaagagggaggagaagaagcagcaactacgtctccccctgcagaagaggctgcatctccagaaaaggaaaccaagtctcctgtgaaagaagaggccaagtccccagctgaggccaagtccccagctgaggccaagtcaccagctgaggccaagtccccagctgaggtcaaatctccagctgtggccaagtccccagctgaagtcaaatctccagctgaggtcaaatctccagctgaggccaagtcaccagctgaggccaagtcaccagctgaggtcaactctccagctacagtgaagtctccaggtgaggccaagtccccagctgaggccaagtcaccagctgaggtcaaatctccagtggaggccaagtcaccagctgaggccaagtctccagcttcagtgaagtccccaggtgaggccaagtcaccagctgaggccaagtcaccagctgaggtcaagtctccagctacagtgaagtccccagttgaggccaagtcaccagctgaggtcaaatctccagttacagtgaagtccccagctgaggccaagtcaccagttgaggtcaaatctccagcttcggtgaagtccccaagtgaagccaagtcacctgctggagccaagtcaccagctgaggccaagtcaccagttgtggccaaatcaccagctgaggccaagtcaccagctggagccaagcctccagctgaggccaagtcaccagctgaggccaagtctccagctgaggccaagtctccagctgaggccaagtcaccagctgaggccaagtcacctgttgaggtaaaatctccagagaaggccaagagccccgtgaaggaaggtgcaaaatccctagctgaggccaagtcccctgagaaggccaagtcccctgtgaaggaagagatcaagcctccagctgaggtgaaatcccccgagaaggccaagagccccatgaggaaggaggccaagtctcctgagaaggccaagactctggatgtgaagtctccagaagccaagcctccagcgaaggaggaagcaaagcgccccgcagacatcagatcccctgagcaggtcaaaagtcctgccaaggaggaggccaagtcccccgagaaggaagagaccaggactgaaaaggtggctcccaagaaggaagaggtgaagtcccctgtggaggaggtaaaagccaaagaacccccaaagaaggtggaggaggagaagacaccagccacaccaaagacagaggtgaaggagagcaagaaagatgaagctcccaaggaggcccagaagcccaaggcggaggagaaggagcctctcacagaaaagcccaaggactctccgggggaagccaagaaggaagaggctaaagagaagaaggcggcggccccagaggaggagacgcccgccaagttgggcgtgaaggaagaggctaaacccaaagagaaggcagaagacgccaaggccaaagaacctagcaaaccctcagagaaggagaaaccgaagaaggaggaggtgccggcagcaccagagaagaaagacaccaaggaggagaagactacggagtccaagaagcgtgaggagaaacccaaaatggagccaaggccaaggaggaggacaagggccttccccaagagcctagcaaacccaagacagaaaaggctgaaaagtcctctagcacagaccaaaaagacagccagccctcagagaaggccccagaggacaaggctgccaagggagacaagtaagaggacgagagggacacccagaatagccaaagaaactcaggacggccccggtactcaagggttggtgtaataaagtttatttcttcctttccctccgtaagaagaaacaccacttagatggcgggcccgccctcaccaaacaggatttctattaggattaagttagcaagagaagatcaaccctgagccctgcctccccaacaccaaagccctccccaaggtgatggacaattatgatagcttatcgtagccgaacggagatgtattgctgaacgctccacgtaaaacgcgtgactaaaaactgccccccctcctttccaagtaagtgcattcacttcccgtatgtcctaccgacaggtgaccgcagtaatgaatgagcagttagaaatgcattatgcttgaaatgttgtaacctattcccgaatgccttcttgttttccaaaggagcggtcaggcccttgcccggtacacgctcctggaagagctgcagcaggtgaggcagggcgctggccgctgaaccaggccagggtgtgctgtccactgaaggccactttcgattgcttccgtgcaataaaacccaagtgcttctg

SEQ ID NO: 9345 - protein, 831 aa, Rattus norvegicus; identical to SEQ ID NO: 4796
  ref <308>: DATABASE ACCESSION NUMBER: SWISS-Prot / CAA32038
  ref <309>: DATABASE ENTRY DATE: 2001-10-16

SEQ ID NO: 9346 - DNA, 3750 bp, Homo sapiens
atgatgagcttcggcggcgcggacgcgctgctgggcgccccgttcgcgccgctgcatggcggcggcagcctccactacgcgctagcccgaaagggtggcgcaggcgggacgcgctccgccgctggctcctccagcggcttccactcgtggacacggacgtccgtgagctccgtgtccgcctcgcccagccgcttccgtggcgcaggcgccgcctcaagcaccgactcgctggacacgctgagcaacgggccggagggctgcatggtggcggtggccacctcacgcagtgagaaggagcagctgcaggcgctgaacgaccgcttcgccgggtacatcgacaaggtgcggcagctggaggcgcacaaccgcagcctggagggcgaggctgcggcgctgcggcagcagcaggcgggccgctccgctatgggcgagctgtacgagcgcgaggtccgcgagatgcgcggcgcggtgctgcgcctgggcgcggcgcgcggtcagctacgcctggagcaggagcacctgctcgaggacatcgcgcacgtgcgccagcgcctagacgacgaggcccggcagcgagaggaggccgaggcggcggcccgcgcgctggcgcgcttcgcgcaggaggccgaggcggcgcgcgtggacctgcagaagaaggcgcaggcgctgcaggaggagtgcggctacctgcggcgccaccaccaggaagaggtgggcgagctgctcggccagatccagggctccggcgccgcgcaggcgcagatgcaggccgagacgcgcgacgccctgaagtgcgacgtgacgtcggcgctgcgcgagattcgcgcgcagcttgaaggccacgcggtgcagagcacgctgcagtccgaggagtggttccgagtgaggctggaccgactgtcggaggcagccaaggtgaacacagacgctatgcgctcagcgcaggaggagataactgagtaccggcgtcagctgcaggccaggaccacagagctggaggcactgaaaagcaccaaggactcactggagaggcagcgctctgagctggaggaccgtcatcaggccgacattgcctcctaccaggaagccattcagcagctggacgctgagctgaggaacaccaagtgggagatggccgcccagctgcgagaataccaggacctgctcaatgtcaagatggctctggatatagagatagctgcttacagaaaactcctggaaggtgaagagtgtcggattggctttggcccaattcctttctcgcttccagaaggactccccaaaattccctctgtgtccactcacataaaggtgaaaagcgaagagaagatcaaagtggtggagaagtctgagaaagaaactgtgattgtggaggaacagacagaggagacccaagtgactgaagaagtgactgaagaagaggagaaagaggccaaagaggaggagggcaaggaggaagaagggggtgaagaagaggaggcagaagggggagaagaagaaacaaagtctcccccagcagaagaggctgcatccccagagaaggaagccaagtcaccagtaaaggaagaggcaaagtcaccggctgaggccaagtccccagagaaggaggaagcaaaatccccagccgaagtcaagtcccctgagaaggccaagtctccagcaaaggaagaggcaaagtcaccgcctgaggccaagtccccagagaaggaggaagcaaaatctccagctgaggtcaagtcccccgagaaggccaagtccccagcaaaggaagaggcaaagtcaccggctgaggccaagtctccagagaaggccaagtccccagtgaaggaagaagcaaagtcaccggctgaggccaagtccccagtgaaggaagaagcaaaatctccagctgaggtcaagtccccggaaaaggccaagtctccaacgaaggaggaagcaaagtcccctgagaaggccaagtccccagagaaggaagaggccaagtcccctgagaaggccaagtccccagtgaaggcagaagcaaagtcccctgagaaggccaagtccccagtgaaggcagaagcaaagtcccctgagaaggccaagtccccagtgaaggaagaagcaaagtcccctgagaaggccaagtccccagtgaaggaagaagcaaagtcccctgagaaggccaagtccccagtgaaggaagaagcaaagacccccgagaaggccaagtccccagtgaaggaagaagccaagtccccagagaaggccaagtccccagagaaggccaagactcttgatgtgaagtctccagaagccaagactccagcgaaggaggaagcaaggtcccctgcagacaaattccctgaaaaggccaaaagccctgtcaaggaggaggtcaagtccccagagaaggcgaaatctcccctgaaggcggatgccaaggcccctgagaaggagatcccaaaaaaggaagaggtgaagtccccagtgaaggaggaggagaagccccaggaggtgaaagtcaaagagcccccaaagaaggcagaggaagagaaagcccctgccacaccaaaaacagaggagaagaaggacagcaagaaagaggaggcacccaagaaggaggctccaaagcccaaggtggaggagaagaaggaacctgctgtcgaaaagcccaaagaatccaaagttgaagccaagaaggaagaggctgaagataagaaaaaagtccccaccccagagaaggaggctcctgccaaggtggaggtgaaggaagacgctaaacccaaagaaaagacagaggtggccaagaaggaaccagatgatgccaaggccaaggaacccagcaaaccagcagagaagaaggaggcagcaccggagaaaaaagacaccaaggaggagaaggccaagaagcctgaggagaaacccaagacagaggccaaagccaaggaagatgacaagaccctctcaaaagagcctagcaagcctaaggcagaaaaggctgaaaaatcctccagcacagaccaaaaagacagcaagcctccagagaaggccacagaagacaaggccgccaaggggaagtaaggcagggagaaaggaacatccggaacagccaaagaaactcagaagagtcccggagctcaaggatcagagtaacacaattttcactttttctgtctttatgtaagaagaaactgcttagatgacggggcctccttcttcaaacaggaatttctgttagcaatatgttagcaagagagggcactcccaggcccctgcccccaggccctccccaggcgatggacaattatgatagcttatgtagctgaatgtgatacatgccgaatgccacacgtaaacacttgactataaaaactgcccccctcctttccaaataagtgcatttattgcctctatgtgcaactgacagatgaccgcaataatgaatgagcagttagaaatacattatgcttgagatgtcttaacctattcccaaatgccttctgttttccaaaggagtggtcaagcccttgcccagagctctctattctggaagagcggtccaggtggggccggggactggccactgaattatgccagggcgcactttccactggagttcactttcaattgcttctgtgcaataaaaccaagtgcttataaaatgaaaatgttgctgctgttattctctttccctgggaaggctgggggcagggcaggggaggtctggatgtgacaccccagactgcatgggactgagcaagcatcagt

SEQ ID NO: 9347 - protein, 1020 aa, Homo sapiens [sequence omitted]

SEQ ID NO: 9348 - DNA, 654 bp, Rattus norvegicus
  ref <308>: DATABASE ACCESSION NUMBER: EMBL / X13905
  ref <309>: DATABASE ENTRY DATE: 1993-09-12
ccgctgccgccatgaaccccgaatatgactacctgtttaagctgcttttgattggtgactcgggcgtgggcaagtcatgcctgcttctgcggtttgctgatgacacgtacacagagagctacatcagcaccattggggtggacttcaagattcgaaccattgaactggatggcaaaaccatcaaactacagatttgggacacagctggtcaggaacggttcaggacagtcacttccagctactatcggggtgctcatggcatcattgtggtgtatgacgtcactgaccaggaatcctacgctaatgtgaaacagtggctgcaggaaatagatcgctacgccagtgagaatgtcaataaactgctggtaggcaacaagagtgacctcaccaccaagaaggtcgtggacaataccacagccaaggaatttgcagactctctgggtgtccccttcctggagacaagtgccaagaatgccaccaatgttgaacaggcattcatgacaatggctgcagagatcaaaaaacggatggggccaggagcagcatctgggggtgaacggcccaacctgaagatcgacagcactcctgtgaaatctgctagtggtggctgctgctaggggggggtacttggggagggcacttctccagatgatg

SEQ ID NO: 9349 - protein, 201 aa, Rattus norvegicus; identical to SEQ ID NO: 4324
  ref <308>: DATABASE ACCESSION NUMBER: SWISS-Prot / CAA32105
  ref <309>: DATABASE ENTRY DATE: 1994-10-01

SEQ ID NO: 9350 - DNA, 723 bp, Homo sapiens
  ref <308>: DATABASE ACCESSION NUMBER: Refseq / NM_004161
  ref <309>: DATABASE ENTRY DATE: 2002-03-15
gggcggcggtcggcagcaaggcggcggtgcgccgccgcagctgcagtgacatgtccagcatgaatcccgaatatgattatttattcaagttacttctgattggcgactcaggggttggaaagtcttgccttcttcttaggtttgcagatgatacatatacagaaagctacatcagcacaattggtgtggatttcaaaataagaactatagagttagacgggaaaacaatcaagcttcaaatatgggacacagcaggccaggaaagatttcgaacaatcacctccagttattacagaggagcccatggcatcatagttgtgtatgatgtgacagatcaggagtccttcaataatgttaaacagtggctgcaggaaatagatcgttatgccagtgaaaatgtcaacaaattgttggtagggaacaaatgtgatctgaccacaaagaaagtagtagactacacaacagcgaaggaatttgctgattcccttggaattccgtttttggaaaccagtgctaagaatgcaacgaacgtagaacagtctttcatgacgatggcagctgagattaaaaagcgaatgggtcccggagcaacagctggtggtgctgagaagtccaatgttaaaattcagagcactccagtcaagcagtcaggtggaggttgctgctaaatttgcctccatccttttctcacagcaatgaatttgcaatctgaacccaagtgaa

SEQ ID NO: 9351 - protein, 205 aa, Homo sapiens
  ref <308>: DATABASE ACCESSION NUMBER: SWISS-Prot / P11476
  ref <309>: DATABASE ENTRY DATE: 2002-06-15
MSSMNPEYDYLFKLLLIGDSGVGKSCLLLRFADDTYTESYISTIGVDFKIRTIELDGKTIKLQIWDTAGQERFRTITSSYYRGAHGIIVVYDVTDQESFNNVKQWLQEIDRYASENVNKLLVGNKCDLTTKKVVDYTTAKEFADSLGIPFLETSAKNATNVEQSFMTMAAEIKKRMGPGATAGGAEKSNVKIQSTPVKQSGGGCC

SEQ ID NO: 9352 - DNA, 654 bp, Rattus norvegicus; identical to SEQ ID NO: 9348
  ref <308>: DATABASE ACCESSION NUMBER: EMBL / X13905
  ref <309>: DATABASE ENTRY DATE: 1993-09-12

SEQ ID NO: 9353 - protein, 201 aa, Rattus norvegicus; identical to SEQ ID NO: 4324
  ref <308>: DATABASE ACCESSION NUMBER: SWISS-Prot / CAA32105
  ref <309>: DATABASE ENTRY DATE: 1994-10-01

SEQ ID NO: 9354 - DNA, 723 bp, Homo sapiens; identical to SEQ ID NO: 9350
  ref <308>: DATABASE ACCESSION NUMBER: Refseq / NM_004161
  ref <309>: DATABASE ENTRY DATE: 2002-03-15

SEQ ID NO: 9355 - protein, 205 aa, Homo sapiens; identical to SEQ ID NO: 9351
  ref <308>: DATABASE ACCESSION NUMBER: SWISS-Prot / P11476
  ref <309>: DATABASE ENTRY DATE: 2002-06-15

SEQ ID NO: 9356 - DNA, 1446 bp, Rattus norvegicus
  ref <308>: DATABASE ACCESSION NUMBER: EMBL / X13933
  ref <309>: DATABASE ENTRY DATE: 2000-03-08
acgcacaacgcaggtagcgcgttagcagcagcagcggaggcatctcggcggtcacagcccctgcgctgtgcagccaccctcgcctgccgctcttccttccttcgctcgcaccatggctgatcagctgactgaagaacagattgctgaattcaaggaagctttctccctatttgataaagatggggacggcaccatcacaacaaaggagctggggactgtcatgcggtcactgggtcagaacccaacagaggctgaactgcaggatatgatcaacgaggtggatgccgacgggaatggcaccattgacttcccagagttcttgactatgatggctagaaaaatgaaagacacagatagcgaagaagaaatccgtgaggcattccgagtctttgacaaggatggcaatggctacatcagtgcggcagaactgcgccacgtcatgacaaacctcggggaaaagctaacagatgaagaagtagacgaaatgatcagagaagcagatattgatggagacggacaggtcaactatgaagaattcgtacagatgatgactgcaaaatgaagacctactttcaactactttccccctctagaagaatcaaattgaaatcttttacttacctcttacaaaaaaaaaaaaagaaaaaagaaaaaagttcatttcttcattctgtttgtatctagcaaaactgaatgtcaaaagtaccttctgtccacacacaaaatctgcatgtattggttggtggtcctgccccctaaagatcaagccccctacatgagttttacagtataaatactcgtactaccttataaggaagcacttagtgactccttcaagttccatttgctaatgattaacacactgtctgggctggccagtttctcatgcatgcagcttggtgattgagcacagtcaggcctttgtattaaaactgaaaaatggaaaaaacaaattcaaactctcagatggcttctagttcaatctgttcagataaatgtcagcagccagtttaccgcaaacaaacatttaaaattggtttacctcaggatgatgtgcaggaaacgggtgaaggctaaactttgagacacagccctagatgtaggacagtcctcttcaagtgccccaatcccatggtgacagtgacaccctggtggcgagcccgagtgtgatggttcaccgctgtgcacattgcattggagtgaagtgaacaaggctgtcaccaaatcacacacgttttaataagaaatgtttactaagggagcatctttggactctctgttttaaaaccttgtgaaccatgactcggagccagcagagtaggctgtgtctgtggacttgagcacaccatcaacattgctgttcaggaaattataatttacgtccattccaagttgtaaatgctagtcttttattttttttttccaataaaaagaccattaacttaa

SEQ ID NO: 9357 - protein, 148 aa, Rattus norvegicus; identical to SEQ ID NO: 3043
  ref <308>: DATABASE ACCESSION NUMBER: SWISS-Prot / P02593
  ref <309>: DATABASE ENTRY DATE: 2002-06-15

SEQ ID NO: 9358 - DNA, 110 bp, Homo sapiens
  ref <308>: DATABASE ACCESSION NUMBER: EMBL / AI802286
  ref <309>: DATABASE ENTRY DATE: 2000-03-04
agagatgaaaggctgcagaaatgtttattgaatacagtgccaggtttataaataaaacgtatttacaatttccatagagttggtcccccatcagagaggtggttaaatct

SEQ ID NO: 9359 - protein, 149 aa, Homo sapiens
  ref <308>: DATABASE ACCESSION NUMBER: SWISS-Prot / AAH08437
  ref <309>: DATABASE ENTRY DATE: 2003-02-01
MADQLTEEQIAEFKEAFSLFDKDGDGTITTKELGTVMRSLGQNPTEAELQDMINEVDADGNGTIDFPEFLTMMARKMKDTDSEEEIREAFRVFDKDGNGYISAAELRHVMTNLGEKLTDEEVDQMIREADIDGDGQVNYEEFVQMMTAK

SEQ ID NO: 9360 - DNA, 1525 bp, Rattus norvegicus
  ref <308>: DATABASE ACCESSION NUMBER: EMBL / X13983
  ref <309>: DATABASE ENTRY DATE: 1996-04-22
caaggatcaaatgtgagctttcgtattgccaagctcttctctgatttaaagccaactccctttaccaccctcctaagtagttaggcattcccttcaggacaaaagaaatttcatttcatttcattaagagcatcgtcgctacccttgaatatgtatgtcgttttaaagcttagaaggccccttgcccatctccttcctctgccaagtcaccactcagaatttatggcttactttagatttctgcttccttccacgttgtttccagcccacatacagtgtgtctctggcatctgccctcaggagacttcaacttctctaatgatatcggttggctactcaaatgcaaaatctgtcctatcccctgccccgtatcttggaacttttatgggttctgacttctacttatttgacattctatcgctaggtcctagccaaggaggacccatgaatggttagaaataaccaaggagctgcagcaacgagaggatggatgcatgatttaatgaaattgcctccagggcctggagactagagaggggagtgttgggcaaaagtgtttgtgtagtgaatggcaaagtcagctggggtgttggttaggcacagtaaaaaggggttatttgacacttgttacttttcaccttcttaaaacagaaatgagtatatgtgaaggttaaggtcaatgttatgttatactggaatttagaaattcactgtgaaggttacacttactgaccagcaagcccaagaccctcctgtctcctgtcctccagaacccagattctagctaagcattaggaaacctaatcatttctcctggccccgacacttcattttcagtcaatctaatgtataataatacctctaaagtcaatacctacttcctagtttggttcaaaatgctttccatagaagggtgctgatcatgggcctcacgttaaagacaggccttatgtggcccagagcttgctggcacactccgttggagtgaactattcaagcctcccagggctgcttaagccacagcctccttgccaactatccagacagaagctcagagcatccctaagaggctgtgggggaggagaagccgattatcaagtttcatgtacaaaagagaaaaagtgagcagtaactggaaagtccttaatccttctgggaattctggctaacgggtcaggaattaaccttggcggtaattaggccatcagtgactctttcagagaatgttcaaaaacctcagctttgtttggagaactcgtgtgggtgggagcagctgtttgcacaaagaacagcataaagtctagctgctcctcaccacgtccaggaccagatctctggcggggagtagggtgcaaggcagccaggtctccgatcctttccgcagcatggggaagcacaggctccggagcctggccctgctgccactgctgctgcgcctgctgctgctgctgctgcccaccgatgcctcagctccacaaaaaccgtgagtccagcaaacgccagacgcttcgatttagggtttctg

SEQ ID NO: 9361 - protein, 1472 aa, Rattus norvegicus; identical to SEQ ID NO: 3447
  ref <308>: DATABASE ACCESSION NUMBER: Refseq / NP_036620
  ref <309>: DATABASE ENTRY DATE: 2002-11-05

SEQ ID NO: 9362 - DNA, 4576 bp, Homo sapiens; identical to SEQ ID NO: 6289

SEQ ID NO: 9363 - protein, 1474 aa, Homo sapiens; identical to SEQ ID NO: 6290

SEQ ID NO: 9364 - DNA, 591 bp, Rattus norvegicus
  ref <308>: DATABASE ACCESSION NUMBER: EMBL / X14181
  ref <309>: DATABASE ENTRY DATE: 1995-10-03
cttttgtgagtggcagtgaacgagcacgcactgctatgaaggcgtcgggcacgcttcgggagtacaaggtggtggggcgttgcttgccaaccccaaaatgccacacaccgccactgtaccgaatgcgaatctttgcacccaaccatgtggtggccaagtcccgcttctggtactttgtgtcgcagctgaagaagatgaagaagtcatccggggaaattgtgtactgtgggcaggtgtttgagaagtcacccctgcgtgtgaagaacttcggcatctggctgcgctatgattcccgaagtggcactcacaacatgtaccgagagtaccgggacctgaccactgccggcgcggtcacacagtgctaccgagacatgggtgcccgacaccgtgcccgtgcgcactccatccagatcatgaaggtggaagagattgcagctggcaagtgccgccggccagctgtcaagcagttccacgactccaagatcaagttcccattgccccaccgtgtgttgcggcgccagcacaaaccacgcttcaccaccaagaggccaaacaccttcttctagacaccagagacccactgaataaaag

SEQ ID NO: 9365 - protein, 176 aa, Rattus norvegicus
  ref <308>: DATABASE ACCESSION NUMBER: SWISS-Prot / CAA32385
  ref <309>: DATABASE ENTRY DATE: 2002-06-15
MKASGTLREYKVVGRCLPTPKCHTPPLYRMRIFAPNHVVAKSRFWYFVSQLKKMKKSSGEIVYCGQVFEKSPLRVKNFGIWLRYDSRSGTHNMYREYRDLTTAGAVTQCYRDMGARHRARAHSIQIMKVEEIAAGKCRRPAVKQFHDSKIKFPLPHRVLRRQHKPRFTTKRPNTFF

SEQ ID NO: 9366 - DNA, 618 bp, Homo sapiens
  ref <308>: DATABASE ACCESSION NUMBER: Refseq / NM_000980
  ref <309>: DATABASE ENTRY DATE: 2002-11-05
cttttgcgggtggcggcgaacgcggagagcacgccatgaaggcctcgggcacgctacgagagtacaaggtagtgggtcgctgcctgcccacccccaaatgccacacgccgcccctctaccgcatgcgaatctttgcgcctaatcatgtcgtcgccaagtcccgcttctggtactttgtatctcagttaaagaagatgaagaagtcttcaggggagattgtctactgtgggcaggtgtttgagaagtcccccctgcgggtgaagaacttcgggatctggctgcgctatgactcccggagcggcacccacaacatgtaccgggaataccgggacctgaccaccgcaggcgctgtcacccagtgctaccgagacatgggtgcccggcaccgcgcccgagcccactccattcagatcatgaaggtggaggagatcgcggccagcaagtgccgccggccggctgtcaagcagttccacgactccaagatcaagttcccgctgccccaccgggtcctgcgccgtcagcacaagccacgcttcaccaccaagaggcccaacaccttcttctaggtgcagggccctcgtccgggtgtgccccaaataaactcaggaacgccccggt

SEQ ID NO: 9367 - protein, 176 aa, Homo sapiens [sequence omitted]

SEQ ID NO: 9368 - DNA, 591 bp, Rattus norvegicus; identical to SEQ ID NO: 9364
  ref <308>: DATABASE ACCESSION NUMBER: EMBL / X14181
  ref <309>: DATABASE ENTRY DATE: 1995-10-03

SEQ ID NO: 9369 - protein, 176 aa, Rattus norvegicus; identical to SEQ ID NO: 9365
  ref <308>: DATABASE ACCESSION NUMBER: SWISS-Prot / CAA32385
  ref <309>: DATABASE ENTRY DATE: 2002-06-15

SEQ ID NO: 9370 - DNA, 618 bp, Homo sapiens; identical to SEQ ID NO: 9366
  ref <308>: DATABASE ACCESSION NUMBER: Refseq / NM_000980
  ref <309>: DATABASE ENTRY DATE: 2002-11-05

SEQ ID NO: 9371 - protein, 176 aa, Homo sapiens [sequence omitted]

SEQ ID NO: 9372 - DNA, 591 bp, Rattus norvegicus; identical to SEQ ID NO: 9364
  ref <308>: DATABASE ACCESSION NUMBER: EMBL / X14181
  ref <309>: DATABASE ENTRY DATE: 1995-10-03

SEQ ID NO: 9373 - protein, 176 aa, Rattus norvegicus; identical to SEQ ID NO: 9365
  ref <308>: DATABASE ACCESSION NUMBER: SWISS-Prot / CAA32385
  ref <309>: DATABASE ENTRY DATE: 2002-06-15

SEQ ID NO: 9374 - DNA, 618 bp, Homo sapiens; identical to SEQ ID NO: 9366
  ref <308>: DATABASE ACCESSION NUMBER: Refseq / NM_000980
  ref <309>: DATABASE ENTRY DATE: 2002-11-05

SEQ ID NO: 9375 - protein, 176 aa, Homo sapiens [sequence omitted]

SEQ ID NO: 9376 - DNA, 591 bp, Rattus norvegicus; identical to SEQ ID NO: 9364
  ref <308>: DATABASE ACCESSION NUMBER: EMBL / X14181
  ref <309>: DATABASE ENTRY DATE: 1995-10-03

SEQ ID NO: 9377 - protein, 176 aa, Rattus norvegicus; identical to SEQ ID NO: 9365
  ref <308>: DATABASE ACCESSION NUMBER: SWISS-Prot / CAA32385
  ref <309>: DATABASE ENTRY DATE: 2002-06-15

SEQ ID NO: 9378 - DNA, 618 bp, Homo sapiens; identical to SEQ ID NO: 9366
  ref <308>: DATABASE ACCESSION NUMBER: Refseq / NM_000980
  ref <309>: DATABASE ENTRY DATE: 2002-11-05

SEQ ID NO: 9379 - protein, 176 aa, Homo sapiens [sequence omitted]

SEQ ID NO: 9380 - DNA, 907 bp, Rattus norvegicus
  ref <308>: DATABASE ACCESSION NUMBER: EMBL / X14210
  ref <309>: DATABASE ENTRY DATE: 1993-09-12
tctttccgttcccagcgcagcatggctcgtggtcccaagaaacatctgaagcgcgtagcggctccaaaacactggatgctggataagctgactggcgtgtttgctcctcgtccatccactggtccacacaaactgagggaatgcctgcctctgatcattttcctaaggaacagacttaagtatgccctgactggagatgaagtaaaaaagatttgcatgcagcgattcattaagattgatgggaaagtcaggaccgatataacctaccctgctgggtttatggatgtcatcagcattgacaagactggagagaacttccgtctgatctatgacaccaagggtcgctttgctgtccatcgaattacacctgaggaggccaagtacaagttgtgcaaagtgagaaagatctttgtgggcacaaaaggaatcccacatctggtgacccatgatgcccgtactattcgataccctgatcccctcatcaaggtgaatgacaccattcagattgatttggaaacaggcaagataactgatttcatcaagttcgacactgggaacctgtgtatggtgactggaggtgctaacttggggagaattggtgtaatcaccaatagggagagacatcctggctcttttgatgtggttcatgtgaaagatgccaacggcaacagctttgccactcgtctttccaacatttttgttattggcaagggcaacaaaccgtggatttctcttccccgaggaaaaggaatccgccttaccattgctgaagagagagacaagaggctagcagccaaacagagcagtgggtgaaatggtctctaggagacatgctggaggagtatttgtacctcaacacaacaagcctttctaagcaacatgctagattaaacagcatgatgaaatc

SEQ ID NO: 9381 - protein, 262 aa, Rattus norvegicus
  ref <308>: DATABASE ACCESSION NUMBER: SWISS-Prot / CAA32427
  ref <309>: DATABASE ENTRY DATE: 2002-06-15
ARGPKKHLKRVAAPKHWMLDKLTGVFAPRPSTGPHKLRECLPLIIFLRNRLKYALTGDEVKKICMQRFIKIDGKVRTDITYPAGFMDVISIDKTGENFRLIYDTKGRFAVHRITPEEAKYKLCKVRKIFVGTKGIPHLVTHDARTIRYPDPLIKVNDTIQIDLETGKITDFIKFDTGNLCMVTGGANLGRIGVITNRERHPGSFDVVHVKDANGNSFATRLSNIFVIGKGNKPWISLPRGKGIRLTIAEERDKRLAAKQSSG

SEQ ID NO: 9382 - DNA, 916 bp, Homo sapiens
  ref <308>: DATABASE ACCESSION NUMBER: Refseq / NM_001007
  ref <309>: DATABASE ENTRY DATE: 2002-11-05
aagacggaggtcctctttccttgcctaacgcagccatggctcgtggtcccaagaagcatctgaagcgggtggcagctccaaagcattggatgctggataaattgaccggtgtgtttgctcctcgtccatccaccggtccccacaagttgagagagtgtctccccctcatcattttcctgaggaacagacttaagtatgccctgacaggagatgaagtaaagaagatttgcatgcagcggttcattaaaatcgatggcaaggtccgaactgatataacctaccctgctggattcatggatgtcatcagcattgacaagacgggagagaatttccgtctgatctatgacaccaagggtcgctttgctgtacatcgtattacacctgaggaggccaagtacaagttgtgcaaagtgagaaagatctttgtgggcacaaaaggaatccctcatctggtgactcatgatgcccgcaccatccgctaccccgatcccctcatcaaggtgaatgataccattcagattgatttggagactggcaagattactgatttcatcaagttcgacactggtaacctgtgtatggtgactggaggtgctaacctaggaagaattggtgtgatcaccaacagagagaggcaccctggatcttttgacgtggttcacgtgaaagatgccaatggcaacagctttgccactcgactttccaacatttttgttattggcaagggcaacaaaccatggatttctcttccccgaggaaagggtatccgcctcaccattgctgaagagagagacaaaagactggcggccaaacagagcagtgggtgaaatgggtccctgggtgacatgtcagatctttgtacgtaattaaaaatattgtggcaggattaatagcaaaaaaaaaaaaaaaaaaaaaa

SEQ ID NO: 9383 - protein, 262 aa, Homo sapiens; identical to SEQ ID NO: 9381
  ref <308>: DATABASE ACCESSION NUMBER: SWISS-Prot / P12750
  ref <309>: DATABASE ENTRY DATE: 2002-06-15

SEQ ID NO: 9384 - DNA, 907 bp, Rattus norvegicus; identical to SEQ ID NO: 9380
  ref <308>: DATABASE ACCESSION NUMBER: EMBL / X14210
  ref <309>: DATABASE ENTRY DATE: 1993-09-12

SEQ ID NO: 9385 - protein, 262 aa, Rattus norvegicus; identical to SEQ ID NO: 9381
  ref <308>: DATABASE ACCESSION NUMBER: SWISS-Prot / CAA32427
  ref <309>: DATABASE ENTRY DATE: 2002-06-15

SEQ ID NO: 9386 - DNA, 916 bp, Homo sapiens; identical to SEQ ID NO: 9382
  ref <308>: DATABASE ACCESSION NUMBER: Refseq / NM_001007
  ref <309>: DATABASE ENTRY DATE: 2002-11-05

SEQ ID NO: 9387 - protein, 262 aa, Homo sapiens; identical to SEQ ID NO: 9381
  ref <308>: DATABASE ACCESSION NUMBER: SWISS-Prot / P12750
  ref <309>: DATABASE ENTRY DATE: 2002-06-15

SEQ ID NO: 9388 - DNA, 907 bp, Rattus norvegicus; identical to SEQ ID NO: 9380
  ref <308>: DATABASE ACCESSION NUMBER: EMBL / X14210
  ref <309>: DATABASE ENTRY DATE: 1993-09-12

SEQ ID NO: 9389 - protein, 262 aa, Rattus norvegicus; identical to SEQ ID NO: 9381
  ref <308>: DATABASE ACCESSION NUMBER: SWISS-Prot / CAA32427
  ref <309>: DATABASE ENTRY DATE: 2002-06-15

SEQ ID NO: 9390 - DNA, 916 bp, Homo sapiens; identical to SEQ ID NO: 9382
  ref <308>: DATABASE ACCESSION NUMBER: Refseq / NM_001007
  ref <309>: DATABASE ENTRY DATE: 2002-11-05

SEQ ID NO: 9391 - protein, 262 aa, Homo sapiens; identical to SEQ ID NO: 9381
  ref <308>: DATABASE ACCESSION NUMBER: SWISS-Prot / P12750
  ref <309>: DATABASE ENTRY DATE: 2002-06-15

SEQ ID NO: 9392 - DNA, 907 bp, Rattus norvegicus; identical to SEQ ID NO: 9380
  ref <308>: DATABASE ACCESSION NUMBER: EMBL / X14210
  ref <309>: DATABASE ENTRY DATE: 1993-09-12

SEQ ID NO: 9393 - protein, 262 aa, Rattus norvegicus; identical to SEQ ID NO: 9381
  ref <308>: DATABASE ACCESSION NUMBER: SWISS-Prot / CAA32427
  ref <309>: DATABASE ENTRY DATE: 2002-06-15

SEQ ID NO: 9394 - DNA, 916 bp, Homo sapiens; identical to SEQ ID NO: 9382
  ref <308>: DATABASE ACCESSION NUMBER: Refseq / NM_001007
  ref <309>: DATABASE ENTRY DATE: 2002-11-05

SEQ ID NO: 9395 - protein, 262 aa, Homo sapiens; identical to SEQ ID NO: 9381
  ref <308>: DATABASE ACCESSION NUMBER: SWISS-Prot / P12750
  ref <309>: DATABASE ENTRY DATE: 2002-06-15

SEQ ID NO: 9396 - DNA, 1353 bp, Rattus norvegicus
  ref <308>: DATABASE ACCESSION NUMBER: EMBL / X14254
  ref <309>: DATABASE ENTRY DATE: 1997-02-18
cagcagcagcagcagcagcagcaccagcagcacttgggggaaaagctagaggctagagtcatggatgaccagcgcgacctcatctctaaccatgagcagctgcccatcctgggccagcgtgctagagccccagaaagcaattgcaaccgtggagtcctgtacaccagtgtctctgtcctggtggctctgctcttggctgggcaggccaccactgcttacttcctgtaccagcagcagggccgcctggacaagctgaccgtcacctcccagaacctgcaactggagaaccttcgcatgaagcttccgaaatctgccaaacctgtgagcccgatgcgcatggctactcccttgctgatgcgcccactgtccatggataacatgctccaagcgcccgtgaagaatgttaccaagtatggcaacatgacccaggaccacgtgatgcacctgcttacgaagtctggacccgtgaactacccacagctgaaggggagcttcccggagaatctgaagcaccttaagaactctatgaatggtctggactggaaggtctttgagagctggatgaaacagtggctgttgtttgaaatgagcaagaactccctggaggagaagcagcccacccagactccacctaaagtattgaccaagtgccaggaagaagtcagccacatccctgatgtccacccgggggcgttccgtcccaagtgtgatgagaacggtaactatatgccactccagtgccatgggagcactggctactgctggtgtgtgttccccaacggcactgaggtccctcacaccaagagccgcgggcgccataactgcagtgagccactggacatggaagacccatcttctggcctgggagtgaccaagcaggatatgggccaaatgttcttgtgaagacagaagccagctctgcacggcggcagctcccctgctcctcagcccttcttacactccctaacatcacaccccatttcccgtcttcctgcaccctggggcttgagactggtatctgcttcaccgtccctggacacaacaaatgaaaccggaacagaatgagaacactggagggagggccttgctgcctacccccatctaagggacccccatttctgacccattagcagtctttaatgtggggctctgagatctaggcccactgacagggataggggatgccctacccttaatctaggctggatacatttgctgtcttctcaaggaagaggccaagccctcccagcaacccttcctcatgtcctgccgacgcccctgggatccctgctcagccaagcttgtcagcagcctgtaggaccatggttcacgtgacaataaaaggtagaaggt

SEQ ID NO: 9397 - protein, 280 aa, Rattus norvegicus; identical to SEQ ID NO: 9323
  ref <308>: DATABASE ACCESSION NUMBER: SWISS-Prot / CAA32468
  ref <309>: DATABASE ENTRY DATE: 2002-06-15

SEQ ID NO: 9398 - DNA, 1287 bp, Homo sapiens
  ref <308>: DATABASE ACCESSION NUMBER: EMBL / K01144
  ref <309>: DATABASE ENTRY DATE: 2000-03-04
ctgcaggggggggggggggggggggggacattggctcttccttggggagtgatgcacaggaggagaagcaggagctgtcgggaagatcagaagccagtcatggatgaccagcgcgaccttatctccaacaatgagcaactgcccatgctgggccggcgccctggggccccggagagcaagtgcagccgcggagccctgtacacaggcttttccatcctggtgactctgctcctcgctggccaggccaccaccgcctacttcctgtaccagcagcagggccggctggacaaactgacagtcacctcccagaacctgcagctggagaacctgcgcatgaagcttcccaagcctcccaagcctgtgagcaagatgcgcatggccaccccgctgctgatgcaggcgctgcccatgggagccctgccccaggggcccatgcagaatgccaccaagtatggcaacatgacagaggaccatgtgatgcacctgctccagaatgctgaccccctgaaggtgtacccgccactgaaggggagcttcccggagaacctgagacaccttaagaacaccatggagaccatagactggaaggtctttgagagctggatgcaccattggctcctgtttgaaatgagcaggcactccttggagcaaaagcccactgacgctccaccgaaagagtcactggaactggaggacccgtcttctgggctgggtgtgaccaagcaggatctgggcccagtccccatgtgagagcagcagaggcggtcttcaacatcctgccagccccacacagctacagctttcttgctcccttcagcccccagcccctcccccatctcccaccctgtacctcatcccatgagaccctggtgcctggctctttcgtcacccttggacaagacaaaccaagtcggaacagcagataacaatgcagcaaggccctgctgcccaatctccatctgtcaacaggggcgtgaggtcccaggaagtggccaaaagctagacagatccccgttcctgacatcacagcagcctccaacacaaggctccaagacctaggctcatggacgagatgggaaggcacagggagaagggataaccctacacccagaccccaggctggacatgctgactgtcctctcccctccagcctttggccttggcttttctagcctatttacctgcaggctgagccactctcttccctttccccagcatcactccccaaggaagagccaatgttttccacccatccctccccccccccccccccccccccccctgcag

SEQ ID NO: 9399 - protein, 296 aa, Homo sapiens; identical to SEQ ID NO: 9325
  ref <308>: DATABASE ACCESSION NUMBER: SWISS-Prot / P04233
  ref <309>: DATABASE ENTRY DATE: 2002-06-15

SEQ ID NO: 9400 - DNA, 1353 bp, Rattus norvegicus; identical to SEQ ID NO: 9396
  ref <308>: DATABASE ACCESSION NUMBER: EMBL / X14254
  ref <309>: DATABASE ENTRY DATE: 1997-02-18

SEQ ID NO: 9401 - protein, 280 aa, Rattus norvegicus; identical to SEQ ID NO: 9323
  ref <308>: DATABASE ACCESSION NUMBER: SWISS-Prot / CAA32468
  ref <309>: DATABASE ENTRY DATE: 2002-06-15

SEQ ID NO: 9402 - DNA, 1287 bp, Homo sapiens; identical to SEQ ID NO: 9398
  ref <308>: DATABASE ACCESSION NUMBER: EMBL / K01144
  ref <309>: DATABASE ENTRY DATE: 2000-03-04

SEQ ID NO: 9403 - protein, 296 aa, Homo sapiens; identical to SEQ ID NO: 9325
  ref <308>: DATABASE ACCESSION NUMBER: SWISS-Prot / P04233
  ref <309>: DATABASE ENTRY DATE: 2002-06-15

SEQ ID NO: 9404 - DNA, 1552 bp, Rattus norvegicus
  ref <308>: DATABASE ACCESSION NUMBER: EMBL / X14323
  ref <309>: DATABASE ENTRY DATE: 1995-03-31
tcagttctgtaattaattaactaacgtggatcaaatgagaaggtgaaagttcacacaggagcactcctgtcgtcttggactgggtctccatcccaccatccagtgccctggtctacgaagagtccacagggaccttgtgaagaatcaacaaggcggggtccagaggagtcacgtgtgccttccactccgggtcgccctgtcaggatggggatgtcccagcccggggtcctcctcagcctcttattggtcctcctgcctcagacctggggagcggagccccgtctcccactgatgtatcatcttgcagctgtgtctgacttatcaacggggcttccctctttctgggccacgggctggctgggtgctcagcaatatctgacctacaacaacctgcggcaggaggctgacccctgtggggcctggatatgggaaaaccaggtgtcttggtattgggagaaggagaccacggatctgaaaagcaaagaacagctcttcttggaggccatcaggaccctggagaaccaaataaatgggaccttcacactgcagggcctgctgggctgtgaactggcccctgataattcttcattgcccacggctgtgtttgccctcaatggtgaggagttcatgcggttcaacccaagaacgggcaactggagtggggagtggccggagacagatatcgttggtaatctgtggatgaagcaacctgaggcggccaggaaggagagcgagttcctgctaacttcttgtcctgagcggctgctaggccacctggagaggggccgtcagaacctggagtggaaggagccgccatctatgcgcctgaaggcccgtcctggcaactctggctcctcagtactgacctgtgctgctttctccttctacccgccggagctcaagtttcgattcctgcgcaatgggctagcctcaggctctgggaattgcagcactggtcccaatggtgatggatctttccatgcatggtcattgctagaggtcaaacgtggagatgaacaccattaccaatgtcaagtggagcatgaggggctggcccagcctctcactgtggacctagattcgcccgccagatcttctgtgcctgtggtcggaatcattcttggtttattgctggtggtagtggccatcgcagggggtgtgctgctatggaacaggatgcgaagtgggctgccagccccatggctttctctcagtggtgatgactctggcgacctattgcctggtgggaacttgcccccggaggctgaacctcaaggtgtaaatgcctttccggccacttcctgatgccaacccaggccccatacccattgcagcctgtggggctgtgtgacctcctgaactgtctctgagcctcccgagggagccctgggctggatgtcctcctcgtggatcccttcttttgtggcctgcttcagtttcccctcttaatgtcaatggctatttccatctccacataaatttgggcccaaatctgtgtgtgcatcgttattctcaggtttcaggcagccggaataaattgaacaagtttgag

SEQ ID NO: 9405 - protein, 366 aa, Rattus norvegicus
  ref <308>: DATABASE ACCESSION NUMBER: SWISS-Prot / CAA32503
  ref <309>: DATABASE ENTRY DATE: 2002-06-15
MGMSQPGVLLSLLLVLLPQTWGAEPRLPLMYHLAAVSDLSTGLPSFWATGWLGAQQYLTYNNLRQEADPCGAWIWENQVSWYWEKETTDLKSKEQLFLEAIRTLENQINGTFTLQGLLGCELAPDNSSLPTAVFALNGEEFMRFNPRTGNWSGEWPETDIVGNLWMKQPEAARKESEFLLTSCPERLLGHLERGRQNLEWKEPPSMRLKARPGNSGSSVLTCAAFSFYPPELKFRFLRNGLASGSGNCSTGPNGDGSFHAWSLLEVKRGDEHHYQCQVEHEGLAQPLTVDLDSPARSSVPVVGIILGLLLVVVAIAGGVLLWNRMRSGLPAPWLSLSGDDSGDLLPGGNLPPEAEPQGVNAFPATS

SEQ ID NO: 9406 - DNA, 1440 bp, Homo sapiens
  ref <308>: DATABASE ACCESSION NUMBER: Refseq / NM_004107
  ref <309>: DATABASE ENTRY DATE: 2000-11-01
cgggcgcagaagcccctcctcggcgtcctggtcccggccgtgcccgcggtgtcccgggaggaaggggcgggccgggggtcgggaggagtcacgtgccccctcccgccccaggtcgtcctctcagcatgggggtcccgcggcctcagccctgggcgctggggctcctgctctttctccttcctgggagcctgggcgcagaaagccacctctccctcctgtaccaccttaccgcggtgtcctcgcctgccccggggactcctgccttctgggtgtccggctggctgggcccgcagcagtacctgagctacaatagcctgcggggcgaggcggagccctgtggagcttgggtctgggaaaaccaggtgtcctggtattgggagaaagagaccacagatctgaggatcaaggagaagctctttctggaagctttcaaagctttggggggaaaaggtccctacactctgcagggcctgctgggctgtgaactgggccctgacaacacctcggtgcccaccgccaagttcgccctgaacggcgaggagttcatgaatttcgacctcaagcagggcacctggggtggggactggcccgaggccctggctatcagtcagcggtggcagcagcaggacaaggcggccaacaaggagctcaccttcctgctattctcctgcccgcaccgcctgcgggagcacctggagaggggccgcggaaacctggagtggaaggagcccccctccatgcgcctgaaggcccgacccagcagccctggcttttccgtgcttacctgcagcgccttctccttctaccctccggagctgcaacttcggttcctgcggaatgggctggccgctggcaccggccagggtgacttcggccccaacagtgacggatccttccacgcctcgtcgtcactaacagtcaaaagtggcgatgagcaccactactgctgcattgtgcagcacgcggggctggcgcagcccctcagggtggagctggaatctccagccaagtcctccgtgctcgtggtgggaatcgtcatcggtgtcttgctactcacggcagcggctgtaggaggagctctgttgtggagaaggatgaggagtgggctgccagccccttggatctcccttcgtggagacgacaccggggtcctcctgcccaccccaggggaggcccaggatgctgatttgaaggatgtaaatgtgattccagccaccgcctgaccatccgccattccgactgctaaaagcgaatgtagtcaggcccctttcatgctgtgagacctcctggaacactggcatctctgagcctccagaaggggttctgggcctagttgtcctccctctggagccccgtcctgtggtctgcctcagtttcccctcctaatacatatggctgttttccacctcgataatataacacgagtttgggcccgaaaaa

SEQ ID NO: 9407 - protein, 365 aa, Homo sapiens
  ref <308>: DATABASE ACCESSION NUMBER: SWISS-Prot / P55899
  ref <309>: DATABASE ENTRY DATE: 2002-06-15
MGVPRPQPWALGLLLFLLPGSLGAESHLSLLYHLTAVSSPAPGTPAFWVSGWLGPQQYLSYNSLRGEAEPCGAWVWENQVSWYWEKETTDLRIKEKLFLEAFKALGGKGPYTLQGLLGCELGPDNTSVPTAKFALNGEEFMNFDLKQGTWGGDWPEALAISQRWQQQDKAANKELTFLLFSCPHRLREHLERGRGNLEWKEPPSMRLKARPSSPGFSVLTCSAFSFYPPELQLRFLRNGLAAGTGQGDFGPNSDGSFHASSSLTVKSGDEHHYCCIVQHAGLAQPLRVELESPAKSSVLVVGIVIGVLLLTAAAVGGALLWRRMRSGLPAPWISLRGDDTGVLLPTPGEAQDADLKDVNVIPATA

SEQ ID NO: 9408 - DNA, 1552 bp, Rattus norvegicus; identical to SEQ ID NO: 9404
  ref <308>: DATABASE ACCESSION NUMBER: EMBL / X14323
  ref <309>: DATABASE ENTRY DATE: 1995-03-31

SEQ ID NO: 9409 - protein, 366 aa, Rattus norvegicus; identical to SEQ ID NO: 9405
  ref <308>: DATABASE ACCESSION NUMBER: SWISS-Prot / CAA32503
  ref <309>: DATABASE ENTRY DATE: 2002-06-15

SEQ ID NO: 9410 - DNA, 1440 bp, Homo sapiens; identical to SEQ ID NO: 9406
  ref <308>: DATABASE ACCESSION NUMBER: Refseq / NM_004107
  ref <309>: DATABASE ENTRY DATE: 2000-11-01

SEQ ID NO: 9411 - protein, 365 aa, Homo sapiens; identical to SEQ ID NO: 9407
  ref <308>: DATABASE ACCESSION NUMBER: SWISS-Prot / P55899
  ref <309>: DATABASE ENTRY DATE: 2002-06-15

SEQ ID NO: 9412 - DNA, 1552 bp, Rattus norvegicus; identical to SEQ ID NO: 9404
  ref <308>: DATABASE ACCESSION NUMBER: EMBL / X14323
  ref <309>: DATABASE ENTRY DATE: 1995-03-31

SEQ ID NO: 9413 - protein, 366 aa, Rattus norvegicus; identical to SEQ ID NO: 9405
  ref <308>: DATABASE ACCESSION NUMBER: SWISS-Prot / CAA32503
  ref <309>: DATABASE ENTRY DATE: 2002-06-15

SEQ ID NO: 9414 - DNA, 1440 bp, Homo sapiens; identical to SEQ ID NO: 9406
  ref <308>: DATABASE ACCESSION NUMBER: Refseq / NM_004107
  ref <309>: DATABASE ENTRY DATE: 2000-11-01

SEQ ID NO: 9415 - protein, 365 aa, Homo sapiens; identical to SEQ ID NO: 9407
  ref <308>: DATABASE ACCESSION NUMBER: SWISS-Prot / P55899
  ref <309>: DATABASE ENTRY DATE: 2002-06-15

SEQ ID NO: 9416 - DNA, 1552 bp, Rattus norvegicus; identical to SEQ ID NO: 9404
  ref <308>: DATABASE ACCESSION NUMBER: EMBL / X14323
  ref <309>: DATABASE ENTRY DATE: 1995-03-31

SEQ ID NO: 9417 - protein, 366 aa, Rattus norvegicus; identical to SEQ ID NO: 9405
  ref <308>: DATABASE ACCESSION NUMBER: SWISS-Prot / CAA32503
  ref <309>: DATABASE ENTRY DATE: 2002-06-15

SEQ ID NO: 9418 - DNA, 1440 bp, Homo sapiens; identical to SEQ ID NO: 9406
  ref <308>: DATABASE ACCESSION NUMBER: Refseq / NM_004107
  ref <309>: DATABASE ENTRY DATE: 2000-11-01

SEQ ID NO: 9419 - protein, 365 aa, Homo sapiens; identical to SEQ ID NO: 9407
  ref <308>: DATABASE ACCESSION NUMBER: SWISS-Prot / P55899
  ref <309>: DATABASE ENTRY DATE: 2002-06-15

SEQ ID NO: 9420 - DNA, 508 bp, Rattus norvegicus
  ref <308>: DATABASE ACCESSION NUMBER: EMBL / X14671
  ref <309>: DATABASE ENTRY DATE: 1993-09-12
tccttttgcggccatcgctggattgcagccgccaaaatgaagttcaatcccttcgtgacttctgaccgaagcaagaaccgcaaacggcatttcaatgcaccatctcacattcggaggaagatcatgtcttctccgctttccaaagaactgagacagaagtataatgttcggtctatgcccattcgaaaggacgacgaagttcaggttgttcgaggacactacaaaggccagcagattggcaaagtggtccaagtgtacaggaagaaatacgtcatctacattgagcgagtccagcgagagaaggctaacggcacaactgtccatgtgggcatccgccccagcaaggtggttatcaccaggctaaagctggacaaggaccgcaagaagatcctggagaggaaagccaagtcccggcaagtaggaaaggagaagggcaaatacaaggaagaaactatcgagaagatgcaggagtagaaaaataatgcccagttttcattaaataaagctt

SEQ ID NO: 9421 - protein, 145 aa, Rattus norvegicus
  ref <308>: DATABASE ACCESSION NUMBER: SWISS-Prot / CAA32801
  ref <309>: DATABASE ENTRY DATE: 1996-02-01
MKFNPFVTSDRSKNRKRHFNAPSHIRRKIMSSPLSKELRQKYNVRSMPIRKDDEVQVVRGHYKGQQIGKVVQVYRKKYVIYIERVQREKANGTTVHVGIRPSKVVITRLKLDKDRKKILERKAKSRQVGKEKGKYKEETIEKMQE

SEQ ID NO: 9422 - DNA, 16300 bp, Rattus norvegicus
  ref <308>: DATABASE ACCESSION NUMBER: EMBL / X14848
  ref <309>: DATABASE ENTRY DATE: 1999-03-01
gttaatgtagcttataataaagcaaagcactgaaaatgcttagatggattcaaaaatcccataaacacaaaggtttggtcctggccttataattaattggaggtaagattacacatgcaaacatccataaaccggtgtaaaatcccttaaagatttgcctaaaacttaaggagagggcatcaagcacataatatagctcaagacgccttgcctagccacacccccacgggactcagcagtgataaatattaagcaatgaacgaaagtttgactaagctagtacctctcagggttggtaaatttcgtgccagccaccgcggtcatacgattaacccaaactaattattttcggcgtaaaacgtgccaactataaatctcataatagaattaaaatccaacttatatgtgaaaattcattgttaggacctaagcccaataacgaaagtaattctaatcatttatataatgcacgatagctaagacccaaactgggattagataccccactatgcttagccctaaaccttaataattaaacctacaaaattatttgccagagaactactagctacagcttaaaactcaaaggacttggcggtactttatatccatctagaggagcctgttctataatcgataaaccccgttctaccttaccccttctcgctaattcagcctatataccgccatcttcagcaaaccctaaaaaggcactaaagtaagcacaagaacaaacataaaaacgttaggtcaaggtgtagccaatgaagcggaaagaaatgggctacattttcttttcccagagaacattacgaaacctttatgaaactaaaggacaaaggaggatttagtagtaaattaagaatagagagcttaattgaatagagcaatgaagtacgcacacaccgcccgtcaccctcctcaaattagattgacattcacatatacataatttcactaacaaatttatgagaggagataagtcgtaacaaggtaagcatactggaaagtgtgcttggaataatcacagtgtagcttaatcacaaagcatctggcctacacccagaagaattcataaaaaatgaacactttgaactaaccctagccctacaaccaaccaacataactaaacccccacataaactaaaacatttaactcaaaaagtattggagaaagaaatttacttaccaagagctatagagaaagtaccgcaagggaaatgatgaaagactaatttaaagtaaaaacaagacaaagattaaacctgtaccttttgcataatgaattaactagaaaatccttaacaaaaagaatttaagctaagaaccccgaaaccaaacgagctacctaaaaacaatttcatgaatcaacccgtctatgtagcaaaatagtgggaagatttttaggtagaggtgaaaagcctatcgagcttggtgatagctggttgcccaaaaaagaatttcagttcaaactttaagcttccatcagaacaacaaatcaaaatgtaaacttaaaatatagccaaaagagggacagctctttaggaaacggaaaaaaccttaaatagtgaataaacaactacaatcacttaaccattgtaggcttaaaagcaagccatcaataaagaaagcgtcaagccacatcatcttacacacacactaattccacaaacctcaaaaattccaaaattacaaattgggctaaatctatgatcctagtgaatactgttaatatgtgaacaagaaccaatccaccaagcacaagtgctaagacaaccggataaccattgttaattattgaatcataggcataacccaacaatagaattacctatccctaactcgttagcccaacacaggcgtgctttaaggaaagtttaaaaaagtaaaggaactcggcaaacacgaaccccgcctgtttaccaaaaacatctcctctagcataacaagtattagtggcatcgcctgcccagtgactaaagttccacggccgcggtatcccgaccgtgcaaaggtaggataatcacttgttccttaattagggactagaatgaatggctaaacgagggtccaaccgtctcttacttgcaatcagtgaaattgaccttccagtgaaggggcggactcataataaaagacgagaagaccctatggagctttaatttactaatttcaatttatataaaaaaacctaatgggcgaaaacaacaaaattatgaactaccaaatttcggttggggtgacctcggagaataaaaaatcctccgaatgattataaccgagtcggtaaccgtgtccgacccagtcaagtaatactaatatcttattgacccaattattgatcaacggaccaagttaccctagggtaacagcgcgacctatttaagagttcatatcgacaattagggtttacgacctcgatgttggatcaggacatcccaatggtgcagaagctattaatggttcgtttgttcaacgattaaagtcctacgtgatctaagtccggcaatccaggtcggtttctatctatttacaatttctcccagttacgaaaggacaagagaaatggagaccaaccaatcctaggcttccaaccaatttagaaaaacttaataaagtatatatgtacaataaataaccttagacccaagttattagggtggcagagccaagtaattgcgtaagacttaaaaccttgttcccagaggttcaaatcctctccctaatagtgtactttattaatatcctaacactcctaatcccaatcttaattgccataggccttctcaccctagtagaacggaaaatcctaggctacatacaattacgcaaaggccccaacaacgaaggcccatatggtaaactacaaccatttgcagatgccataaaactattcataaaagaacccatacgccctctaaccacctcaatatcactatttattatcgccccaaccctctcccttacactagctctaagcctatgaattcccttaccaataccccacccccttatcaacctcaacctaggcataccatttattctagccacatccagcctttcggtctactccattctatgatcgggatgagcctcaaattcaaaatactccctattcggagccctacgagccgttgcccaaaccatctcttacgaagtcacaatagccttatacctcttatccgtcctcctaataagcggctccttctccctacaaatacttatcactacacaagaacatatctgactattaatccccgcctgaccaatagccataatatgatacatttcaaccctcgcagaaacaaatcgagctcccttcgacttaacagaaggagaatcagaattagtctcaggctttaacgtcgaatacgccgcaggaccattcgccctattcttcatagccgagtacaccaacattattctaataaacgccctaacatcaattgtattcctaggccccttatatcatatcaattaccctgaattatactcaaccagcttcataacagaaacactacttctatccacaactttcctatggattcgagcatcctacccccgttttcgatatgaccaactaatgcacctcctatgaaaaaatttcctcccactaacactagcattctgcatatgatacatttccctgccaattttcctagcaggaattccaccctacacatagaaatatgtctgacaaaagagttactttgatagagtaaataatagaggtttaaatcctcttatttctaggacaataggaattgaacctacacctaagaattcaaaattctccgtgccaccaatacaccctatcctacatagtaaggtcagctaactaagctatcgggcccataccccgaaaatgttggttaaacccttcccgtactaataaatccaattaccctaaccattatttacttaaccacctttaaaggccgcctaatcacgacacttagcaccaacttaccaccaatatgagtaggattggaaataagccttttagctatcatcccacttctagccaacaaaaaaagcccacgatcaactgaagcagcaacaaaatattttctaacccaagctacagcctcaataattatcctactagtcatcatcctcaactacaaacaatcaggaatatgaacccttcaacaacaaaccaataacatactactcaacataatactcatttcactggccataaaacttggactagccccattccactactgactacccgaagtcacccaaggaattcccctacacattggattaatcttactaacatgacaaaaaattgctccactatcaattctataccaattttatcaactcctaaacccaactatcaccaccattctcgcaatttcatcagtctttgttggcgcctgaggaggacttaaccagacccaaacacgaaaaatcatagcatactcatcaattgcccacataggatgaataacagcaatccttccatacaaccctaacttaaccctcctaaacttaacaatttacatcctacttactgttccaatattcaattacatcataacaaactcagcaacaacaatcaacacactctcactcgcatgaaataaaactcccataatcctaaccatagcatccatcatcctcctatcactaggaggactcccccctctcacaggatttttaccaaaatgagcaattatctccgagcttctaaaaaacaactgctcaaccctatcaacactaatagctatcatagccctattaagcctattcttctatactcgactaatttactctatatccctcaccacattcccaaccaacaacaactccaaaataatctcccaccaccaaaacccaaaacataattttatcctcccaaccctcacagtattaagtaccctaaccctaccgctttcctcccaactaatcacatagaagtttaggatatacagttcaagagccttcaaagcccttagaaaacaaacaagtttaacttctgataaggactgtaagactatatcttacatctgttaaatgcaaatcaactgctttaattaagctaaatcctcaactagattggaaggaatcaaattcctacgaaaatttagttaacagctaaataccctacttactggcttcaatctacttctcccgcctatcagaaaagaggcgggagaagccttagtagaggagattctctacaccttcgaacttgcaattcgacatgataatcaccttaaggctttttggtaaaaagggggctcaacccctgtctttagatttacagtctaatgcttactcagccattttacctatgttcgtaaaccgttgactcttttcaactaaccacaaagatatcggaaccctctacctattatttggagcctgagcaggaatagtagggacagctttgagtattctaattcgagctgaactaggacagccaggcgcactcctaggagatgaccaaatctataatgtcatcgtcacagcccatgcattcgtaataattttctttatagtaatacctataataattggaggcttcggaaactgacttgtaccactaataattggagcccctgatatagcattcccacgaataaataacataagcttttgactgcttcctccatcatttctactccttttagcatcctccatagtagaagctggagctggaacaggatgaacagtatatccccccttagccggaaacctagcccatgctggggtatccgtagatttaactattttttccctccacctagccggggtgtcttctatcttaggagctatcaactttatcaccactatcattaatataaaaccccctgctataacccaatatcagacacctctctttgtatgatccgtactaattacagccgtcctactacttctctcactgccagtattagcagcaggtatcactatactccttacagaccgaaatctaaatactactttcttcgaccccgctggaggtggagacccaattctttatcaacacctattctgattcttcggccacccagaagtgtacatcttaattcttccagggtttggaattatttcacatgtagttacctattactctggaaaaaaagaacccttcggatatataggtatggtatgaaccataatatctattggcttcctaggatttattgtatgagcacatcacatattcacagtaggcctagatgtagacacccgagcctactttacatctgccactataattatcgcaattcctacaggcgtaaaagtattcagctgactcgctacactacatggaggaaatatcaaatgatcccccgccatattatgagccttagggtttatcttcttattcacagtagggggcctaacagggatcgtactatctaactcatcccttgacattgtacttcatgatacatactacgtagtagctcacttccactatgtcttatctataggagcagtattcgccatcatagctggcttcgtccactgattcccactattctcaggctataccctaaatgacacatgagcaaaagcccactttgccattatatttgtaggtgtaaacataacattttttcctcaacacttcctaggattagcagggatacctcgtcgttactctgattatccagatgcttataccacatgaaatacagtctcctctataggctcattcatctcacttacggccgtccttgtaatgatcttcatgatttgagaagccttcgcatcaaaacgagaagtgctctcaatttcctactcttcaactaacctagaatgactgcatggatgccccccaccttaccacacattcgaagaaccttcctatgtaaaagttaaataagaaaggaaggaatcgaccccctacaactggtttcaagccaatttcataaccattatgtctttctcaatgagatattagtaaaataattacataaccttgtcaaggttaagttatagacctaatcctatatatcttacatggcttacccatttcaacttggcttacaagacgctacatcacctatcatagaagaacttacaaactttcatgaccacaccctaataattgtattcctcatcagctccctagtactttatattatttcactaatactaacaacaaaactaacacacacaagcacaatagacgcccaagaagtagaaacaatttgaacaattctcccagctgtcattcttattctaattgcccttccctccctacgaattctatacataatagacgagattaataacccagttctaacagtaaaaactataggacaccaatgatactgaagctatgaatatactgactatgaagacctatgctttgactcctacataatcccaaccaatgacctaaaaccaggtgaacttcgtctattagaagttgataatcgggtagtcttaccaatagaacttccaattcgtatactaatctcatccgaagacgtcctgcactcatgagccatcccttcactagggttaaaaaccgacgcaatccccggccgcctaaaccaagctacagtcacatcaaaccgaccaggtctattctatggccaatgctctgaaatttgcggctcaaatcacagcttcatacccattgtactagaaatagtgcctctaaaatatttcgaaaactgatcagcttctataatttaaactcattgcgaagcttagagcgttaaccttttaagttaaagttagagacaacaaatctccacaatgacatgccacaactagacacatccacatgatttattacaatcatctcctcaatagccacactatttattttatttcaattaaaaatttcttcccaaacctttcctgcacctccctcacccaaaactatagccacagaaaaaacgaataacccttgagaatcaaaatgaacgaaaatctatttgcctctttcattacccccacaataataggtctaccaattgttgtgaccattattatgttcccatcaattctattcccatcatcagaacgcctaatcagcaaccgactacactcatttcaacactgactaatcaaacttatcatcaaacaaataatgttaattcacacaccaaaaggacgaacctgagccctaataattgtatccctaattatatttattggctcaaccaaccttctagggcttcttccccatacatttacccctaccactcagctatctatagacctaagcatagccatccccctatgagcaggagccgtaattctaggtttccgacacaaactaaaaaattctttagcccacttctcaccgcaaggaacccccatctcactaattcccatactaatcatcatcgaaactatcagcctatttattcaaccgatagcactagcagtacgactaacagcaaacattacagcaggccatctattaatgcatctaatcggaggagctaccctagtacttatagacatcagcccaccaaccgctacaattacatttattattctacttctacttacagtacttgaatttgccgtagccttaattcaagcctatgtattcacccttctagtcagcctgtacctacatgataacacataatgacccaccaaacccatgcataccatatagtaaacccaagcccatgaccactaacaggagccctatcagctcttctactcacatccggcttagtaatatgattccattacaactccacaattctcctatcattaggcctcctgacaaacatcctaactatatatcaatgatgacgagatatcatccgtgaaggaacataccaaggccaccacacccctattgtacaaaaaggcctccgatacggaataatcctgtttattgtctccgaagtattcttctttgccggatttttctgagcattttatcattccagcctagttcctacccacgacctaggcggttgctgacccccaacaggaatcacccctttaaatcccctagaagtaccccttctaaatacatcagtcctcttagcatcaggagtctcaattacatgagcccatcacagcctaatagaaggcaaccgaaaccatataaaccaagccctactaatcaccattctcttaggattatatttcactatcttacaagcctcagagtatttcgaaacatcattttctatctcagacggaatttacggctcaacattcttcatagcaacgggatttcatggcctccacgtaattattggctcaactttcctaattgtctgtctactacgacaactaaaattccacttcacatcaaaacatcatttcggatttgaagccgcagcatgatactgacacttcgtagatgtagtttgactattcctatacgtttctatctattgatgaggatcctactcccttagtataaacaatacaactgacttccaatcagttaattctgaaaaaactcagaagagagtaattaacctacccattatcatcacaattaacatcaccttatcctttatcctcatttcaattgcattctgattgcctcaaataaacttatactccgaaaaagcaaacccatatgaatgtggcttcgacccaacaagttctgcacgccttcctttttcaataaaatttttcttagtagccattacatttctactattcgacctagaaatcgccttactacttcccctcccatgagcgattcaaacaaccaataccactacaataatagcaactgcctttattttagtcactattttgtctcttggcctagcctacgaatgaacacaaaaaggactagaatgaacagaataattggtaattagtttaaataaaattaatgatttcgactcattagattatgataataatcataattaccaacaatgacatctgctttcctaaatttaactatagcctttacattatctctactaggtacttttatatttcgctcccacctaatatccactctcctctgcctagaaggaataatactatcactatttgtcataacttcaacatccacattaaactccaactccataatctccataaccatcccaattaccattctagtttttgcagcctgcgaagcagcagtaggtttagccttactagtaaaaatttcaaatacttacggaacagactacgtacaaaacctcaaccttctacaatgttaaaaattattttcccatctatcatactcctcccactaacatgactctcagccaacaaaaaaatctgaaccaatgtcacctcctacagctttctagtgagcctattaagcttatcactcctatgacaaaatgacgaaaattacctaaatttctcagttatattctcctccgatccattatccaccccactaatcattctaacaacttgactcctcccactaataatgctcgctagccaaaatcacataaaaaaagaaaatataatgcatcaaaaactttacatctcaatacttattagcctccaaattttactcatcataacattctccgcaacagaactaattttattttatatcctgttcgaggccactctaatcccaacactaattatcattacacgatgaggcaaccaaacagaacgcttaaatgcaggaatttatttcctgttttatacactaattggctccatcccactcttaattgccctcatttcaatccaaaactcaataggaacactcaacttcctaatcctttccctcacaacacaccccctaccctcaacatgatccaacaccattctatgactagcatgtataatagcatttataatcaaaataccattatacggagtccatctatgattaccaaaagcccacgtagaagctccaattgcaggctctataattttagcagcaattctcctaaagctagggggttatgggataatacgagtttccatcattctagaccccctaacaaaatctttagcctacccattcatcatcctctcattatgaggcataattataactagctcaatctgcctacgccaaacagatctaaaatcattaattgcttactcatcagtaagccatatagccctagtcatcacagccattataatccagacaccatgaagcttcatgggagccacaatactaataatcgcccacggcttaacctcatcactcttattctgcctagcaaacaccaactacgaacgaattcacagccgaactataattatagctcgaggattacaaataatctttccattgatagcaacatgatgactattagcaagcttagccaacctagcactaccacccctaattaacctcataggcgagttattcattgttatagcaacattttcctgatcgaacccctctatcatccttatagcaactaacattgtcatcacaggaatatactcaatatatatgattatcacaacccaacgaggaaaactaaccagccacataaacaacctccaaccttcccacacacgagaattaacactcatagctctacacattattcccctcatactattaacaatcaaccctaaactcatcacaggcctaacaatatgtagatatagtttacaaaaaacattagactgtgaatctaacaacaggaaatcaaattccttatttaccaagaaagtatgcaagaactgctaattcatgcacccatacctaaaacatatggctttcttacttttataggatagaagtaatccattggtcttaggaaccaaaaaccttggtgcaactccaaataaaagtaataaatataataacaatcctaatcctcataattcttgatttacttacaacaccaatcacattttcaataacaatcttaaccaaacttatgtacttccgtcatatgctcattacatcaattaaattctcattcctccttagcctcttacctttactactattcttccaccacaacacagaatacataattactaactgacattgactaactattaattctattaaacttactataagtttcaaaattgactatttctcaatcctattcctatcagtatccctattcgtaacatgatcaattatacaattctcttcatgatatatacactctgacccccacattaaccgattcattaagtacttaataatattcctgaataacatactaatcctaacctcagctaacaatctattccaactctttattggatgagaaggggtaggaattatatccttcttattaatcggatgatgatatggccttgcagacgccaacacagcggccctccaagcaatcctctacaaccgagtcggagacattggtttcatcctagctataacctgattctgcctaaacataaactcctgagaactccaacaaattttcttaaccaacaccaacaacaatctagtccctctcacaggactactaattgcagccacaggaaaatccgcccaattcggacttcatccatgactcccatcagctatagaaggcccaactcccgtctctgccctactacactcaagcacaatagttgtagcagggatcttcctaataatccgattccaccccctaacctcaaacaatagtactattataacagccatactatgtcttggtgcaatcaccacattattcacagcaatctgtgctctcacccaaaacgacatcaaaaaaatcgtagctttctcaacatccagccaactaggccttataatagtcacattagggattaaccaaccctaccttgctttcctccacatttgcacccatgcattcttcaaagccatattattcatatgctccggatcaatcatccatatcctcaacgatgaacaagacattcgaaaaataggcaatataataaaagcaataccattcacatcatcttgtctcattatcggaagcctagcccttaccggaatacctttcctcacaggattctattcaaaagatctcatcatcgaagccatcaacacgtgtaacaccaacgcctgagccctaataatcactttaatcgccacatccataactgctgtgtacagcatacggatcatctacttcgtcaccatgacaaaaccacgatactccccactaattactattaatgaaaacaacccaaacctcattaatccaatcaaacgcctagcattaggaagcatcctagcaggcttccttatctcactaaatattcctccaactaacattcaaattctcacaataccctgacatttaaaaataacagccctacttattacaatcctaggatttgccattgccctagaacttaacaatttaacactaaatctatcaataagcaaacccaccaaactatcatcattctcaacctccctaggctactacccaccaattataccccgaattattcctcaaaaaactctaaattctagctacaaattatccttaaacctactagacctaatctgatcagaaaagacaatcccaaaatcaacctcaatcacccaaacccaactatctaaaataatatccaaccaaaaaggactaatcaaactatatttcctatcatttctcatcactatttcactaatttttatcttacacacacttaatcccgagtgatttcaataataataaaaatccccgcaaacaatgaccacccagccaccactatcattcaagtagcacaactataaatagccgcaaccccaatccccccctccaacataaccccaacatcatcaatctcatacattaatcaatcgcctagactatcaaaatcaactaactccaccttattattcaaactaaacaagtagaacactaccaactccataaaaagccctaaaacaaaaaaactaaaaataaaccaattagaccctcaagtttccggatattcctcagtagccatagcagttgtatacccaaatacaaccaacatcccacccaaataaattaaaaatactattaaacctaaaaacgaacccccaaaccctaaaactattaagcacccaatacatccactaacaatcaatccaaacccaccataaataggtgaaggcttcaacgccaaccctagacaaccagtcaaaaacagtaaacttaaaataaacatataatttgtcattatttctacacagcatttaactgtgactaatgacatgaaaaatcatcgttgtaattcaactatagaaacatctaatgacaaacatccgaaaatctcaccccctattcaaaatcatcaaccactcctttatcgacctaccggccccatctaacatctcatcatgatgaaacttcggttctctactaggagtatgcctcatagtacaaatcctcacaggcttattcctagcaatacactacacgtctgataccataacagcattctcatcagtcacccacatctgccgagacgtaaactacggctgactaatccgatacctacaagccaacggcgcctcaatatttttcatctgcctattcctccatgtgggacgaggactatactatggatcctacactttcctagaaacctgaaacattgggatcatcctactatttgcagtcatagcaactgcattcatgggctatgtactcccatgaggacaaatatcattctgaggagctacagtaattacaaacctattatcagctatcccttacattgggactaccctagtcgaatgaatctgaggaggcttctcagtagacaaagcaaccctaacacgcttcttcgcattccacttcatcctcccattcattatcgccgcccttgcaattgtacatcttcttttcctccacgaaacaggatcaaataaccccacaggattaaactccgacgcagacaaaatcccattccatccatattatacaattaaagacctcctaggtgtatttatattactattattcctaataaccctagtactattcttcccagacctactaggagacccagacaattatacacccgctaaccccctcaacaccccaccccacatcaaaccagaatgatactttctctttgcctacgctattctacgctccattcccaacaaactaggaggggtcgtagccctaatcttatcaatcctaatcttagccttcctaccattcctgcatacctcaaaacaacgcagcttaacattccgcccaatcacccaaatcctttactgaatcctagtagccaacctcctagtcttaacatgaatcggaggccaaccagtagaacacccatttatcattattggtcaactagcctccatcagttatttttcaattatcctcattctcataccaatctctggaattgttgaagacaaaatgttaaaatgaaattaatgtcccgatagtataaaaattactctggtcttgtaaaccaaaaatgaagagtcagtcttctcaggacaatcaagaagaaggaactacctccccaccatcaacacccaaagctgatattctacttaaactacttcttgtcagtacataaaatgatatggacattaaaacatttatgtatatcgtacattaaattattttccccaagcatataagcatgtaatatatatctaatgatttaggacatacatttaaactcaactataaattcacaacaacatgtctattctcaaatacattaagataatgcttattagacatatctgtgttattagacatgcaccattaagtcataaacctttctcttccatatgactatccctgtccccaattggtctctatttctaccatcctccgtgaaatcaacaacccgcccactcgtccccctcttctcgctccgggcccattcgtcctgggggtgactatactgaaactttaccaggcatctggttcttacttcagggccatcaattggttcatcgtccatacgttccccttaaataagacatctcgatggtaacgggtctaatcagcccatgatcaacataactgtggtgatatacatttggtattttttaattttcggatgccttcctcaacatagccgtcaaggcatgaaggtcagcacaaagtcctgtggaaccttttagttaagggtcatttatcctcatagacaaagctcgaaagactattttattcatgtttgtaagacataaatatttataaatactgaaaaatctgtcaacaaacccccccaccccctacacctgaaacttcaatgccaaaccccaaaaacattaaagcaagaattaaataaaacaaaaagctacttaattcttaaaaggcttctccattctagtagaccacaaaattttaacttaaatcttagcattggtaaaatttcccgacacaaaatctttcctcctaactaaaccctctttacttgcctaccctcagaaaattccacatacaccaaa

SEQ ID NO: 9423 - DNA, 16300 bp, Rattus norvegicus; identical to SEQ ID NO: 9422
  ref <308>: DATABASE ACCESSION NUMBER: EMBL / X14848
  ref <309>: DATABASE ENTRY DATE: 1999-03-01

SEQ ID NO: 9424 - DNA, 16300 bp, Rattus norvegicus; identical to SEQ ID NO: 9422
  ref <308>: DATABASE ACCESSION NUMBER: EMBL / X14848
  ref <309>: DATABASE ENTRY DATE: 1999-03-01

SEQ ID NO: 9425 - DNA, 16300 bp, Rattus norvegicus; identical to SEQ ID NO: 9422
  ref <308>: DATABASE ACCESSION NUMBER: EMBL / X14848
  ref <309>: DATABASE ENTRY DATE: 1999-03-01

SEQ ID NO: 9426 - DNA, 2000 bp, Rattus norvegicus
  ref <308>: DATABASE ACCESSION NUMBER: EMBL / X15468
  ref <309>: DATABASE ENTRY DATE: 1995-04-03
gcagcaccccggctcggggtcgcgacggcggcggggcgccccctcccccgtgccggggcgcggcgaagggatgtggggctttgcgggaggaaggcttttcggcatcttctcggccccggtgctggtggcggtggtttgctgcgcccagagcgtaaacgaccccgggaacatgtcctttgtgaaggagacggtcgacaagctgttgaaaggctacgacattcgcctgagaccggacttcgggggtcccccagtctgcgtggggatgaacatcgacatcgccagcatcgacatggtttctgaagtcaacatggattataccttaactatgtatttccaacaatattggagagataaaaggctcgcctactctgggatccctctcaacctcacgcttgacaatcgagtggctgaccagctctgggtgcctgacacatatttcttaaatgacaaaaagtcatttgtgcacggagtgacagtgaaaaaccgcatgatccgcctccaccctgatggaacagtgctgtacgggctcaggatcaccaccacagcagcttgcatgatggacctcagaagatacccactggatgagcaaaactgcaccctggaaattgaaagctatggatacaccacggatgacattgaattttactggcgtggcggggacaaggctgttactggcgtggaaaggatcgagctcccacagttctccattgtggagcaccgtctggtctccaggaatgttgtcttcgccacaggtgcctaccctcgactctcattgagttttcggttgaagagaaacattgggtacttcatacttcagacgtatatgccctcaatcatgatcacaatcctctcatgggtgtccttctggatcaattatgatgcatctgctgctcgagttgccctagggattaccaccgtgctcaccatgacaaccatcaacactcaccttcgagagactctacccaaaatcccctacgtcaaagccatcgacatgtacctgatgggttgcttcgtctttgtattcctggcacttctggagtatgcctttgtcaactatattttctttggacgaggtccccaacggcagaagaagcttgcggagaagacagccaaggccaagaatgatcgatccaagagtgaaatcaaccgggtggatgctcacgggaatatcctactagcaccgatggatgttcacaatgaaatgaatgaggttgcaggcagcgttggtgacaccaggaattcagcaatatcctttgacaactcaggaatccagtataggaaacagagcatgcccaaggaagggcatgggcggtacatgggagacagaagcatcccgcacaagaagacgcacctacggaggaggtcttcgcagctcaaaatcaaaatccctgatctaaccgatgtgaatgccatagacagatggtcccggatcgtgtttccattcaccttttctctcttcaacttagtttactggctgtactatgttaactgagtgactgtacttgattttttcaaagacttcatttaacactgagtgaaatattaccctgcctgtcaagtttttataccagtatacacacacacacacacaaacaaacgcacacacaaacacacacatacacaaacacacacacacacacacatacacagacacacacaattgtatatatatgtgaactttctcagcatatatataaaatacacgtgtatatgagaatgtatgtgtatatgtttatgtacactggtgagagtgcctgtgtatgtaaaacaaatacgcatacataccatacattttgcaactatggacaatttaacacaggatgcatattaaagaaagtcatagctttttttttcttttttaattgaaagggacaagtatctaaatattatgcctcaagaatgagggcgagaaacacagtcatcccaaagtgtgtcttttattatcataagtttttgcttaagaatcaaaacggaattcttagttaatctttgggcactcc

SEQ ID NO: 9427 - protein, 473 aa, Rattus norvegicus
  ref <308>: DATABASE ACCESSION NUMBER: SWISS-Prot / CAA33495
  ref <309>: DATABASE ENTRY DATE: 2002-06-15
MWGFAGGRLFGIFSAPVLVAVVCCAQSVNDPGNMSFVKETVDKLLKGYDIRLRPDFGGPPVCVGMNIDIASIDMVSEVNMDYTLTMYFQQYWRDKRLAYSGIPLNLTLDNRVADQLWVPDTYFLNDKKSFVHGVTVKNRMIRLHPDGTVLYGLRITTTAACMMDLRRYPLDEQNCTLEIESYGYTTDDIEFYWRGGDKAVTGVERIELPQFSIVEHRLVSRNVVFATGAYPRLSLSFRLKRNIGYFILQTYMPSILITILSWVSFWINYDASAARVALGITTVLTMTTINTHLRETLPKIPYVKAIDMYLMGCFVFVFLALLEYAFVNYIFFGRGPQRQKKLAEKTAKAKNDRSKSEINRVDAHGNILLAPMDVHNEMNEVAGSVGDTRNSAISFDNSGIQYRKQSMPKEGHGRYMGDRSIPHKKTHLRRRSSQLKIKIPDLTDVNAIDRWSRIVFPFTFSLFNLVYWLYYVN

SEQ ID NO: 9428 - DNA, 1720 bp, Homo sapiens
  ref <308>: DATABASE ACCESSION NUMBER: Refseq / NM_000814
  ref <309>: DATABASE ENTRY DATE: 2001-02-03
ctcctcccctccccctccgccctcctccgctccgggccagcgcggcggcggcggcggcggcagcagcaggagcagccccggctgcgggtcgcgacggcggcggggcgccccctcccccgtgccggggcgcggcggagggatgtggggccttgcgggaggaaggcttttcggcatcttctcggccccggtgctggtggctgtggtgtgctgcgcccagagtgtgaacgatcccgggaacatgtcctttgtgaaggagacggtggacaagctgttgaaaggctacgacattcgcctaagacccgacttcgggggtcccccggtctgcgtggggatgaacatcgacatcgccagcatcgacatggtttccgaagtcaacatggattataccttaaccatgtattttcaacaatattggagagataaaaggctcgcctattctgggatccctctcaacctcacgcttgacaatcgagtggctgaccagctatgggtgcccgacacatatttcttaaatgacaaaaagtcatttgtgcatggagtgacagtgaaaaaccgcatgatccgtcttcaccctgatgggacagtgctgtatgggctcagaatcaccacgacagcagcatgcatgatggacctcaggagataccccctggacgagcagaactgcactctggaaattgaaagctatggctacaccacggatgacattgagttttactggcgaggcggggacaaggctgttaccggagtggaaaggattgagctcccgcagttctccatcgtggagcaccgtctggtctcgaggaatgttgtcttcgccacaggtgcctatcctcgactgtcactgagctttcggttgaagaggaacattggatacttcattcttcagacttatatgccctctatactgataacgattctgtcgtgggtgtccttctggatcaattatgatgcatctgctgctagagttgccctcgggatcacaactgtgctgacaatgacaaccatcaacacccaccttcgggagaccttgcccaaaatcccctatgtcaaagccattgacatgtaccttatgggctgcttcgtctttgtgttcctggcccttctggagtatgcctttgtcaactacattttctttggaagaggccctcaaaggcagaagaagcttgcagaaaagacagccaaggcaaagaatgaccgttcaaagagcgaaagcaaccgggtggatgctcatggaaatattctgttgacatcgctggaagttcacaatgaaatgaatgaggtctcaggcggcattggcgataccaggaattcagcaatatcctttgacaactcaggaatccagtacaggaaacagagcatgcctcgagaagggcatgggcgattcctgggggacagaagcctcccgcacaagaagacccatctacggaggaggtcttcacagctcaaaattaaaatacctgatctaaccgatgtgaatgccatagacagatggtccaggatcgtgtttccattcactttttctcttttcaacttagtttactggctgtactatgttaactgagtgactgtacttgatttttcaaagacttcatttaacactgagtgaaatattactctgcctgtcaagtttttatacctgtacacacacagacacacaagcagacacacacatatatacatacgcaattgtatatatatgtgaacttctcagcatatatat

SEQ ID NO: 9429 - protein, 473 aa, Homo sapiens [sequence omitted]

SEQ ID NO: 9430 - DNA, 435 bp, Rattus norvegicus
  ref <308>: DATABASE ACCESSION NUMBER: EMBL / X15512
  ref <309>: DATABASE ENTRY DATE: 1995-03-31
ggatcatagtggtgggaggtggtgggtactagtgatgccccctatccgcgcgcgtctgcctccagggtgcccctccagccaggatgaggctcttcatcgcacttcctgtcctgatcgtggtcgtagccatggctttggaaggcccagcccctgcccaggcggcccctgacttttccagcgcaatggagagcttaccggataaactaaaagagtttgggaacactttggaagataaggcccgggcagccattgagcatatcaaacagaaggaaattatgatcaagactcggaactggttttcagagacgctcaacaaaatgaaggagaaattaaaaaccacatttgcctgagtgcctggcgagccacctcgcagcagcaaagagggccacgtgacgggccaggtccctcttcaaataccaataaaaacttgtagag

SEQ ID NO: 9431 - protein, 88 aa, Rattus norvegicus
  ref <308>: DATABASE ACCESSION NUMBER: SWISS-Prot / P19939
  ref <309>: DATABASE ENTRY DATE: 2002-06-15
MRLFIALPVLIVVVAMALEGPAPAQAAPDFSSAMESLPDKLKEFGNTLEDKARAAIEHIKQKEIMIKTRNWFSETLNKMKEKLKTTFA

SEQ ID NO: 9432 - DNA, 417 bp, Homo sapiens
  ref <308>: DATABASE ACCESSION NUMBER: Refseq / NM_001645
  ref <309>: DATABASE ENTRY DATE: 2000-10-31
acctcccaaccaagccctccagcaaggattcaggagtgcccctcgggcctcgccatgaggctcttcctgtcgctcccggtcctggtggtggttctgtcgatcgtcttggaaggcccagccccagcccaggggaccccagacgtctccagtgccttggataagctgaaggagtttggaaacacactggaggacaaggctcgggaactcatcagccgcatcaaacagagtgaactttctgccaagatgcgggagtggttttcagagacatttcagaaagtgaaggagaaactcaagattgactcatgaggacctgaagggtgacatccaggaggggcctctgaaatttcccacaccccagcgcctgtgctgaggactcccgccatgtggccccaggtgccaccaataaaaatcctaccg

SEQ ID NO: 9433 - protein, 83 aa, Homo sapiens
  ref <308>: DATABASE ACCESSION NUMBER: SWISS-Prot / P02654
  ref <309>: DATABASE ENTRY DATE: 2002-06-15
MRLFLSLPVLVVVLSIVLEGPAPAQGTPDVSSALDKLKEFGNTLEDKARELISRIKQSELSAKMREWFSETFQKVKEKLKIDS

SEQ ID NO: 9434 - DNA, 3720 bp, Rattus norvegicus
  ref <308>: DATABASE ACCESSION NUMBER: EMBL / X15705
  ref <309>: DATABASE ENTRY DATE: 1993-09-12
ccaagttgttcactcttctcatctacctacctctaccaagtctgtgctgccaacctaacttctccgcagggaaaaagtctcattcaaccgaactccgcggccaaatgactagttcctaaacaggatgccgtatgcggggaccggagtcagagggtgacacatgccgcgaagtagtcaaaactgcctattagggcgcttgaaagaagctaaaccaggaaagcggagagagaagcttggaccgaggccgggcagcgggtccgagcaagggaggtggctcgggggccgtgcttctcgcactcgggggaaagccacccgcctcccgggtaagcaccgcgcacgcagccttcccccgccgcgcactcctccgagacgcgcgaggggaaaaactcgcacccgcccaacttcacagtccccgccctggaaccacccgcacccagctccggtccccgctgcaggaacagcagaggcggaaagacgagagccgatcccagccgttcttttttcgatgcaaccgtctcagaaagaatttcgaccccgggagccttcgggaggccagcgccctttccgtgctgcctctgcgcgccccgccccgcgccggccccagcgccacactcttcgggttccgcgctgttcattgggcatctgccccgccaatctaaaagatgtcaacgaatcacgctttataaaaggcaaagagagaggggaaagggggcttttcacgctggctcccttggcgcgagcttaacgcccccaagcggctggaggcactgggcggggctcatttgcataacggccgccccttggtctccctgctgggggctggagtcccgctctcacccacctagatatctgttggaccaccggctggtcactccgaccaggcaagcctgtgggatcgctggacgggttggacgggcgggcccggggaccgattggctctgagagtttccagaaggcagggggtggggtgggaggacgactataagacggagaagccagcagggggatccgggagacgctagtcgcgctcgtggagagcagtgcgaagcgaccgttggctcgggtcccggcttgcctctcctgactctttcgtcctaacgttgctttgcctgtttttcagtcaggatgtccgcccgcggcccggctatcggcatcgacctgggcaccacttactcgtgcgtgggggtcttccaacatggcaaggtggagatcatcgccaacgaccagggtaaccggaccacccccagctacgtggccttcaccgacaccgagcgccttatcggcgacgccgccaagaaccaagtggccatgaaccccacaaacaccatcttcgacgccaagcggctgatcggacggaagttcgaagacgccacggtgcagtcggatatgaagcactggccgttcagagtggtgagcgaaggtgggaagcccaaagtgcaggtggaatataaaggggagatgaagaccttcttccctgaggagatttcttccatggtcctcactaagatgaaggagatcgccgaagcctacctggggggcaaggtgcagagcgcagtcatcactgttcctgcctatttcaacgactcgcagcgccaggccaccaaggatgcgggcaccatcaccggtctcaatgtattgcgtatcatcaacgaacccacagcagcggccatcgcttatggcctggataagaagggctgcgcgggcggcgagaagaacgtgctcatctttgacctgggcgggggcaccttcgatgtgtccatcctcaccatcgaggatggcatcttcgaggtcaagtccacggccggcgacacccacctgggtggcgaagacttcgacaaccgtatggtcagccacctggcggaggagttcaagcgcaaacacaagaaggacattgggcccaacaagcgcgctgtgcgccggctgcgcaccgcctgcgagcgcgctaagcgcaccctgagctcgtccacgcaggccagcatcgagatcgactcgctgtacgagggcgtggatttctacacgtccatcacccgcgcccgcttcgaggagctcaacgccgatctctttcgagggactctggagccggtggaaaaggcgctgcgcgatgccaagctagacaagggccagatccaggagatagtgctggtgggcggctctacccgcatccctaagatccagaagctcctgcaggatttcttcaacggcaaggagctgaacaagagcatcaatcccgacgaggcggtggcctacggcgccgctgtgcaggcggctatcctcattggcgacaagtctgagaacgtgcaggatctgctgttactcgacgtgactcccttgtcgcttggcattgaaacagctggcggtgtcatgaccccactcataaagagaaacaccaccatccctaccaagcagacgcagaccttcactacctactcagacaaccagagcagcgtgctggtgcaagtgtacgagggcgaacgggccatgaccaaggacaataacctcttgggcaagttcgacctaactgggatccctccagcaccccgcggcgtcccccagatcgaggtcacctttgacatcgatgccaacggcattcttaacgtcactgctgcagacaagagcaccggcaaagaaaataaaatcaccatcaccaacgacaagggtcgtctgagcaaagacgacattgaccggatggtgcaggaggcagacgggtacaaatcggaagatgaagctaatcgcgatcgcgtggcagccaaaaacgcggttgagtcctatacctacaacatcaagcagacggtggaagacgagaaactgaggggcaagattagcgagcaggacaaaaacaagattctcgacaagtgtcaggaggtgatcaactggcttgaccgaaaccagatggcagagaaagatgagtacgaacacaagcagaaagagcttgagagagtgtgcaaccccatcatcagcaaactttaccaaggcggtccaggcggcggcggctcctctggaggacccaccattgaggaagtggactaggcttgcgctggagtccgcgtaaacctcttttcctttctttcttttcttttctttttctttttctcccttttgttttggtttctttgaaatgtccttgtgccaagtaagatctgttgttggaagtctttagcctggtgcatacatatgaaaggaaaggtgcaacaacttagtttagttataaaaagttagttctaaagtttgatttgggggaaaaatgaggtttctctttaatgcatttagagcgattgctgatttgagcttttgttgttgttgttaagcttaagtatgtacgtggagatttgcttgaaatgagaaacctgatgtttgcacacctgtcctatggaagcttggttacactaagatacagagaagcttgaattatttttatgtactatgagatgaaagtaaacactgcggtaataaagacaggtatattctgtaaacacataaatgcacattcaaagtaaagctgaaattgatctcaaaattgctgtctgctgttttcagtctcttatgtttgactcacgtcgctctttaagaaaatgtgctgtgaagtttgtctaatccacttttctctaattctcagacgaagcgcctgcctcaaatcaccaatttaaggggtgaagaatcttggttaacctttagcatacagaacctgatggggtctttcagtgaatctaaactcctaagtcc

SEQ ID NO: 9435 - protein, 633 aa, Rattus norvegicus
  ref <308>: DATABASE ACCESSION NUMBER: SWISS-Prot / CAA33735
  ref <309>: DATABASE ENTRY DATE: 1996-10-01
MSARGPAIGIDLGTTYSCVGVFQHGKVEIIANDQGNRTTPSYVAFTDTERLIGDAAKNQVAMNPTNTIFDAKRLIGRKFEDATVQSDMKHWPFRVVSEGGKPKVQVEYKGEMKTFFPEEISSMVLTKMKEIAEAYLGGKVQSAVITVPAYFNDSQRQATKDAGTITGLNVLRIINEPTAAAIAYGLDKKGCAGGEKNVLIFDLGGGTFDVSILTIEDGIFEVKSTAGDTHLGGEDFDNRMVSHLAEEFKRKHKKDIGPNKRAVRRLRTACERAKRTLSSSTQASIEIDSLYEGVDFYTSITRARFEELNADLFRGTLEPVEKALRDAKLDKGQIQEIVLVGGSTRIPKIQKLLQDFFNGKELNKSINPDEAVAYGAAVQAAILIGDKSENVQDLLLLDVTPLSLGIETAGGVMTPLIKRNTTIPTKQTQTFTTYSDNQSSVLVQVYEGERAMTKDNNLLGKFDLTGIPPAPRGVPQIEVTFDIDANGILNVTAADKSTGKENKITITNDKGRLSKDDIDRMVQEADGYKSEDEANRDRVAAKNAVESYTYNIKQTVEDEKLRGKISEQDKNKILDKCQEVINWLDRNQMAEKDEYEHKQKELERVCNPIISKLYQGGPGGGGSSGGPTIEEVD

SEQ ID NO: 9436 - DNA, 4858 bp, Homo sapiens
  ref <308>: DATABASE ACCESSION NUMBER: EMBL / U56725
  ref <309>: DATABASE ENTRY DATE: 1999-02-02
ggaattcttttttttttttttttttttgaaacagggtctcgctctgtcacccaggctaaagtgtagtgccgcgatctcagctcattacaacctctgcctcccaggttcaagggatcctcccacctcagcctcccaagcagttgggaccacaggcatgtgccaccatatccggctaatttttgcttttttcatagagacagggtttcaccatgttgcacaagtcggtcttgaactcctgagctcaagtgagctacctgctttggcctcccaaagtgctgggattacacatgtgaaccaccgtacccggccccaaaaatgctttcttaagcgtaactacgtaatgctagttgtagtttagattcctggatgttaacttaaaatagtcccataggaacccagtgtggtggctcacgcctgtaatcccagcctgaggcaggtggatcatctgaggtcaggagttcgagaccagctgggccaacatggtgaaaccctgtctctactaaaaacacaaaaaaattagctgggcatagtggcaggcacccgtaatttcagcttctcgggacgctgaggcagaagaattgcttgaacccaggaggcagtggttgcagtgagcccagatcgtgccattgcactccagcctgggcaacaagagcaaaactctgtctcaaaaaaatcaattaatttaggctgggcgcagtggctcatgcctgtaaatcccagcactttgagaggctgaagcgggtggatcatgaggtcaagagatcgagaccatcctggctaacacggtgaaaccccatttctactaaaaatacaaaaaaaaaaccccaaaaaacaaaaaaacaaaaacaaacaaacaaaccaaaaaaacacaacaactagccaggcgtagtggcaggcgcttgtaatcccagctagtcgggaggctgaggcaggaggagaatggagtgaacccaggaggcagagcttgcagtgagctgagatcgcgccacagcactccagcctgggcaacagagcgagactccatctcaggaaaaaaaaaattaattaattaaaaaaacagtaagataaataacacttctcccatttcagtaaaaggatgaagccagtttctcaatgaataaaaacaagagactgttgaatgtcaagttttatagacagtccagacaacacagggagacaccatctctacacacacacacacacacacacacacacacacacacacacacacacacacacacacaaaatagctgcgtatggtggcatgggcctgtagtcccagctattggggcagggccagggggtgggaggctgaggggagaggatgccttaacagggaggttgaggctgcagagagccatgatcacgtcactgtactccagcctgggtgatacagcaagactctgtctcagaaaaaaaaaaaagaaaaaagtcaagaatgcattcttgaggaattccaccaacaaaatgcaccaaatatagccaaagagttttctgctatatgccaagtggaaagctatgaagaaagagaagaacagaagcaggaggacattggttttcatctcctattctttcaagaagtaagatccattatcttttaaaaagtctaaacactggtaaggcaagacacaactcccacccataacactgcatctctgtcctcaggcaacaaatcaaatgtcagataaaagcacaatatctaccactcaacccccaggcttcagcacagaactcacaaacattctgctggctaaggcaaaaaggtgtactgtatttccagagagcttgcagagttctgagcactaatcccataatcctcatatctcaatctacacaaagcaccatcaggctaagaaacagattatatagcaggcacaacactcttgggtatgcaaacatgttaaggatcaaagtaagaaaagagtaactataggggccatactatatttgccaaaaagtgacttgtttaaaaattaaaaagaagccgggtgcagtggctcacacctgtaatcccagcactttgagaggctggggtgggtggatcacctgaggtcagtagttcaaaaccagcctggccaacatagtgaaaccccatctctactaaaaatacaaaattaggcgtggtggcaggcgcctgtaatcccagctactagggatgctgaggcaggagaatcgcttgaacccggaaggcagaggttgcagtgagccaaaatcgcaccactgcactccagcctgggcaacaagagcaaaactctgtctcaaaaaaaaaaaaataaaaataaaaacaaaaaagaaatccagtttacctccttgtgcaattcctaataaattgctgagaagtgatcttacataggaatcttgtataatttattctgatgcgttcgaggtggccgttagttgactccgcggagttcatctccctggttttcccgtcctaacgtcgctcgcctttcagtcaggatgtctgcccgtggcccggctatcggcatcgacctgggcaccacctattcgtgcgtcggggtcttccaacatggcaaggtggagatcatcgccaacgaccagggcaatcgcaccacccccagctacgtggccttcacggacaccgagcgcctcatcggcgacgccgccaagaaccaggtggccatgaaccccaccaacaccatcttcgacgccaagaggctgattggacggaaattcgaggatgccacagtgcagtcggatatgaaacactggccgttccgggtggtgagcgagggaggcaagcccaaagtgcaagtagagtacaagggggagaccaagaccttcttcccagaggagatatcctccatggtcctcacgaagatgaaggagatcgcggaagcctacctggggggcaaggtgcacagcgcggtcataacggtcccggcctatttcaacgactcgcagcgccaggccaccaaggacgcaggcaccatcacggggctcaatgtgctgcgcatcatcaacgagcccacggcggcggccatcgcctacggcctggacaagaagggctgcgcgggcggcgagaagaacgtgctcatctttgacctgggcggtggcactttcgacgtgtccatcctgaccatcgaggatggcatcttcgaggtgaagtccacggccggcgacacccacctgggcggtgaggacttcgacaaccgcatggtgagccacctggcggaggagttcaagcgcaagcacaagaaggacattgggcccaacaagcgcgccgtgaggcggtcgcgcaccgcttgcgagcgcgccaagcgcaccctgagctcgtccacgcaggcgagcatcgagatcgactcgctctacgagggcgtggacttctatacgtccatcacgcgcgcccgcttcgaggagctcaatgccgacctctttcgcgggaccctggagccggtggagaaggcgctgcgcgacgccaagctggacaagggccagatccaggagatcgtgctggtgggcggctccactcgtatccccaagatccagaagctgctgcaggatttcttcaacggcaaggagctgaacaagagcatcaaccccgacgaggcggtggcctatggcgccgcggtgcaggcggccatcctcatcggcgacaaatcagagaatgtgcaggacctgctgctactcgacgtgaccccgttgtcgctgggcatcgagacagctggcggtgtcatgaccccactcatcaagaggaacaccacgatccccaccaagcagacgcagaccttcaccacctactcggacaaccagagcagcgtactggtgcaggtatacgagggcgaacgggccatgaccaaggacaataacctgctgggcaagttcgacctgaccgggattccccctgcgcctcgcggggtcccccaaatcgaggttaccttcgacattgacgccaatggcatccttaacgttaccgccgccgacaagagcaccggtaaggaaaacaaaatcaccatcaccaatgacaaaggtcgtctgagcaaggacgacattgaccggatggtgcaggaggcggagcggtacaaatcggaagatgaggcgaatcgcgaccgagtcgcggccaaaaacgccctggagtcctatacctacaacatcaagcagacggtggaagacgagaaactgaggggcaagattagcgagcaggacaaaaacaagatcctcgacaagtgtcaggaggtgatcaactggctcgaccgaaaccagatggcagagaaagatgagtatgaacacaagcagaaagagctcgaaagagtttgcaaccccatcatcagcaaactttaccaaggtggtcctggcggcggcagcggcggcggcggttcaggagcctccgggggacccaccatcgaagaagtggactaagcttgcactcaagtcagcgtaaacctctttgcctttctctctctctctttttttttgtttgtttctttgaaatgtccttgtgccaagtacgagatctattgttggaagtctttggtatatgcaaatgaaaggagaggtgcaacaacttagtttaattataaaagttccaaagtttgttttttaaaaacattattcgaggtttctctttaatgcattttgcgtgtttgctgacttgagcatttttgattagttcgtgcatggagatttgtttgagatgagaaaccttaagtttgcacacctgttctgtagaagcttggaaacagtaaaatatataggagcttaaattgtttatttttatgtactactttaaaactaaactgaacattgcagtaatgttaaggacaggtatactttttgcaaacaaatgcataaaatgcaaatgtaaagtaaagctgaaattgatctcaaaaaaaaaaaa

SEQ ID NO: 9437 - protein, 639 aa, Homo sapiens
  ref <308>: DATABASE ACCESSION NUMBER: SWISS-Prot / P54652
  ref <309>: DATABASE ENTRY DATE: 2002-06-15
MSARGPAIGIDLGTTYSCVGVFQHGKVEIIANDQGNRTTPSYVAFTDTERLIGDAAKNQVAMNPTNTIFDAKRLIGRKFEDATVQSDMKHWPFRVVSEGGKPKVQVEYKGETKTFFPEEISSMVLTKMKEIAEAYLGGKVHSAVITVPAYFNDSQRQATKDAGTITGLNVLRIINEPTAAAIAYGLDKKGCAGGEKNVLIFDLGGGTFDVSILTIEDGIFEVKSTAGDTHLGGEDFDNRMVSHLAEEFKRKHKKDIGPNKRAVRRLRTACERAKRTLSSSTQASIEIDSLYEGVDFYTSITRARFEELNADLFRGTLEPVEKALRDAKLDKGQIQEIVLVGGSTRIPKIQKLLQDFFNGKELNKSINPDEAVAYGAAVQAAILIGDKSENVQDLLLLDVTPLSLGIETAGGVMTPLIKRNTTIPTKQTQTFTTYSDNQSSVLVQVYEGERAMTKDNNLLGKFDLTGIPPAPRGVPQIEVTFDIDANGILNVTAADKSTGKENKITITNDKGRLSKDDIDRMVQEAERYKSEDEANRDRVAAKNALESYTYNIKQTVEDEKLRGKISEQDKNKILDKCQEVINWLDRNQMAEKDEYEHKQKELERVCNPIISKLYQGGPGGGSGGGGSGASGGPTIEEVD

SEQ ID NO: 9438 - DNA, 3507 bp, Rattus norvegicus
  ref <308>: DATABASE ACCESSION NUMBER: EMBL / X16002
  ref <309>: DATABASE ENTRY DATE: 1993-09-12
ctaagactaaagacttatttgcattttatttaaattagatggacttggctttggacaatttccatacaagaaaaaaaaatatttcattttctaggcacaacttctgactgtcagattcttgctgcctttgagtcttgtagcgtcatcatcagaccgcatcccagacagacttccagatttgaacacctaccccccaaaacgtaggtgtttgggagaccacatcacttcatgacttatgtttgaggagcactaggctgttgtctagactaagcaagctctggaaagcaatgctgagtctctgagaagagggagcatggggtgtgctgatttaaaaacagaaaatgcaaagttggactgaaaatatcccaagtcttctaagcaatctgcttaaggcttccaaacttaccttaatttggtaagaaaataagctgccctatttttctttcttcttctcttacaactggaaccagccatttccccaaactaccaccatggaggtggcaatggtgagtgccgagagctcagggtgcaacagccacatgccttatggttatgctgcccaggccagggctcgagagagggagagacttgctcactccagggcagctgcagctgctgctgttgcagctgccacggctgcggtggaaggcactggaggttctggtggaggcccccaccatcatcatcagacacgtggggcctactcctcccatgatcctcaaggaagccgaggtagtcgggaggaggaggccacacgaactgagaagaagaagaaactccaccacaggcagagcagttttcctcattgctcagacctgatgcccagtggctctgaagagaagatccttagggagctgagcgaggaggaggaagacgaggaggaggaagaggaggaggaagaggagggaaggttttactatagtgaagaggaccatggggatgggtgttcctacactgacctactgccacaggacgatgggggtggcggcggctacagttcagtccgctacagtgactgttgtgaacgcgtggtaataaatgtgtctggtctacgcttcgaaacccaaatgaaaactttggctcagtttccagaaactctgttgggagaccctgagaagaggactcagtacttcgaccctttgcgcaatgagtatttttttgataggaaccgtcccagctttgatgccattttgtattattaccagtcaggaggccgcctgaagaggccagtcaatgtcccctttgatatcttcactgaggaggtgaagttctatcagttgggagaggaagccctgctcaagttccgtgaggatgagggctttgtgagagaagaggaggacagggctctgccagaaaatgaatttaaaaaacagatttggcttctctttgaatatcccgagagttccagccctgccaggggcatagccatcgtatctgtcctggtcatcttaatctctattgtcatattttgcctggaaaccttgcctgagttcagggatgatagggacctcatcatggccctcagcgcaggtggacacagcagattattgaatgacacctcggcaccccacctggagaactcagggcacacaatattcaatgaccctttcttcattgtggagacagtatgtatcgtgtggttttcctttgagtttgtggttcgatgctttgcttgtcccagtcaagcactcttcttcaaaaacatcatgaacatcattgatatcgtctccattttgccttacttcatcactctgggcaccgatctggcccagcagcaggggggtggcaacggccagcagcagcaggctatgtcctttgccatcctcaggatcatccgtctggtccgagtgttccggatcttcaagctctccagacactccaagggcctgcagatcctgggccacaccctaagagccagcatgcgtgaactgggccttcttatctttttcctcttcatcggggtcatcctcttttccagcgctgtgtattttgcagaggcagatgaacctaccacccatttccaaagcattccagatgcgttttggtgggctgtggtaaccatgacaactgtgggctacggggacatgaagcccatcacagtgggaggaaagattgtggggtccctgtgtgccattgcgggtgtcttaaccattgctttgcccgtgccggtgattgtgtctaactttaactatttctaccacagagagactgaaaacgaagaacagacccagctgacccaaaacgcagtcagttgcccatacctaccttctaatttgctcaagaaatttcggagctctacttcttcttccctgggggacaagtcagagtatctagagatggaagaaggggtcaaggagtctttatgtggaaaggaagagaagtgtcagggaaagggggatgacagcgagacagataaaaacaactgttctaatgcaaaggctgtggagactgatgtgtgaatctctttcccccacctgcccgtgccgcccgcccagctccgatatattcatacataaagaatgcagttatgaaaatgagatatactgcatacagtaatacactgcttaatggcgatacatggcataattgtggcgaaacgtgtattgcatatcaaataagtgatgcatcttggagaagagggaggcattaaaaacagcagatctatctttatattttttaatagaatgcaagaattttgcacataatgggaaaatgttatagtaaaggtggtcccgaggagagtgagtgtgtgtgagagagtgagagagtgtgtggccatgggagtgtaagtaaattgtcaacattgttgggaattgtgccgtgatgggaaaagttggcattctgaagtatttactatgtaagaactaatgaacttgagcagtcttttaccagtgttttaataacatctcctatgtctttggattctgtagttgttttctagaaattgtaagaattactgtgtagaaaaaagagaaagtaaattatttaatagatataggtcacaatttaatcttggatttaattaaagtttatttttaactggaaattaacttttgaaaaggctctacccctttttacaaattgttatattttcttattaattttgggagatatactagcaaatgcctaatgttctggaggaaatgtaacaagttttgttcacaggtcttaagactggaattttttctttgcactacttctatgctgaagcccgagagagacttatactgtgatgtttactaacgcaccaatcagttcaatgacaatcattggaagaatggtttcttcgtctcatttattgttcttttcattttgtgagactaatgagcacacagataacagcacacgattcctgctttaaaatctgacaaccgatctacaagggactacgaggtaacgttcagcagccgaatctttcaaaattggtttgttacaatgatgcttcagaaccatactattttcatactcttctgccttttaagtccagataatttaaccaaagttatt

SEQ ID NO: 9439 - protein, 655 aa, Rattus norvegicus; identical to SEQ ID NO: 3649
  ref <308>: DATABASE ACCESSION NUMBER: SWISS-Prot / CAA34133
  ref <309>: DATABASE ENTRY DATE: 2002-06-15

SEQ ID NO: 9440 - DNA, 3388 bp, Homo sapiens
  ref <308>: DATABASE ACCESSION NUMBER: EMBL / M55514
  ref <309>: DATABASE ENTRY DATE: 1999-07-02
ttaacaagtgatcgctgctgtctaggattttgtttcttttcgggggaaccttgacttcctttcccaggcaatccctcctgtgctgaactccagaggaaccaggagtcttggggtcttctctggggcagccccaacccccacccccaggctccagccgcgaggactctgtgcacccctcgggccaggcaacagaacttgttccgtggatatttggagcctccacctgccaaacccgagtgattccttttaccaccccccgccccccacccaggatcattcttcccctcctccagctgttgcagcttgagggggaaaaacaagccagccggtggattttctttatttttatttttcgccccgccggggaagggtgaagtgcttcttctgcatgattttggctgaagaatgctctgcatttccttgatttctatggagacctcagagctggttttgcttctgctgacacctcatctagcaccttctctacctcccagggtctttgcctctatctgtggtttggcattgtacctgggtacaggaagcctttgatgaacttaaaaggagagcctggagaatcatcctgatagactttgagtagaaatggctggacatacttcaaaccacatcttaacatggttcgagccatcactagaaggcaagtgctaacagtaaaggcttatttgcattttatttacatttaatggactgagcattggccaatttccatggcagaaaaatatatttcattttctaggcacaacttctggctgtcagacacttgctgcctttgaatcttgcagcaacatcactaaccacatcccagacatatttccaaatttcaacatctacccccaaaacataggtgtctgagagactccagcattttcggacttcttagtcttgagagtgccaggctatttatctcgaccagccaagctctggagagcaatgttgaatccctgagaagagagaggcatggggcgtgctgatttaaaaacagaaaatgcaaagttggagctgaaaatatccttagtcttccaagcaatctgcttaagggttccaaacttaccttaatttggtgagaaaagaagctgccctatttttctttcttcttcttctacaactggaaccagccatttccgaaaaccaccaccatggaggttgcaatggtgagtgcggagagctcagggtgcaacagtcacatgccttatggttatgctgcccaggcccgggcccgggagcgggagaggcttgctcactccaggcgagctgcagcacgtgctgttgcagcggccacagctgctgtcgaaggtagcgggggttctggtgggggctcccaccaccaccaccagtcacgcggggcctgtacctcccatgaccctcagagcagccggggtagtcgggaggaggaggcgacacggtctgagaagaagaaagcccactaccggcagagcagcttccctcattgctctgacctgatgcccagtggctctgaggagaagatcctgagggagctgagtgaggaggaggaagatgaggaggaggaggaagaggaggaagaggagggaaggttttactatagtgaagatgaccatggtgatgagtgttcctacacggatctgctgcctcaggatgagggcggtggcggctacagttcagtccgctacagtgactgttgtgaacgtgtggtgataaatgtgtcaggcctacgctttgagacccaaatgaaaactctggcccagtttccagagactttgttgggagaccctgaaaagaggactcagtactttgaccctttgcgcaatgagtatttttttgacaggaaccgccccagctttgatgccatcttgtattattatcaatcaggaggccgcctgaagaggccagtcaatgtcccctttgatatcttcactgaggaggtgaagttctatcagttgggggaggaggccctgttgaagtttcgggaggacgagggctttgtgagagaagaggaagacagggccctccccgagaatgaatttaaaaagcagatttggctcctctttgaatatccagagagctccgatcctgcaaggggcatagccattgtgtccgtcctggtcatcttaatctccattgtcatcttttgcctggaaaccttgcctgagtttagggacgacagggatctcgtcatggcactgagtgctggcgggcatggtgggttgttgaatgatacttcagcaccccatctggagaactcagggcacacaatattcaatgaccccttcttcatcgtggaaacagtctgtattgtatggttttcctttgagtttgtggttcgctgctttgcttgtcccagccaagcactcttcttcaaaaacatcatgaacatcattgacattgtctccattttgccttacttcatcacactgggcactgacctggcccagcaacaggggggtggcaatggtcagcagcagcaggccatgtcctttgccatcctcagaatcattcgtctggtccgagtattccggatcttcaaactctccaggcactccaaaggcctgcagatcctgggccacaccctcagagccagcatgcgggaactgggccttctgatcttcttcctcttcattggggtcatcctcttttctagtgctgtgtattttgcagaggcggatgaacctactacccatttccaaagcatcccagatgcattttggtgggctgtggtgaccatgacaactgtgggctatggggacatgaagcccatcactgtagggggcaagattgtcggggtcctgtgtgccattgcgggtgtcttaaccattgctttgccagtgccagtgattgtctctaactttaactatttctaccacagagagactgaaaatgaggaacagacacagctaacgcagaatgcagtcagttgtccatacctcccctctaatttgctcaagaaatttcggagctctacttcttcttccctgggggacaagtcagagtatctagagatggaagaaggagttaaggaatctctgtgtgccaaggaggagaagtgtcaggccaagggggatgacagtgagacagataaaaacaactgttctaatgcaaaggctgtggagactgatgtgtgaatcttttttttccacctgccactgctcccccctcagccatcttccaaatatatttatgcatagagagtgcagttatgaaaatgaaatatgcaaatgatccaatgcataccagtagtacactatttaatggttatacatggcataattgttactaaacttgtattacatatcaaataaatgatacatcttggagaagagggaggaataggagcaatctatctttatatttttattagaatgcaagaattttccacattaacctggaaaagatg

SEQ ID NO: 9441 - protein, 653 aa, Homo sapiens [sequence omitted]

SEQ ID NO: 9442 - DNA, 1087 bp, Rattus norvegicus
  misc_feature (1)..(1087): n=a, c, g or t
  ref <308>: DATABASE ACCESSION NUMBER: EMBL / X16038
  ref <309>: DATABASE ENTRY DATE: 1998-11-17
caggccagtctgggggtgaggaaaagggggtatttctctcacggctctgaggttcaggcaggcacttaaaagatatttctgacctacagctcacaacaactaccaggcccagtccgctgtccccctgcggcacgagacccacggtggggaagatgtggcggtctttgccaagggccctatggctcacctgcttcacggcgtccatgagcagaactacatcccccacgtcatggcgtatgcctcctgcattggagccaaccttgaccactgtgcctgggccagctctgcgagcagcccctccccnggngccctgctgcttccactggctctgttccccctacgcaccctgttctgagggcccaggtcccacaagagcccacaatggacagccggctcccctccctttgtggcctgccacctggccgcccacactcaacggggaggcccaggcaacctcgagcaggaacagaagtttgctacctgcctcacttccgcccggaaccctccgtgggtcggattcctggctctgccgttgtttctctattcactgccttttggccagcagggtgggtttctctcttgggccggcaggacacagactgcgcagattcccaaagcaccttatttttctaccaaatatactctccagaccctgcaaccatcatggaacattccagatctgaccttctctcccctaccccttctctctggaacactgggtcccatagtcacagccagtccctcaacccaaccctccctggagggaagaccaggtctgctcagggtgagactcccaggaagccacctccggggttggctgtctacccagggtggccaggctgggaagaacaacccagccggacaggacgcacacactccccacccagctccagagactcgccaacccttcactgaagcgactcccctgtttggaatagcaaaaaaaaaaaagaaagaaaaaaaagaaaaaaattttaatttctctttttggtgttggttaaaagggaacacaagacatttaaataaaatgttccaaatatttctgaggccagagctgagtctttgtggtcagtgggaaagagaccaa

SEQ ID NO: 9443 - protein, 524 aa, Rattus norvegicus
  ref <308>: DATABASE ACCESSION NUMBER: Refseq / NP_037191
  ref <309>: DATABASE ENTRY DATE: 2002-11-04
MILPFLVLAIGPCLTNSFVPEKEKDPSYWRQQAQETLKNALKLQKLNTNVAKNIIMFLGDGMGVSTVTAARILKGQLHHNTGEETRLEMDKFPFVALSKTYNTNAQVPDSAGTATAYLCGVKANEGTVGVSAATERTRCNTTQGNEVTSILRWAKDAGKSVGIVTTTRVNHATPSAAYAHSADRDWYSDNEMRPEALSQGCKDIAYQLMHNIKDIDVIMGGGRKYMYPKNRTDVEYELDEKARGTRLDGLDLISIWKSFKPRHKHSHYVWNRTELLALDPSRVDYLLGLFEPGDMQYELNRNNLTDPSLSEMVEVALRILTKNPKGFFLLVEGGRIDHGHHEGKAKQALHEAVEMDEAIGKAGTMTSQKDTLTVVTADHSHVFTFGGYTPRGNSIFGLAPMVSDTDKKPFTAILYGNGPGYKVVDGERENVSMVDYAHNNYQAQSAVPLRHETHGGEDVAVFAKGPMAHLLHGVHEQNYIPHVMAYASCIGANLDHCAWASSASSPSPGALLLPLALFPLRTLF

SEQ ID NO: 9444 - DNA, 2590 bp, Homo sapiens; identical to SEQ ID NO: 2485

SEQ ID NO: 9445 - protein, 524 aa, Homo sapiens; identical to SEQ ID NO: 2486

SEQ ID NO: 9446 - DNA, 1738 bp, Rattus norvegicus
  ref <308>: DATABASE ACCESSION NUMBER: EMBL / X16043
  ref <309>: DATABASE ENTRY DATE: 1993-09-12
cggagcacagcggccgccgagcactgcgagcgagcggccggcgccacgccagcagccgcctggggccgcaggaagcaccccggggagcggcggcggcgtgtgcgtgtggcgcgggtgcgggcggcggcgcgggagcagggcagagcggcagccggttcgggcgggcggcatcatggacgagaagttgttcaccaaggagctggaccagtggatcgagcagctgaacgagtgcaagcagctctccgagtcccaggtcaagagcctctgcgagaaggctaaagaaatccttacaaaagaatctaatgttcaggaggttcgatgtccagttactgtgtgtggggatgtgcatgggcaatttcatgacctcatggaactctttagaattggtggtaaatcaccagatacaaattacttgtttatgggagactatgtggacagaggatattactcagttgaaacagttacactgcttgtagctcttaaggttcgttaccgagagcgtatcaccatactccgagggaatcacgagagcagacagatcacacaagtttatggtttctacgatgagtgtttaaggaaatacggaaatgcaaatgtttggaaatacttcacagacctttttgactaccttcctctcactgccttggtggatgggcagatcttctgtctacatggtggtctttcaccatccatagacacactggatcacatccgagcacttgatcgcctacaagaagttcctcatgagggtccaatgtgtgacttgctgtggtcagatccagatgaccgtggtggctgggggatatctcctcggggagctggttatacctttggccaagatatttctgagacatttaatcatgccaatggcctcacgttggtgtccagagctcaccagctggtgatggaaggatataactggtgccatgaccggaatgtagtaacaattttcagtgctccaaactattgctatcgttgtggtaaccaagctgcaatcatggaacttgatgacactcttaagtattctttcttgcagttcgatccagcacctcgtagaggcgagccacatgtcactcgtcgtaccccagactacttcctgtaatgaaagtttaaccttgtacagtattgccatgaacaccgtctgttgacctaatggaatcggaagagcagcagtaactccaaagtgtcagaaatagttaacattcaaacttgtttccacacggaccaaaagatgtgccatataaaatacaaagcctcttgtcatcaacagccgtgaccactttagaatgaaccagttcattgcatgctgacgcgacattgttggtcaagaatccagtttctggcatagcgctatttgtagttacttttgctttcttgagagactgcagatctaggatgtaacattaacacctgtgagtccagttgacttccacttagctgtagcttactcagcatgactgtagagaggatagcaaacaatcattggagcttaatgaacatttttaaatgagtaccaaggcctcccctcttgttgtgttctttcagggatactattaatttaattgtatgatttctctgcactcagtttctcccttctcaaatctcggcccgcgttgttctttgttactgtcagaaaacctggtgagttgtttgaacagaactgtctcctcctgtaagatgatgtactgccaagtacgcagtgtttcataataaacttgagactgagaagtcagggttt

SEQ ID NO: 9447 - protein, 309 aa, Rattus norvegicus
  ref <308>: DATABASE ACCESSION NUMBER: SWISS-Prot / CAA34166
  ref <309>: DATABASE ENTRY DATE: 2001-10-16
MDEKLFTKELDQWIEQLNECKQLSESQVKSLCEKAKEILTKESNVQEVRCPVTVCGDVHGQFHDLMELFRIGGKSPDTNYLFMGDYVDRGYYSVETVTLLVALKVRYRERITILRGNHESRQITQVYGFYDECLRKYGNANVWKYFTDLFDYLPLTALVDGQIFCLHGGLSPSIDTLDHIRALDRLQEVPHEGPMCDLLWSDPDDRGGWGISPRGAGYTFGQDISETFNHANGLTLVSRAHQLVMEGYNWCHDRNVVTIFSAPNYCYRCGNQAAIMELDDTLKYSFLQFDPAPRRGEPHVTRRTPDYFL

SEQ ID NO: 9448 - DNA, 2181 bp, Homo sapiens
  ref <308>: DATABASE ACCESSION NUMBER: Refseq / NM_002715
  ref <309>: DATABASE ENTRY DATE: 2000-10-31
agagagccgagctctggagcctcagcgagcggaggaggaggcgcagggccgacggccgagtactgcggtgagagccagcgggccagcgccagcctcaacagccgccagaagtacacgaggaaccggcggcggcgtgtgcgtgtaggcccgtgtgcgggcggcggcgcgggaggagcgcggagcggcagccggctggggcgggtggcatcatggacgagaaggtgttcaccaaggagctggaccagtggatcgagcagctgaacgagtgcaagcagctgtccgagtcccaggtcaagagcctctgcgagaaggctaaagaaatcctgacaaaagaatccaacgtgcaagaggttcgatgtccagttactgtctgtggagatgtgcatgggcaatttcatgatctcatggaactgtttagaattggtggcaaatcaccagatacaaattacttgtttatgggagattatgttgacagaggatattattcagttgaaacagttacactgcttgtagctcttaaggttcgttaccgtgaacgcatcaccattcttcgagggaatcatgagagcagacagatcacacaagtttatggtttctatgatgaatgtttaagaaaatatggaaatgcaaatgtttggaaatattttacagatctttttgactatcttcctctcactgccttggtggatgggcagatcttctgtctacatggtggtctctcgccatctatagatacactggatcatatcagagcacttgatcgcctacaagaagttccccatgagggtccaatgtgtgacttgctgtggtcagatccagatgaccgtggtggttggggtatatctcctcgaggagctggttacacctttgggcaagatatttctgagacatttaatcatgccaatggcctcacgttggtgtctagagctcaccagctagtgatggagggatataactggtgccatgaccggaatgtagtaacgattttcagtgctccaaactattgttatcgttgtggtaaccaagctgcaatcatggaacttgacgatactctaaaatactctttcttgcagtttgacccagcacctcgtagaggcgagccacatgttactcgtcgtaccccagactacttcctgtaatgaaattttaaacttgtacagtattgccatgaaccatatatcgacctaatggaaatgggaagagcaacagtaactccaaagtgtcagaaaatagttaacattcaaaaaacttgttttcacatggaccaaaagatgtgccatataaaaatacaaagcctcttgtcatcaacagccgtgaccactttagaatgaaccagttcattgcatgctgaagcgacattgttggtcaagaaaccagtttctggcatagcgctatttgtagttacttttgctttctctgagagactgcagataataagatgtaaacattaacacctcgtgaatacaatttaacttccatttagctatagctttactcagcatgactgtagataaggatagcagcaaacaatcattggagcttaatgaacatttttaaaaataattaccaaggcctcccttctacttgtgagttttgaaattgttctttttattttcagggataccgtttaatttaattatatgatttgtctgcactcagtttattccctactcaaatctcagccccatgttgttctttgttattgtcagaacctggtgagttgttttgaacagaactgttttttccccttcctgtaagacgatgtgactgcacaagagcactgcagtgtttttcataataaacttgtgaactaagaactgagaaggtcaaattttaattgtatcaatgggcaagactggtgctgtttattaaaaaagttaaatcaattgagtaaattttagaatttgtagacttgtaggtaaaataaaaatcaagggcactacataacctctctggtaactccttgacattcttcagattaacttcaggatttatttgtatttcacatattacaatttgtcacattgttggtgtgcactttgtgggttcttcctgcatattaacttgtttgtaagaaaggaaatctgtgctgcttcagtaagacttaattgtaaaaccatataacttgagatttaagtctttgggttgtgttttaataaaacagcatgttttcaggtagag

SEQ ID NO: 9449 - protein, 309 aa, Homo sapiens
  ref <308>: DATABASE ACCESSION NUMBER: SWISS-Prot / P05323
  ref <309>: DATABASE ENTRY DATE: 2000-05-30
MDEKVFTKELDQWIEQLNECKQLSESQVKSLCEKAKEILTKESNVQEVRCPVTVCGDVHGQFHDLMELFRIGGKSPDTNYLFMGDYVDRGYYSVETVTLLVALKVRYRERITILRGNHESRQITQVYGFYDECLRKYGNANVWKYFTDLFDYLPLTALVDGQIFCLHGGLSPSIDTLDHIRALDRLQEVPHEGPMCDLLWSDPDDRGGWGISPRGAGYTFGQDISETFNHANGLTLVSRAHQLVMEGYNWCHDRNVVTIFSAPNYCYRCGNQAAIMELDDTLKYSFLQFDPAPRRGEPHVTRRTPDYFL

SEQ ID NO: 9450 - DNA, 735 bp, Rattus norvegicus
  ref <308>: DATABASE ACCESSION NUMBER: EMBL / X16072
  ref <309>: DATABASE ENTRY DATE: 1998-05-09
gtcacctcgacaccagagagtccaccatggcctcagaccaccagacacaggcgggcaagccccagccccttaaccctaagatcatcatcttcgaacaggagaacttccagggccattcccatgagctcagcgggccctgccccaacctgaaggagactgggatggagaaggcaggctccgtcctggtgcaggctggaccctgggtgggctacgagcaggctaattgcaagggagagcagtttgtgtttgagaagggcgagtacccacgctgggactcctggaccagcagccggaggacggactccctcagttctctgagacccatcaaagtggacagccaggagcacaagatcatcttatatgagaaccccaactttacgggcaagaagatggagattgtcgatgatgacgtacccagctttcacgctcacggataccaagaaaaagtgtcttccgtgcgcgtgcagagcggcacgtgggttgggtatcagtaccctggctaccgtgggctgcagtatctgctggagaagggggattacaaggacaacagcgacttcggggcccctcacccccaggtgcaatctgtgcgtcgcatccgtgacatgcagtggcaccagcggggcgccttccacccctccagctaaagccctgcccctccctccttcccagggtccaggccagccaccggggtcctcctgacacccagagtgaataaagtgtggcttgcaacttgaa

SEQ ID NO: 9451 - protein, 204 aa, Rattus norvegicus
  ref <308>: DATABASE ACCESSION NUMBER: SWISS-Prot / P26775
  ref <309>: DATABASE ENTRY DATE: 2000-05-30
ASDHQTQAGKPQPLNPKIIIFEQENFQGHSHELSGPCPNLKETGMEKAGSVLVQAGPWVGYEQANCKGEQFVFEKGEYPRWDSWTSSRRTDSLSSLRPIKVDSQEHKIILYENPNFTGKKMEIVDDDVPSFHAHGYQEKVSSVRVQSGTWVGYQYPGYRGLQYLLEKGDYKDNSDFGAPHPQVQSVRRIRDMQWHQRGAFHPSS

SEQ ID NO: 9452 - DNA, 589 bp, Homo sapiens
  ref <308>: DATABASE ACCESSION NUMBER: EMBL / AI700368
  ref <309>: DATABASE ENTRY DATE: 1999-12-22
gagcacttactggtttcttttttattataagttctgggatacatgtgcagaacgtgcaggtttgttacacaggtatacatgtgccatggtggtttgctgcacccatcaacctgtcatctaggttttaagccgtgcatgcatttggtatttgtcccaatgctctctctccctcttgtcccccactccctgacaggcctcggtgtgtgatgttcccctccttgtgtccatgtgttctcactgttcaactcccacttatgagtgagaacatgtggtgtttggttttctgcttctgtgttagtttgctgagaatgatggtttccagcttcatccatgtccctgagggtgacgggccccaaagtcgctgctgtccttgtagtctcccttctccagcaggtactgcagcccacggtagccagggtactagtagccaacccacatgccactccgcacccacacagatgacacctttctctggtagccattggcgtggaagctggtacatcgtcatctatgatttccatcctctttcccggtgaagttggggttttattaaagatgatcttgtgctctgggctgtcactttgatggg

SEQ ID NO: 9453 - DNA, 1478 bp, Rattus norvegicus
  ref <308>: DATABASE ACCESSION NUMBER: EMBL / X16145
  ref <309>: DATABASE ENTRY DATE: 1995-03-22
cggaagcagggatgtgggacctgaaaagtgagtggtgggcggtgggcttcgggcttctgctgctactggcagcttcggcccaggcagggggcttggctccgcaccactacactccggactggccgagcttggactcgcgaccactgccgagatggttcgacgaggccaagttcgggttgttcgtgcattggggggtgtactcggtgcccgcctggggcagcgagtggttctggtggcactggcagggcgagcagtcgtcggcgtacgtgcgcttcatgaaagaaaactacccgcccggcttcagctacgccgactttgcaccgcagtttacagcgcgcttcttccatccggaggagtgggcagacctcttccaggctgccggggccaagtatgtcgtcctgaccgcaaagcatcacgaaggcttcacaaactggccaagcgccgtgtcttggaactggaactcgaaggacgtggggccccaccgtgatttggtcggtgagttgggagcagctgtgcggaagaggaacatacgatacggcctctaccactcgctctttgagtggttccatccactctacctactagataagaaaaatggcctcaagactcagcatttcgtcagtacaaaaacaatgccagagctgtacgacctcgtgaataggtacaagcctgacctaatctggtctgatggggagtgggagtgtcccgattcgtactggaactccacggagttccttgcttggctctacaatgaaagcccggtcaaggatcaggtggtagtgaatgaccggtggggtcagaactgctcctgtcgtcacggagggtactacaactgtgaagacaaatacagaccacacagcctgccagaccacaagtgggagatgtgcaccagcgttgacaaggcgtcctggggctatcggagagacatgagcatgtctaccatcgtcgacgaaaatgaaatcattgaggaattggttcagacaataagtctgggaggcaactatcttctcaacatcggaccgaataaagacggcgtgatcgtccccatcttccaggaaaggctccttgctgttggcaagtggctgcagatcaacggggaggccatctatgcctccaaaccatggagggtgcagtctgaaaggaacaagacagttgtgtggtacaccactaaagactcggctgtttatgccacttttctgcactggccagaagatggagtggtaaacctccaatctcccaaaatgacatcggccacaaagataacgatgctaggaatggaaggagaactgcactggacccaggacccactggaaggcgtcctcatcactctgccccagttgccaccaggcactttcccagtggagtctgcctggactctaaagctgacaaaagtgaactgatcgcaggagctcaaggatagagggcccagtgtgctgctgtctcttaaggattatcgtgaataaagtagcttcctttcc

SEQ ID NO: 9454 - protein, 462 aa, Rattus norvegicus
  ref <308>: DATABASE ACCESSION NUMBER: SWISS-Prot / P17164
  ref <309>: DATABASE ENTRY DATE: 1997-11-01
MWDLKSEWWAVGFGLLLLLAASAQAGGLAPHHYTPDWPSLDSRPLPRWFDEAKFGLFVHWGVYSVPAWGSEWFWWHWQGEQSSAYVRFMKENYPPGFSYADFAPQFTARFFHPEEWADLFQAAGAKYVVLTAKHHEGFTNWPSAVSWNWNSKDVGPHRDLVGELGAAVRKRNIRYGLYHSLFEWFHPLYLLDKKNGLKTQHFVSTKTMPELYDLVNRYKPDLIWSDGEWECPDSYWNSTEFLAWLYNESPVKDQVVVNDRWGQNCSCRHGGYYNCEDKYRPHSLPDHKWEMCTSVDKASWGYRRDMSMSTIVDENEIIEELVQTISLGGNYLLNIGPNKDGVIVPIFQERLLAVGKWLQINGEAIYASKPWRVQSERNKTVVWYTTKDSAVYATFLHWPEDGVVNLQSPKMTSATKITMLGMEGELHWTQDPLEGVLITLPQLPPGTFPVESAWTLKLTKVN

SEQ ID NO: 9455 - DNA, 2065 bp, Homo sapiens
  ref <308>: DATABASE ACCESSION NUMBER: EMBL / BC017338
  ref <309>: DATABASE ENTRY DATE: 2001-11-14
ggcacgagggtagcgatgcgggctccggggatgaggtcgcggccggcgggtcccgcgctgttgctgctgctgctcttcctcggagcggccgagtcggtgcgtcgggcccagcctccgcgccgctacaccccagactggccgagcctggattctcggccgctgccggcctggttcgacgaagccaagttcggggtgttcatccactggggcgtgttctcggtgcccgcctggggcagcgagtggttctggtggcactggcagggcgaggggcggccgcagtaccagcgcttcatgcgcgacaactacccgcccggcttcagctacgccgacttcggaccgcagttcactgcgcgcttcttccacccggaggagtgggccgacctcttccaggccgcgggcgccaagtatgtagttttgacgacaaagcatcacgaaggcttcacaaactggccgagtcctgtgtcttggaactggaactccaaagacgtggggcctcatcgggatttggttggtgaattgggaacagctctccggaagaggaacatccgctatggactataccactcactcttagagtggttccatccactctatctacttgataagaaaaatggcttcaaaacacagcattttgtcagtgcaaaaacaatgccagagctgtacgaccttgttaacagctataaacctgatctgatctggtctgatggggagtgggaatgtcctgatacttactggaactccacaaattttctttcatggctctacaatgacagccctgtcaaggatgaggtggtagtaaatgaccgatggggtcagaactgttcctgtcaccatggaggatactataactgtgaagataaattcaagccacagagcttgccagatcacaagtgggagatgtgcaccagcattgacaagttttcctggggctatcgtcgtgacatggcattgtctgatgttacagaagaatctgaaatcatttcggaactggttcagacagtaagtttgggaggcaactatcttctgaacattggaccaactaaagatggactgattgttcccatcttccaagaaaggcttcttgctgttgggaaatggctgagcatcaatggggaggctatctatgcctccaaaccatggcgggtgcaatgggaaaagaacacaacatctgtatggtatacctcaaagggatcggctgtttatgccatttttctgcactggccagaaaatggagtcttaaaccttgaatcccccataactacctcaactacaaagataacaatgctgggaattcaaggagatctgaagtggtccacagatccagataaaggtctcttcatctctctaccccagttgccaccctctgctgtccccgcagagtttgcttggactataaagctgacaggagtgaagtaatcatttgagtgcaagaagaaagaggcgctgctcactgttttcctgcttcagtttttctcttatagtaccatcactataatcaacgaacttctcttctccacccagagatggcttttccaacacattttaattaaaggaactgagtacattaccctgatgtctaaatggaccaaagatctgagatccattgtgattatatctgtatcaggtcagcagaagaaggaactgagcagttgaactctgagttcatcaattgtaatatttggaaattatctacaatggaatcttccctctgttctctgataacctacttgcttactcaatgcctttaagccaagtcaccctgttgcctatgggaggaggtggaaggatttggcaagctcaaccacatgctatttagttagcatcagttgtcaccaacagtctttctgcaaagggcaggagagctttgggggaaaggaaaaggcttaccaggctgctatggtcaactcttcagaaattttcagagcaatctaaaagcgccaaaattcgctatgtttacagtgatactattaagaaaatgaatgtgattctgctctgtctttttaagtatgatcaaataaaaaatttgtacatcacaatcatttctaccaaaaaaaaaaaaaaaaaa

SEQ ID NO: 9456 - protein, 461 aa, Homo sapiens [sequence omitted]

SEQ ID NO: 9457 - DNA, 2348 bp, Rattus norvegicus
  ref <308>: DATABASE ACCESSION NUMBER: EMBL / X16262
  ref <309>: DATABASE ENTRY DATE: 1995-07-19
ctggatgaggagatggaagctaagcaaaaccttgagcgccatgtctccaccttgaacattcagctctcagactctaagaagaagctgcaggaccttgcaagcactattgaggtcatggaggaggggaagaagaggttgcagaaagagatggagggtctcggccagcagtatgaggagaaggccgctgcctatgacaaactggagaaaactaagaacaggcttcagcaggagctagatgacttggtcgtggacttggacaaccagcggcaactggtatccaatctggaaaagaagcagaagaaattcgatcagttgttagctgaggaaaagaacatctcctccaagtatgcggatgagagagaccgagctgaagcagaggccagggaaaaggaaacgaaggctttgtctctggcccgggccctggaggaagccctggaagccaaagaggaactggaaaggaccaacaagatgctcaaggccgagatggaagacctggtcagctccaaggatgacgtgggcaagaatgtgcacgagctggagaagtccaaacgagccctggagacccagatggaagagatgagaactcagctagaggagctggaggacgagctgcaggccactgaagacgccaagctgcggctggaggtcaacatgcaggccctcaagggccagtttgaacgagatctccaggctcgggatgagcagaatgaggagaagaggaggcagctacagcggcagctgcatgagtatgagacagaactggaagatgaacggaagcaaagggctctggcggcagcagccaagaagaagctggaaggggatctgaaagacctggaactccaggctgactcagccgtcaaagggagggaggaagccatcaagcagcttcgaaaactgcaggctcagatgaaggacttccaaagagagctggatgatgcccgtgcctccagagatgagatctttgccacctcaaaagagaatgagaagaaagccaagagtctggaggcagagctcatgcagctccaggaggacctggcagcagctgagagagctcgcaagcaagctgacctggagaaggaggagctggctgaggagctggctagcagcttatcaggaaggaatacactgcaggatgagaagcgccgcctggaggcaaggatcgcccagctggaggaggagctggaggaagagcagggcaacatggaggccatgagtgacagagtccgcaaggccacattgcaggctgagcaactgagcaatgagctggtcactgagcgcagtgcagctcagaagaatgagagtgcacggcaacagctggagcgccagaacaaggaactccgaagcaagttgcaggaggtagaaggtgctgtcaaagccaagcttaagtccactgttgcggcactagaggccaagattgtgcagctggaggagcagattgaacaagaggccagagaaaaacaggcagccaccaagttgctgaagcaaaaggacaagaagctaaaggaggtcctactgcaggtggaggatgagcgcaagatggtggagcagtacaaggagcaggcagagaaaggaaacaccaaggtcaagcagctcaagaggcagctggaagaggccgaggaggaatcccagcgcatcaatgccaaccgcaggaagctgcagcgggagctggatgaggccactgagagcaatgaggccatgggccgtgaggtgaatgccctcaagagcaaactcaggagaggaaacgaggcttcatttgttccttccagaagggctggaggccgtagagttattgaaaacacagatggttctgaagaagaaatggatgctcgggactcagacttcaatggaaccaaagccagtgaataaattcagttggacactatgtcagggaaaacaaaataccaaatgacagcaaagcccagcaggctgattagcatttgtctccattcgttctcaagtcatagacattaccccacctctcaccaggagtcaaccacagccctgcacaaaggatgtgaatttaagtttttaaatgtgctaccagagaaaatccagatagatgcaggtcgggagctgcagtcgccagtgcctttgtttacatgaaatggaacgttacgtgaatgggtgccccagcgccaacccgctcccaaccatcaactgcctgaccttccagtttgggaggaaaacctgtttgaaaattcccctccctttcctgcctgcacacctcagacacacagttcactaagaccaagtgactttttcagtcatctgaattaaggaagagcagagcgagcgcaccgccttatttgcacccacggacactttcacgaataaaaggttttaagtca

SEQ ID NO: 9458 - protein, 1976 aa, Rattus norvegicus
  ref <308>: DATABASE ACCESSION NUMBER: SWISS-Prot / Q9JLT0
  ref <309>: DATABASE ENTRY DATE: 2002-06-15
MAQRTGLEDPERYLFVDRAVIYNPATQADWTAKKLVWIPSERHGFEAASIKEERGDEVMVELAENGKKAMVNKDDIQKMNPPKFSKVEDMAELTCLNEASVLHNLKDRYYSGLIYTYSGLFCVVINPYKNLPIYSENIIEMYRGKKRHEKPPHIYAISESAYRCMLQDRKDQSILCTGESGAGKTENTKKVIQYLAHVASSHKGRKDHNIPGELERQLLQANPILESFGNAKTVKNDNSSRFGKFIRINFDVTGYIVGANIETYLLEKSRAVRQAKDERTFHIFYQLLSGAGEHLKSDLLLEGFNNYRFLSNGYIPIPGQQDKDNFQETMEAMHIMGFSHEEILSMLKVVSSVLQFGNISFKKERNTDQASMPENTVAQKLCHLLGMNVMEFTRAILTPRIKVGRDYVQKAQTKEQADFAVEALAKATYERLFRWLVHRINKALDRTKRQGTSFIGILDIAGFEIFELNSFEQLCINYTNEKLQQLFNHTMFILEQEEYQREGIEWNFIDFGLDLQPCIDLIERPANPPGVLALLDEECWFPKATDKTFVEKLVQEQGSHSKFQKPRQLKDKADFCIIHYAGKVDYKADEWLMKNMDPLNDNVATLLHQSSDRFVAELWKDVDRIVGLDQVTGMTETAFGSAYKTKKGMFRNVGQLYKESLTKLMATLRNTNPNFVRCIIPNHEKRAGKLDPHLVLDQLRCNGVLEGIRICRQGFPNRIVFQEFRQRYEILTPNAIPKGFMDGKQACERMIRALELDPNLYRIGQSKIFFRAGVLAHLEEERDLKITDIIIFFQAVCRGYLARKAFAKKQQQLSALKVLQRNCAAYLKLRHWQWWRVFTKVKPLLQVTRQEEELQAKDEELLKVKEKQTKVEGELEEMERKHQQLLEEKNILAEQLQAETELFAEAEEMRARLAAKKQELEEILHDLESRVEGEEERNQILQNEKKKMQAHIQDLEEQLDEEEGARQKLQLEKVTAEAKIKKMEEEVLLLEDQNSKFIKEKKLMEDRIAECSSQLAEEEEKAKNLAKIRNKQEVMISDLEERLKKEEKTRQELEKAKRKLDGETTDLQDQIAELQAQVDELKVQLTKKEEELQGALARGDDETLHKNNALKVARELQAQIAELQEDFESEKASRNKAEKQKRDLSEELEALKTELEDTLDTTAAQQELRTKREQEVAELKKALEDETKNHEAQIQDMRQRHATALEELSEQLEQAKRFKANLEKNKQGLETDNKELACEVKVLQQVKAESEHKRKKLDAQVQELHAKVSEGDRLRVELAEKANKLQNELDNVSTLLEEAEKKGMKFAKDAAGLESQLQDTQELLQEETRQKLNLSSRIRQLEEEKNSLQEQQEEEEEARKNLEKQVLALQSQLADTKKKVDDDLGTIEGLEEAKKKLLKDVEALSQRLEEKVLAYDKLEKTKNRLQQELDDLTVDLDHQRQIVSNLEKKQKKFDQLLAEEKGISARYAEERDRAEAEAREKETKALSLARALEEALEAKEEFERQNKQLRADMEDLMSSKDDVGKNVHELEKSKRALEQQVEEMRTQLEELEDELQATEDAKLRLEVNMQAMKAQFERDLQTRDEQNEEKKRLLLKQVRELEAELEDERKQRALAVASKKKMEIDLKDLEAQIEAANKARDEVIKQLRKLQAQMKDYQRELEEARASRDEIFAQSKESEKKLKSLEAEILQLQEELASSERARRHAEQERDELADEIANSASGKSALLDEKRRLEARIAQLEEELEEEQSNMELLNDRFRKTTLQVDTLNTELAAERSAAQKSDNARQQLERQNKELKAKLQELEGAVKSKFKATISALEAKIGQLEEQLEQEAKERAAANKLVRRTEKKLKEIFMQVEDERRHADQYKEQMEKANARMKQLKRQLEEAEEEATRANASRRKLQRELDDATEANEGLSREVSTLKNRLRRGGPISFSSSRSGRRQLHIEGASLELSDDDTESKTSDVNETQPPQSE

SEQ ID NO: 9459 - DNA, 3037 bp, Homo sapiens
  ref <308>: DATABASE ACCESSION NUMBER: EMBL / BC000280
  ref <309>: DATABASE ENTRY DATE: 2001-06-06
agaacaagcagctccgagcagacatggaagacctcatgagctccaaagatgatgtgggaaaaaacgttcacgaacttgaaaaatccaaacgggccctagagcagcaggtggaggaaatgaggacccagctggaggagctggaagacgaactccaggccacggaagatgccaagcttcgtctggaggtcaacatgcaggccatgaaggcgcagttcgagagagacctgcaaaccagggatgagcagaatgaagagaagaagcggctgctgatcaaacaggtgcgggagctcgaggcggagctggaggatgagaggaaacagcgggcgcttgctgtagcttcaaagaaaaagatggagatagacctgaaggacctcgaagcccaaatcgaggctgcgaacaaagctcgggatgaggtgattaagcagctccgcaagctccaggctcagatgaaggattaccaacgtgaattagaagaagctcgtgcatccagagatgagatttttgctcaatccaaagagagtgaaaagaaattgaagagtctggaagcagaaatccttcaattgcaggaggaacttgcctcatctgagcgagcccgccgacacgccgagcaggagagagatgagctggcggacgagatcaccaacagcgcctctggcaagtccgcgctgctggatgagaagcggcgtctggaagctcggatcgcacagctggaggaggagctggaagaggagcagagcaacatggagctgctcaacgaccgcttccgcaagaccactctacaggtggacacactgaacgccgagctagcagccgagcgcagcgccgcccagaagagtgacaatgcacgccagcaactggagcggcagaacaaggagctgaaggccaagctgcaggaactcgagggtgctgtcaagtctaagttcaaggccaccatctcagccctggaggccaagattgggcagctggaggagcagcttgagcaggaagccaaggaacgagcagccgccaacaaattagtccgtcgcactgagaagaagctgaaagaaatcttcatgcaggttgaggatgagcgtcgacacgcggaccagtataaagagcagatggagaaggccaacgctcggatgaagcagcttaaacgccagctggaggaagcagaagaagaagcgacgcgtgccaacgcatctcggcgtaaactccagcgggaactggatgatgccaccgaggccaacgagggcctgagccgcgaggtcagcaccctgaagaaccggctgaggcggggtggccccatcagcttctcttccagccgatctggccggcgccagctgcaccttgaaggagcttccctggagctctccgacgatgacacagaaagtaagaccagtgatgtcaacgagacgcagccaccccagtcagagtaaagttgcaggaagccagaggaggcaatacagtgggacagttaggaatgcacccggggcctcctgcagatttcggaaattggcaagctacgggattccttcctgaaagatcaactgtgtcttaaggctctccagcctatgcatactgtatcctgcttcagacttaggtacaattgctcccctttttatatacagacacacacaggacacatatattaaacagattgtttcatcattgcatctattttccatatagtcatcaagagaccattttataaaacatggtaagaccctttttaaaacaaactccaggcccttggttgcgggtcgctgggttattggggcagcgccgtggtcgtcactcagtcgctctgcatgctctctgtcatacagacaggtaacctagttctgtgttcacgtggcccccgactcctcagccacatcaagtctcctagaccactgtggactctaaactgcacttgtctctctcatttccttcaaataatgatcaatgctatttcagtgagcaaactgtgaaaggggctttggaaagagtaggaggggtgggctggatcggaagcaacacccatttggggttaccatgtccatcccccaaggggggccctgcccctcgagtcgatggtgtcccgcatctactcatgtgaactggccttggcgagggctggtctgtgcatagaagggatagtggccacactgcagctgaggccccaggtggcagccatggatcatgtagacttccagatggtctcccgaaccgcctggctctgccggcgccctcctcacgtcaggagcaagcagccgtggacccctaagccgagctggtggaaggcccctccctgtcgccagccgggccctcatgctgaccttgcaaattcagccgctgctttgagcccaaaatgggaatattggttttgtgtccgaggcttgttccaagtttgtcaatgaggtttatggagcctccagaacagatgccatcttcctgaatgttgacatgccagtgggtgtgactccttcatttttccttctcccttccctttggacagtgttacagtgaacacttagcatcctgtttttggttggtagttaagcaaactgacattacggaaagtgccttagacactacagtactaagacaatgttgaatatatcattcgcctctataacaatttaatgtattcagttttgactgtgcttcatatcatgtacctctctagtcaaagtggtattacagacattcagtgacaatgaatcagtgttaattctaaatccttgatcctctgcaatgtgcttgaaaacacaaaccttttgggttaaaagctttaacatctattaggaagaatttgtcctgtgggtttggaatcttggattttccccctttatgaactgtactggctgttgaccaccagacacctgaccgcaaatatcttttcttgtattcccatatttctagacaatgatttttgtaagacaataaatttattcattatagatatttgcgcctgctctgtttacttgaagaaaaaagcacccgtggagaataaagagacctcaataaacaagaataatcatgtgaaaaaaaaaaaaaaaaaaaaaaaaaaaaa

SEQ ID NO: 9460 - protein, 1972 aa, Homo sapiens; identical to SEQ ID NO: 4598
  ref <308>: DATABASE ACCESSION NUMBER: SWISS-Prot / P35749
  ref <309>: DATABASE ENTRY DATE: 2001-10-16

SEQ ID NO: 9461 - DNA, 2348 bp, Rattus norvegicus; identical to SEQ ID NO: 9457
  ref <308>: DATABASE ACCESSION NUMBER: EMBL / X16262
  ref <309>: DATABASE ENTRY DATE: 1995-07-19

SEQ ID NO: 9462 - protein, 1976 aa, Rattus norvegicus; identical to SEQ ID NO: 9458
  ref <308>: DATABASE ACCESSION NUMBER: SWISS-Prot / Q9JLT0
  ref <309>: DATABASE ENTRY DATE: 2002-06-15

SEQ ID NO: 9463 - DNA, 3037 bp, Homo sapiens; identical to SEQ ID NO: 9459
  ref <308>: DATABASE ACCESSION NUMBER: EMBL / BC000280
  ref <309>: DATABASE ENTRY DATE: 2001-06-06

SEQ ID NO: 9464 - protein, 1972 aa, Homo sapiens; identical to SEQ ID NO: 4598
  ref <308>: DATABASE ACCESSION NUMBER: Refseq / NP_002465
  ref <309>: DATABASE ENTRY DATE: 2001-02-26

SEQ ID NO: 9465 - DNA, 606 bp, Rattus norvegicus
  ref <308>: DATABASE ACCESSION NUMBER: EMBL / X16273
  ref <309>: DATABASE ENTRY DATE: 1995-08-05
gttgatttgatgaaacagctggacgaagacacggtttttgccctggtgaattacattttctttaaaggcaagtggaagaggccattcaatcctgagcacactagggatgctgactttcacgtagacaagtccaccacagtgaaggtgcccatgatgaaccgcctgggcatgtttgacatccactattgcagcacactgtccagctgggtgctgatgatggattacctgggcaacgccactgccatcttcctcctgcccgatgatggcaagatgcagcatctggagcaaactctcaccaaggatctcatttcccggttcctgctaaacaggcaaacaaggtcagccattctctacttccccaaactgtccatctctggaacctataacttgaagacactcctggactcactgggcatcacccgggtcttcaacaatgatgctgatctctctggaatcacagaggatgcccccctgaagcttagccaggctgtgcataaggctgtgctgaccttagatgagaggggaacagaggctgcaggagccactgtggtggaggccgtccccatgtctctgccccctcaagtgaagttcgaccaccctttcatc

SEQ ID NO: 9466 - protein, 411 aa, Rattus norvegicus; identical to SEQ ID NO: 6540
  ref <308>: DATABASE ACCESSION NUMBER: SWISS-Prot / CAA34349
  ref <309>: DATABASE ENTRY DATE: 1994-06-01

SEQ ID NO: 9467 - DNA, 1584 bp, Homo sapiens
  ref <308>: DATABASE ACCESSION NUMBER: Refseq / NM_000295
  ref <309>: DATABASE ENTRY DATE: 2002-11-05
aagctgtacactgcccaggcaaagcgtccgggcagcgtaggcgggcgactcagatcccagccagtggacttagcccctgtttgctcctccgataactggggtgaccttggttaatattcaccagcagcctcccccgttgcccctctggatccactgcttaaatacggacgaggacagggccctgtctcctcagcttcaggcaccaccactgacctgggacagtgaatcgacaatgccgtcttctgtctcgtggggcatcctcctgctggcaggcctgtgctgcctggtccctgtctccctggctgaggatccccagggagatgctgcccagaagacagatacatcccaccatgatcaggatcacccaaccttcaacaagatcacccccaacctggctgagttcgccttcagcctataccgccagctggcacaccagtccaacagcaccaatatcttcttctccccagtgagcatcgctacagcctttgcaatgctctccctggggaccaaggctgacactcacgatgaaatcctggagggcctgaatttcaacctcacggagattccggaggctcagatccatgaaggcttccaggaactcctccgtaccctcaaccagccagacagccagctccagctgaccaccggcaatggcttgttcctcagcgagggcctgaagctagtggataagtttttggaggatgttaaaaagttgtaccactcagaagccttcactgtcaacttcggggacaccgaagaggccaagaaacagatcaacgattacgtggagaagggtactcaagggaaaattgtggatttggtcaaggagcttgacagagacacagtttttgctctggtgaattacatcttctttaaaggcaaatgggagagaccctttgaagtcaaggacaccgaggaagaggacttccacgtggaccaggtgaccaccgtgaaggtgcctatgatgaagcgtttaggcatgtttaacatccagcactgtaagaagctgtccagctgggtgctgctgatgaaatacctgggcaatgccaccgccatcttcttcctgcctgatgaggggaaactacagcacctggaaaatgaactcacccacgatatcatcaccaagttcctggaaaatgaagacagaaggtctgccagcttacatttacccaaactgtccattactggaacctatgatctgaagagcgtcctgggtcaactgggcatcactaaggtcttcagcaatggggctgacctctccggggtcacagaggaggcacccctgaagctctccaaggccgtgcataaggctgtgctgaccatcgacgagaaagggactgaagctgctggggccatgtttttagaggccatacccatgtctatcccccccgaggtcaagttcaacaaaccctttgtcttcttaatgattgaccaaaataccaagtctcccctcttcatgggaaaagtggtgaatcccacccaaaaataactgcctctcgctcctcaacccctcccctccatccctggccccctccctggatgacattaaagaagggttgagctggaaaaaaaaaaaaaaaaaaa

SEQ ID NO: 9468 - protein, 418 aa, Homo sapiens
  ref <308>: DATABASE ACCESSION NUMBER: SWISS-Prot / P01009
  ref <309>: DATABASE ENTRY DATE: 2002-06-15
MPSSVSWGILLLAGLCCLVPVSLAEDPQGDAAQKTDTSHHDQDHPTFNKITPNLAEFAFSLYRQLAHQSNSTNIFFSPVSIATAFAMLSLGTKADTHDEILEGLNFNLTEIPEAQIHEGFQELLRTLNQPDSQLQLTTGNGLFLSEGLKLVDKFLEDVKKLYHSEAFTVNFGDTEEAKKQINDYVEKGTQGKIVDLVKELDRDTVFALVNYIFFKGKWERPFEVKDTEEEDFHVDQVTTVKVPMMKRLGMFNIQHCKKLSSWVLLMKYLGNATAIFFLPDEGKLQHLENELTHDIITKFLENEDRRSASLHLPKLSITGTYDLKSVLGQLGITKVFSNGADLSGVTEEAPLKLSKAVHKAVLTIDEKGTEAAGAMFLEAIPMSIPPEVKFNKPFVFLMIEQNTKSPLFMGKVVNPTQK

SEQ ID NO: 9469 - DNA, 606 bp, Rattus norvegicus; identical to SEQ ID NO: 9465
  ref <308>: DATABASE ACCESSION NUMBER: EMBL / X16273
  ref <309>: DATABASE ENTRY DATE: 1995-08-05

SEQ ID NO: 9470 - protein, 411 aa, Rattus norvegicus; identical to SEQ ID NO: 6540
  ref <308>: DATABASE ACCESSION NUMBER: SWISS-Prot / CAA34349
  ref <309>: DATABASE ENTRY DATE: 1994-06-01

SEQ ID NO: 9471 - DNA, 1584 bp, Homo sapiens; identical to SEQ ID NO: 9467
  ref <308>: DATABASE ACCESSION NUMBER: Refseq / NM_000295
  ref <309>: DATABASE ENTRY DATE: 2002-11-05

SEQ ID NO: 9472 - protein, 418 aa, Homo sapiens; identical to SEQ ID NO: 9468
  ref <308>: DATABASE ACCESSION NUMBER: SWISS-Prot / P01009
  ref <309>: DATABASE ENTRY DATE: 2002-06-15

SEQ ID NO: 9473 - DNA, 606 bp, Rattus norvegicus; identical to SEQ ID NO: 9465
  ref <308>: DATABASE ACCESSION NUMBER: EMBL / X16273
  ref <309>: DATABASE ENTRY DATE: 1995-08-05

SEQ ID NO: 9474 - protein, 411 aa, Rattus norvegicus; identical to SEQ ID NO: 6540
  ref <308>: DATABASE ACCESSION NUMBER: SWISS-Prot / CAA34349
  ref <309>: DATABASE ENTRY DATE: 1994-06-01

SEQ ID NO: 9475 - DNA, 1584 bp, Homo sapiens; identical to SEQ ID NO: 9467
  ref <308>: DATABASE ACCESSION NUMBER: Refseq / NM_000295
  ref <309>: DATABASE ENTRY DATE: 2002-11-05

SEQ ID NO: 9476 - protein, 418 aa, Homo sapiens; identical to SEQ ID NO: 9468
  ref <308>: DATABASE ACCESSION NUMBER: SWISS-Prot / P01009
  ref <309>: DATABASE ENTRY DATE: 2002-06-15

SEQ ID NO: 9477 - DNA, 606 bp, Rattus norvegicus; identical to SEQ ID NO: 9465
  ref <308>: DATABASE ACCESSION NUMBER: EMBL / X16273
  ref <309>: DATABASE ENTRY DATE: 1995-08-05

SEQ ID NO: 9478 - protein, 411 aa, Rattus norvegicus; identical to SEQ ID NO: 6540
  ref <308>: DATABASE ACCESSION NUMBER: SWISS-Prot / CAA34349
  ref <309>: DATABASE ENTRY DATE: 1994-06-01

SEQ ID NO: 9479 - DNA, 1584 bp, Homo sapiens; identical to SEQ ID NO: 9467
  ref <308>: DATABASE ACCESSION NUMBER: Refseq / NM_000295
  ref <309>: DATABASE ENTRY DATE: 2002-11-05

SEQ ID NO: 9480 - protein, 418 aa, Homo sapiens; identical to SEQ ID NO: 9468
  ref <308>: DATABASE ACCESSION NUMBER: SWISS-Prot / P01009
  ref <309>: DATABASE ENTRY DATE: 2002-06-15

SEQ ID NO: 9481 - DNA, 3348 bp, Rattus norvegicus
  ref <308>: DATABASE ACCESSION NUMBER: EMBL / X16476
  ref <309>: DATABASE ENTRY DATE: 1993-09-12
aattccggtcgctggtctggcatgacgaagcatggctcgcgctccaccagctcgctgccgcccgagcccatggagatcgtgcgcagcaaggcgtgctcgcgccgggtgcgcctcaacgtcgggggcctggcgcacgaggtgctgtggcgcactctggaccgcctgccccgcacgcggctgggcaagcttcgggactgcaacacgcacgactccctgctccaggtgtgcgacgactacagccttgaggacaacgagtacttcttcgaccgccaccctggcgcctttacctccattctcaatttctaccgcaccggccggctgcacatgatggaggagatgtgcgcgctgagcttcagccaggagctggactactggggcatcgatgagatctacctggagtcctgctgccaggcccgctatcaccaaaagaaggagcagatgaacgaggagctgaagcgcgaggccgagacgctgcgggagcgggagggcgaggagtttgacaacacgtgctgtgcagagaagaggaagaaactctgggatctgctggagaagcccaactcgtcggtggccgccaagatcctggccatcatctcgatcatgttcatcgtcctgtccaccatcgctctgtcactcaacacgctgcctgagctgcagagcctagacgagttcggccagagcacggataacccgcagctggcgcacgtggaggcggtgtgcatcgcatggttcaccatggagtacttgctgaggttcctgtcctcccccaagaaatggaagttcttcaagggccccctcaacgccattgacctactggccatcctgccctactacgtcaccatcttcctcacagaatccaacaagagcgtgctgcagttccagaacgtgcgccgcgtggtccagatctttcgcatcatgcgcatccttcggatcctgaagctggcccgtcactccactggcctgcagtccttgggcttcaccctgcgcagaagctacaacgaactgggcctgctcatcctcttcctcgcgatgggcatcatgatcttctccagcctggtcttcttcgcggagaaggatgaggacgacaccaagttcaaaagcatccccgcctctttctggtgggctaccatcaccatgacaactgttggctatggagacatctacccgaagactctcctggggaaaatcgtgggggggctctgttgcattgccggggtcctggtgattgctctccccatccccatcatcgtcaataacttctccgagttctacaaggagcagaagcgccaggagaaagccatcaagcggagggaggctctggagagagccaagaggaatggcagcatcgtgtccatgaacatgaaggacgccttcgcccggagcatcgagatgatggacatcgtggtggagaaaaatggcgagagcatagctaagaaggataaagtgcaagataaccacctgtcccccaacaagtggaaatggaccaagagggcactctccgagaccagctccagtaagtcctttgaaaccaaggagcagggatcccccgaaaaggccaggtcctcgtctagtccacagcacttgaacgtccagcagctggaagacatgtacagtaagatggccaagacacagtcccagcccatcctcaacaccaaggagatggccccgcagagcaagcctccagaggagctggagatgagcagcatgcccagccccgtggcccctctgcccgcacgcacggagggcgtcatcgacatgcggagcatgtccagcattgacagcttcatcagctgtgccacggacttccctgaagccaccagattctcccacagtcctctggcatccctctccagcaaggctgggagcagcacagccccggaggtgggctggcggggggctctgggtgccagcggcgggaggctcacggagaccaaccccattcctgagaccagccgctctggtttcttcgtggagagtcccaggagttccatgaagaccaacaaccccttgaagctgcgagcgctcaaggtcaacttcgtggagggcgaccccaccccgctgctgccctccctgggcttgtatcacgatcctcttaggaacagaggaggggcagcggctgcagttgcgggactggagtgtgcctccctcttagacaagcccgtgctgagcccagagtcctccatctacaccacagcaagtgccaggacgccccctcgctcccctgagaaacacacagcaatagcattcaacttcgaggcgggagtccaccattacatagacaccgacacagatgacgagggtcagctgctctacagcgtggactccagccctcccaaaagtctccacgggagtaccagtcccaagttcagcactggagctagaacggagaagaaccacttcgagagctcccccttgcccacctcccctaagttcttaaggccgaactgtgtctactcctcagaagggttgactggaaaaggccctggggctcaagagaaatgcaagctggagaaccatacccccccggatgtgcacatgctgcctgggggaggagcacacgggagcactagggatcagagtatctgagctccctaccacagagggcatctgcaggagaaatcaaggaggagggatgcttggcttgctgccactgagttctgcatgaactccaaggcccccaccaccacagagccccagcaagaggagagaccccgagagccatgaccaatctgtggacactaactagccacggggaccacacctaacaacatcttcctgagatggccggagcagagctgacagccaccactaagacctagcctaggacacacactcctagtctcgtctggaggctctctcagcctctggatacaccatcaccatctctcaaggcttcagctgagatgggtgttggagcgaggggttgctagtgaaagagtgggctgcccaagaagtactgggtgtcggtctcctgttaggagggtgcagaggacccttgatcatgagggattctctgctccgtcagccacactcctagggcattgtgatgcttacataagcaagtggctcaaatgattcagtattctgtggtccctggggctttattcggagactctgtcggggtgagctgacaatttagactcaattctttctgcccacctggccatccaggaagtgttccgacggttggcacgcagccagggctggcacaggaacgtgggttccaaacaacgctcgtatggactgaaaagatacgcaggcgtcaaatatgcaaacgagatagattatttaaggagactgtgtgtgactgaaaagcaacattaaaaaataataaatttcattttctacatt

SEQ ID NO: 9482 - protein, 853 aa, Rattus norvegicus
  ref <308>: DATABASE ACCESSION NUMBER: SWISS-Prot / CAA34497
  ref <309>: DATABASE ENTRY DATE: 2002-06-15
MTKHGSRSTSSLPPEPMEIVRSKACSRRVRLNVGGLAHEVLWRTLDRLPRTRLGKLRDCNTHDSLLQVCDDYSLEDNEYFFDRHPGAFTSILNFYRTGRLHMMEEMCALSFSQELDYWGIDEIYLESCCQARYHQKKEQMNEELKREAETLREREGEEFDNTCCAEKRKKLWDLLEKPNSSVAAKILAIISIMFIVLSTIALSLNTLPELQSLDEFGQSTDNPQLAHVEAVCIAWFTMEYLLRFLSSPKKWKFFKGPLNAIDLLAILPYYVTIFLTESNKSVLQFQNVRRVVQIFRIMRILRILKLARHSTGLQSLGFTLRRSYNELGLLILFLAMGIMIFSSLVFFAEKDEDDTKFKSIPASFWWATITMTTVGYGDIYPKTLLGKIVGGLCCIAGVLVIALPIPIIVNNFSEFYKEQKRQEKAIKRREALERAKRNGSIVSMNMKDAFARSIEMMDIVVEKNGESIAKKDKVQDNHLSPNKWKWTKRALSETSSSKSFETKEQGSPEKARSSSSPQHLNVQQLEDMYSKMAKTQSQPILNTKEMAPQSKPPEELEMSSMPSPVAPLPARTEGVIDMRSMSSIDSFISCATDFPEATRFSHSPLASLSSKAGSSTAPEVGWRGALGASGGRLTETNPIPETSRSGFFVESPRSSMKTNNPLKLRALKVNFVEGDPTPLLPSLGLYHDPLRNRGGAAAAVAGLECASLLDKPVLSPESSIYTTASARTPPRSPEKHTAIAFNFEAGVHHYIDTDTDDEGQLLYSVDSSPPKSLHGSTSPKFSTGARTEKNHFESSPLPTSPKFLRPNCVYSSEGLTGKGPGAQEKCKLENHTPPDVHMLPGGGAHGSTRDQSI

SEQ ID NO: 9483 - DNA, 936 bp, Rattus norvegicus
  ref <308>: DATABASE ACCESSION NUMBER: EMBL / X16481
  ref <309>: DATABASE ENTRY DATE: 1990-11-28
gaattccggccgccgccaccgcgccaagttccggccgcggccaccttccgccgtccagggctcctccgcctcggccccgggaccccggctccccgccagccccggccccggcaccatgtcggagaagagcgtggaggcagcggccgagctaagcgccaaggacctgaaggaaaagaaggacaaggtggaggagaaggctggccggaaagaacggaagaaagaagtagtggaggaggaggagaatggagctgaggaggaggaagaagaaactgctgaggatggagaggatgatgatgaaggagacgaagaagatgaggaggaagaggaggaggaggatgaaggccccgtgcggaagagaactgctgaagaggaggatgaagcggatcccaagaggcagaagacagaaaacggggcgtcggcttgagcccctgcccgtgggcttggggatgggaggcccctcaggtcctggaggtggggcaggaacacacaaatccagccccccttctcctggctccctcgtctggccctgccccagagctgtgacccttgccctttgacccagcctctcatttccatctctccagacactgctccttcaccctcactgccacaggtccagcccccaacccgcctcatccaagctccccagccggccctcacttgccctagcattccttgttcttccctgccttcctcaccatcgatctgttccagtccttgcgaagcctctccttcccctctgcaccccgagcctctcagcctgcccttctctctcctgcctgacccctgggtctccctcagattccctcctctcagacagcgccaggccggggtggggctggggttggggccaagccccgaagctgccccctcccctttttgtataatttaataaagaaacggtcgcgcttcaaaaaaaaaaaaaaaacggaattc

SEQ ID NO: 9484 - protein, 101 aa, Rattus norvegicus
  ref <308>: DATABASE ACCESSION NUMBER: SWISS-Prot / P04550
  ref <309>: DATABASE ENTRY DATE: 2002-06-15
SEKSVEAAAELSAKDLKEKKDKVEEKAGRKERKKEVVEEEENGAEEEEEETAEDGEDDDEGDEEDEEEEEEEDEGPVRKRTAEEEDEADPKRQKTENGASA

SEQ ID NO: 9485 - DNA, 627 bp, Rattus norvegicus
  ref <308>: DATABASE ACCESSION NUMBER: EMBL / X16933
  ref <309>: DATABASE ENTRY DATE: 1995-07-19
gagagtgtagataaggtcatggatcagaaagaacataaattgaatgggaaagtcattgatcctaaaagggccaaagccatgaaaacaaaagagcccgtcaaaaaaatttttgttggtggcctttctccagacacacctgaagaaaaaataagagagtactttggtggttttggtgaggttgaatccatagagctgcctatggacaacaagaccaataagaggcgtgggttctgtttcattacctttaaggaagaggaaccagtgaagaagataatggagaagaaataccacaatgttggtcttagtaaatgtgaaataaaagtagccatgtcgaaggagcagtatcagcagcagcagcagtggggatctagaggagggtttgcaggaagagctcgcggaagaggcggtgatcagcagagtggttatgggaaagtatccagacgaggtggtcatcaaaatagctacaaaccatactaaattattccacttgcaacttatccccaacaggtggtgaagcagtattttccaatttgaagattcatttgaagtggctcctgccacctgctaatagcagttcaaactaaattttttctatcaagttcccgaatggaagtatgacgttgggtg

SEQ ID NO: 9486 - protein, 158 aa, Rattus norvegicus
  ref <308>: DATABASE ACCESSION NUMBER: SWISS-Prot / CAA34808
  ref <309>: DATABASE ENTRY DATE: 2002-06-15
ESVDKVMDQKEHKLNGKVIDPKRAKAMKTKEPVKKIFVGGLSPDTPEEKIREYFGGFGEVESIELPMDNKTNKRRGFCFITFKEEEPVKKIMEKKYHNVGLSKCEIKVAMSKEQYQQQQQWGSRGGFAGRARGRGGDQQSGYGKVSRRGGHQNSYKPY

SEQ ID NO: 9487 - DNA, 1154 bp, Homo sapiens
  ref <308>: DATABASE ACCESSION NUMBER: EMBL / M94630
  ref <309>: DATABASE ENTRY DATE: 1999-07-02
gaattcgaggatccgggtaccatggcggcgggcgagcaggagggagccatggtggcggcgacacagggggcagcggcggcggcgggaagcggaccgggaccgggggcggaaccgcgtctggaggcaccgaagggcagcgccgagtcggagggggcgaagattgacgccagtaagaacgaggaggatgaaggccattcaaactcctccccacgacactctgaagcagcgacggcacagcgggaagaatggaaaatgtttataggaggccttagctgggacactacaaagaaagatctgaaggactacttttccaaatttggtgaagttgtagactgcactctgaagttagatcctatcacagggcgatcaaggggttttggctttgtgctatttaaagaatcggagagtgtagataaggtcatggatcaaaaagaacataaattgaatgggaaggtgattgatcctaaaagggccaaagccatgaaaacaaaagagccggttaaaaaaatttttgttggtggcctttctccagatacacctgaagagaaaataagggagtactttggtggttttggtgaggtggaatccatagagctccccatggacaacaagaccaataagaggcgtgggttatgctttattacctttaaggaagaagaaccagtgaagaagataatggaaaagaaataccacaatgttggtcttagtaaatgtgaaataaaagtagccatgtcgaaggaacaatatcagcaacagcaacagtggggatctagaggaggatttgcaggaagagctcgtggaagaggtggtgaccagcagagtggttatgggaaggtatccagggcaggtggtcatcaaaatagctacaaaccatatctaaattattccatttgcaacttatccccaacaggtggtgaagcagtattttccaatttgaagattcatttgaatggctcctgccacctgctaatagcagttcaaactaaattttttgtatcaagtccctgaatggaagtatgacgttgggtccctctgaagtttaattctgagttctcattaaaagaaatttgctttcattgttttatttcttaaaaaaaaaaaaaaaaaaaaaaaaaaaaaaaaaaaaaaaccatggtacccggatcctcgaattc

SEQ ID NO: 9488 - protein, 355 aa, Homo sapiens
  ref <308>: DATABASE ACCESSION NUMBER: SWISS-Prot / Q14103
  ref <309>: DATABASE ENTRY DATE: 2002-06-15
MSEEQFGGDGAAAAATAAVGGSAGEQEGAMVAATQGAAAAAGSGAGTGGGTASGGTEGGSAESEGAKIDASKNEEDEGHSNSSPRHSEAATAQREEWKMFIGGLSWDTTKKDLKDYFSKFGEVVDCTLKLDPITGRSRGFGFVLFKESESVDKVMDQKEHKLNGKVIDPKRAKAMKTKEPVKKIFVGGLSPDTPEEKIREYFGGFGEVESIELPMDNKTNKRRGFCFITFKEEEPVKKIMEKKYHNVGLSKCEIKVAMSKEQYQQQQQWGSRGGFAGRARGRGGGPSQNWNQGYSNYWNQGYGNYGYNSQGYGGYGGYDYTGYNNYYGYGDYSNQQSGYGKVSRRGGHQNSYKPY

SEQ ID NO: 9489 - DNA, 627 bp, Rattus norvegicus; identical to SEQ ID NO: 9485
  ref <308>: DATABASE ACCESSION NUMBER: EMBL / X16933
  ref <309>: DATABASE ENTRY DATE: 1995-07-19

SEQ ID NO: 9490 - protein, 158 aa, Rattus norvegicus; identical to SEQ ID NO: 9486
  ref <308>: DATABASE ACCESSION NUMBER: SWISS-Prot / CAA34808
  ref <309>: DATABASE ENTRY DATE: 2002-06-15

SEQ ID NO: 9491 - DNA, 1154 bp, Homo sapiens; identical to SEQ ID NO: 9487
  ref <308>: DATABASE ACCESSION NUMBER: EMBL / M94630
  ref <309>: DATABASE ENTRY DATE: 1999-07-02

SEQ ID NO: 9492 - protein, 355 aa, Homo sapiens; identical to SEQ ID NO: 9488
  ref <308>: DATABASE ACCESSION NUMBER: SWISS-Prot / Q14103
  ref <309>: DATABASE ENTRY DATE: 2002-06-15

SEQ ID NO: 9493 - DNA, 2573 bp, Rattus norvegicus
  ref <308>: DATABASE ACCESSION NUMBER: EMBL / X17163
  ref <309>: DATABASE ENTRY DATE: 1993-09-12
gacgactggtctgcgccgccggagaacctctgtcgctggggctggtccgcgggctccgaggaaccgctgcttcctgagagcgctccgtgagtgaccgcgacttttcaaagctccggatcgcgcgggaccaaccaacgtgagtgcaagcggtgtcttaaccctgcgctccctggagcgaactggggaggagggcgcaggggggagcactgcggtctggagcgcacgctcctaaacaaactttgttactgaagcggggacgcgcgggtatcccccgcttcccggcgcgctgttgcggccccgaaacttctgcgcacagcccaggctaaccccgcgtgaagtgaccgactgttctatgactgcaaagatggaaacgaccttctacgacgatgccctcaacgcctcgttcctccagtccgagagtggcgcctacggctacagtaaccctaagattctgaagcagagcatgaccttgaacctggccgacccggtgggcaatctgaagccgcacctccgagccaagaactcggaccttctcacgtcgcccgacgtcgggctgctcaagctggcgtcgccggagctggagcgcctgatcatccagtccagcaatgggcacatcaccactacaccgacccccactcagttcttgtgccccaagaacgtgaccgacgagcaggagggcttcgccgaaggcttcgtgcgcgccctagctgaactgcatagccagaatacgctgcccagtgtcacctccgcggcacaacctgtcagtggggcgggcatggtcgctcccgctgtggcctcagtagctggcgctggcggcggcggcggctacagcgccagcctgcacagtgagcctccggtctacgccaacctcagcaacttcaacccgggtgcgctgagcagcggcggtggggcgccctcctatggcgcgaccgggctggcctttccatcgcagccccagcagcagcagcagccgcctcagccgccgcaccacttgccccaacagatcccggtgcagcacccgcggctgcaggcgctgaaggaagagccgcagacggtgccggagatgccgggagagacgccgcccttgtcccccatcgacatggagtctcaggagcggatcaaggcggagaggaagcgcatgagaaaccgcatcgctgcctccaagtgccggaaaaggaagctggagcggatcgcccggctagaggaaaaagtgaaaaccttgaaagcgcaaaactccgagctggcgtccacggccaacatgctcagggaacaggtggcacagcttaaacagaaagtcatgaaccacgttaacagtgggtgccaactcatgctaacgcagcagttgcaaacgttttgaggacagactgtcagggctgaggggcagtggaagaaaaaaataacagagataaacttgagaacttgactggttgcgacagagaaaaaaaagtgtccgagtactgaagccaagggtacacaagatggactgggttgcgacctgacggcgcccccaatgtgctggagtgggaaggacgtggcgcgcctggctttggcgaggagccagagagcagcggcctgttcgcgacgctttgcgaacgggctgtgccgcgaccagaacgatggacttttcgttaacattgaccaagaactgcatggacctaacattcgatctcattcagtattaaggggggtgggtgggggcttacaaactgcaatagagactgtagattgcttctctagtgctccgtaagaacacaaagcagggagggctgggaaggggagggaggcttgtgagtaccaggctagattgcggatgaactcccctggcctgcctctctcaactgtgtatgtacatatatttttttttaatttgatgaaagctgattactgtctataataaacagcttcctgcctttgtaagttatttcatgtttgtttgtttgggtgtcctacccagtgtttgtaaataagagatttgaagcattctgagtttaccatttgtaataaagtatataatttttttatgttttgtttctgaaaatttccagaaaggatatttaagaaaacacaataaaccattgagaagtagcccccaacctctctgctgcattatcgatagataatgagagctaggtgaaatgacagctgagtgtctgtatgctggggtgagagcctgtagtccctcccgtctggttgtaggaatagacaccctgcatgctatcattgactcatactctctccccagcaacccacaagtccagactgttgaccagaagatggtgcagtgtttcttaaggctggaagaagagggtgttgcaaggggagagggacagcccactgggaaagcagatgcttgagttgagagccatatcaagtagcatgcgctgtgatcgtttataataataataaagacttcagcaattagatgtttatctcaaagcagggacccatggaaggttttacaaaaggtgtctccttccaacttggattctgacgactcctagaaaaagatgacctttgcttgtgcatatttataatagttcgtatcacaataaatgtattcaaataatggtttt

SEQ ID NO: 9494 - protein, 334 aa, Rattus norvegicus
  ref <308>: DATABASE ACCESSION NUMBER: SWISS-Prot / CAA35084
  ref <309>: DATABASE ENTRY DATE: 2002-06-15
MTAKMETTFYDDALNASFLQSESGAYGYSNPKILKQSMTLNLADPVGNLKPHLRAKNSDLLTSPDVGLLKLASPELERLIIQSSNGHITTTPTPTQFLCPKNVTDEQEGFAEGFVRALAELHSQNTLPSVTSAAQPVSGAGMVAPAVASVAGAGGGGGYSASLHSEPPVYANLSNFNPGALSSGGGAPSYGATGLAFPSQPQQQQQPPQPPHHLPQQIPVQHPRLQALKEEPQTVPEMPGETPPLSPIDMESQERIKAERKRMRNRIAASKCRKRKLERIARLEEKVKTLKAQNSELASTANMLREQVAQLKQKVMNHVNSGCQLMLTQQLQTF

SEQ ID NO: 9495 - DNA, 3622 bp, Homo sapiens
  ref <308>: DATABASE ACCESSION NUMBER: EMBL / J04111
  ref <309>: DATABASE ENTRY DATE: 2000-03-04
cccggggaggggaccggggaacagagggccgagaggcgtgcggcaggggggagggtaggagaaagaagggcccgactgtaggagggcagcggagcattacctcatcccgtgagcctccgcgggcccagagaagaatcttctagggtggagtctccatggtgacgggcgggcccgcccccctgagagcgacgcgagccaatgggaaggccttggggtgacatcatgggctatttttaggggttgactggtagcagataagtgttgagctcgggctggataagggctcagagttgcactgagtgtggctgaagcagcgaggcgggagtggaggtgcgcggagtcaggcagacagacagacacagccagccagccaggtcggcagtatagtccgaactgcaaatcttattttcttttcaccttctctctaactgcccagagctagcgcctgtggctcccgggctggtggttcgggagtgtccagagagccttgtctccagccggccccgggaggagagccctgctgcccaggcgctgttgacagcggcggaaagcagcggtaccccacgcgcccgccgggggacgtcggcgagcggctgcagcagcaaagaactttcccggcggggaggaccggagacaagtggcagagtcccggagcgaacttttgcaagcctttcctgcgtcttaggcttctccacggcggtaaagaccagaaggcggcggagagccacgcaagagaagaaggacgtgcgctcagcttcgctcgcaccggttgttgaacttgggcgagcgcgagccgcggctgccgggcgccccctccccctagcagcggaggaggggacaagtcgtcggagtccgggcggccaagacccgccgccggccggccactgcagggtccgcactgatccgctccgcggggagagccgctgctctgggaagtgagttcgcctgcggactccgaggaaccgctgcgcccgaagagcgctcagtgagtgaccgcgacttttcaaagccgggtagcgcgcgcgagtcgacaagtaagagtgcgggaggcatcttaattaaccctgcgctccctggagcgagctggtgaggagggcgcagcggggacgacagccagcgggtgcgtgcgctcttagagaaactttccctgtcaaaggctccggggggcgcgggtgtcccccgcttgccagagccctgttgcggccccgaaacttgtgcgcgcacgccaaactaacctcacgtgaagtgacggactgttctatgactgcaaagatggaaacgaccttctatgacgatgccctcaacgcctcgttcctcccgtccgagagcggaccttatggctacagtaaccccaagatcctgaaacagagcatgaccctgaacctggccgacccagtggggagcctgaagccgcacctccgcgccaagaactcggacctcctcacctcgcccgacgtggggctgctcaagctggcgtcgcccgagctggagcgcctgataatccagtccagcaacgggcacatcaccaccacgccgacccccacccagttcctgtgccccaagaacgtgacagatgagcaggaggggttcgccgagggcttcgtgcgcgccctggccgaactgcacagccagaacacgctgcccagcgtcacgtcggcggcgcagccggtcaacggggcaggcatggtggctcccgcggtagcctcggtggcagggggcagcggcagcggcggcttcagcgccagcctgcacagcgagccgccggtctacgcaaacctcagcaacttcaacccaggcgcgctgagcagcggcggcggggcgccctcctacggcgcggccggcctggcctttcccgcgcaaccccagcagcagcagcagccgccgcaccacctgccccagcagatgcccgtgcagcacccgcggctgcaggccctgaaggaggagcctcagacagtgcccgagatgcccggcgagacaccgcccctgtcccccatcgacatggagtcccaggagcggatcaaggcggagaggaagcgcatgaggaaccgcatcgctgcctccaagtgccgaaaaaggaagctggagagaatcgcccggctggaggaaaaagtgaaaaccttgaaagctcagaactcggagctggcgtccacggccaacatgctcagggaacaggtggcacagcttaaacagaaagtcatgaaccacgttaacagtgggtgccaactcatgctaacgcagcagttgcaaacattttgaagagagaccgtcgggggctgaggggcaacgaagaaaaaaaataacacagagagacagacttgagaacttgacaagttgcgacggagagaaaaaagaagtgtccgagaactaaagccaagggtatccaagttggactgggttcggtctgacggcgcccccagtgtgcacgagtgggaaggacttggtcgcgccctcccttggcgtggagccagggagcggccgcctgcgggctgccccgctttgcggacgggctgtccccgcgcgaacggaacgttggactttcgttaacattgaccaagaactgcatggacctaacattcgatctcattcagtattaaaggggggagggggagggggttacaaactgcaatagagactgtagattgcttctgtagtactccttaagaacacaaagcggggggagggttggggaggggcggcaggagggaggtttgtgagagcgaggctgagcctacagatgaactctttctggcctgctttcgttaactgtgtatgtacatatatatattttttaatttgattaaagctgattactgtcaataaacagcttcatgcctttgtaagttatttcttgtttgtttgtttgggtatcctgcccagtgttgtttgtaaataagagatttggagcactctgagtttaccatttgtaataaagtatataatttttttatgttttgtttctgaaaattccagaaaggatatttaagaaaatacaataaactattggaaagtactcccctaacctcttttctgcatcatctgtagatcctagtctatctaggtggagttgaaagagttaagaatgctcgataaaatcactctcagtgcttcttactattaagcagtaaaaactgttctctattagacttagaaataaatgtacctgatgtacctgatgctatgtcaggcttcatactccacgctcccccagcgtatctatatggaattgcttaccaaaggctagtgcgatgtttcaggaggctggaggaaggggggttgcagtggagagggacagcccactgagaagtcaaacatttcaaagtttggattgcatcaagtggcatgtgctgtgaccatttataatgttagaaattttacaataggtgcttattctcaaagcaggaattggtggcagattttacaaaagatgtatccttccaatttggaatcttctctttgacaattcctagataaaaagatggcctttgtcttatgaatatttataacagcattctgtcacaataaatgtattcaaataccaataacagatcttgaattgcttccctttactacttttttgttcccaagttatatactgaagtttttatttttagttgctgaggtt

SEQ ID NO: 9496 - protein, 331 aa, Homo sapiens
  ref <308>: DATABASE ACCESSION NUMBER: SWISS-Prot / AAA59197
  ref <309>: DATABASE ENTRY DATE: 2002-06-15
MTAKMETTFYDDALNASFLPSESGPYGYSNPKILKQSMTLNLADPVGSLKPHLRAKNSDLLTSPDVGLLKLASPELERLIIQSSNGHITTTPTPTQFLCPKNVTDEQEGFAEGFVRALAELHSQNTLPSVTSAAQPVNGAGMVAPAVASVAGGSGSGGFSASLHSEPPVYANLSNFNPGALSSGGGAPSYGAAGLAFPAQPQQQQQPPHHLPQQMPVQHPRLQALKEEPQTVPEMPGETPPLSPIDMESQERIKAERKRMRNRIAASKCRKRKLERIARLEEKVKTLKAQNSELASTANMLREQVAQLKQKVMNHVNSGCQLMLTQQLQTF

SEQ ID NO: 9497 - DNA, 2573 bp, Rattus norvegicus; identical to SEQ ID NO: 9493
  ref <308>: DATABASE ACCESSION NUMBER: EMBL / X17163
  ref <309>: DATABASE ENTRY DATE: 1993-09-12

SEQ ID NO: 9498 - protein, 334 aa, Rattus norvegicus; identical to SEQ ID NO: 9494
  ref <308>: DATABASE ACCESSION NUMBER: SWISS-Prot / CAA35041
  ref <309>: DATABASE ENTRY DATE: 2002-06-15

SEQ ID NO: 9499 - DNA, 3321 bp, Homo sapiens
gacatcatgggctatttttaggggttgactggtagcagataagtgttgagctcgggctggataagggctcagagttgcactgagtgtggctgaagcagcgaggcgggagtggaggtgcgcggagtcaggcagacagacagacacagccagccagccaggtcggcagtatagtccgaactgcaaatcttattttcttttcaccttctctctaactgcccagagctagcgcctgtggctcccgggctggtgtttcgggagtgtccagagagcctggtctccagccgcccccgggaggagagccctgctgcccaggcgctgttgacagcggcggaaagcagcggtacccacgcgcccgccgggggaagtcggcgagcggctgcagcagcaaagaactttcccggctgggaggaccggagacaagtggcagagtcccggagccaacttttgcaagcctttcctgcgtcttaggcttctccacggcggtaaagaccagaaggcggcggagagccacgcaagagaagaaggacgtgcgctcagcttcgctcgcaccggttgttgaacttgggcgagcgcgagccgcggctgccgggcgccccctccccctagcagcggaggaggggacaagtcgtcggagtccgggcggccaagacccgccgccggccggccactgcagggtccgcactgatccgctccgcggggagagccgctgctctgggaagtgagttcgcctgcggactccgaggaaccgctgcgcacgaagagcgctcagtgagtgaccgcgacttttcaaagccgggtagcgcgcgcgagtcgacaagtaagagtgcgggaggcatcttaattaaccctgcgctccctggagcgagctggtgaggagggcgcagcggggacgacagccagcgggtgcgtgcgctcttagagaaactttccctgtcaaaggctccggggggcgcgggtgtcccccgcttgccacagccctgttgcggccccgaaacttgtgcgcgcagcccaaactaacctcacgtgaagtgacggactgttctatgactgcaaagatggaaacgaccttctatgacgatgccctcaacgcctcgttcctcccgtccgagagcggaccttatggctacagtaaccccaagatcctgaaacagagcatgaccctgaacctggccgacccagtggggagcctgaagccgcacctccgcgccaagaactcggacctcctcacctcgcccgacgtggggctgctcaagctggcgtcgcccgagctggagcgcctgataatccagtccagcaacgggcacatcaccaccacgccgacccccacccagttcctgtgccccaagaacgtgacagatgagcaggagggcttcgccgagggcttcgtgcgcgccctggccgaactgcacagccagaacacgctgcccagcgtcacgtcggcggcgcagccggtcaacggggcaggcatggtggctcccgcggtagcctcggtggcagggggcagcggcagcggcggcttcagcgccagcctgcacagcgagccgccggtctacgcaaacctcagcaacttcaacccaggcgcgctgagcagcggcggcggggcgccctcctacggcgcggccggcctggcctttcccgcgcaaccccagcagcagcagcagccgccgcaccacctgccccagcagatgcccgtgcagcacccgcggctgcaggccctgaaggaggagcctcagacagtgcccgagatgcccggcgagacaccgcccctgtcccccatcgacatggagtcccaggagcggatcaaggcggagaggaagcgcatgaggaaccgcatcgctgcctccaagtgccgaaaaaggaagctggagagaatcgcccggctggaggaaaaagtgaaaaccttgaaagctcagaactcggagctggcgtccacggccaacatgctcagggaacaggtggcacagcttaaacagaaagtcatgaaccacgttaacagtgggtgccaactcatgctaacgcagcagttgcaaacattttgaagagagaccgtcgggggctgaggggcaacgaagaaaaaaaataacacagagagacagacttgagaacttgacaagttgcgacggagagaaaaaagaagtgtccgagaactaaagccaagggtatccaagttggactgggttgcgtcctgacggcgcccccagtgtgcacgagtgggaaggacttggcgcgccctcccttggcgtggagccagggagcggccgcctgcgggctgccccgctttgcggacgggctgtccccgcgcgaacggaacgttggacttttcgttaacattgaccaagaactgcatggacctaacattcgatctcattcagtattaaaggggggagggggagggggttacaaactgcaatagagactgtagattgcttctgtagtactccttaagaacacaaagcggggggagggttggggaggggcggcaggagggaggtttgtgagagcgaggctgagcctacagatgaactctttctggcctgccttcgttaactgtgtatgtacatatatatattttttaatttgatgaaagctgattactgtcaataaacagcttcatgcctttgtaagttatttcttgtttgtttgtttgggtatcctgcccagtgttgtttgtaaataagagatttggagcactctgagtttaccatttgtaataaagtatataatttttttatgttttgtttctgaaaattccagaaaggatatttaagaaaatacaataaactattggaaagtactcccctaacctcttttctgcatcatctgtagatactagctatctaggtggagttgaaagagttaagaatgtcgattaaaatcactctcagtgcttcttactattaagcagtaaaaactgttctctattagactttagaaataaatgtacctgatgtacctgatgctatggtcaggttatactcctcctcccccagctatctatatggaattgcttaccaaaggatagtgcgatgtttcaggaggctggaggaaggggggttgcagtggagagggacagcccactgagaagtcaaacatttcaaagtttggattgtatcaagtggcatgtgctgtgaccatttataatgttagtagaaattttacaataggtgcttattctcaaagcaggaattggtggcagattttacaaaagatgtatccttccaatttggaatcttctctttgacaattcctagataaaaagatggcctttgcttatgaatatttataacagcattcttgtcacaataaatgtattcaaatacc

SEQ ID NO: 9500 - protein, 331 aa, Homo sapiens; identical to SEQ ID NO: 9496

SEQ ID NO: 9501 - DNA, 3330 bp, Rattus norvegicus
  misc_feature (1)..(3330): n=a, c, g or t
  ref <308>: DATABASE ACCESSION NUMBER: EMBL / X51529
  ref <309>: DATABASE ENTRY DATE: 1992-05-11
tgtgatggaatgaatgactgacacgtgaattaagcagcgtacagaaccagcgttccctttcctatcccccaaagtnacagtttatcagaagaaagaaacatcccagactttcaaacactcattccctcccctgtatacagtccttccatgctcctggaagtggctgccaggaggctgcaggcggtcacacccagatgggcttttggaaagttctccagtcaggagctgcaccctgtttctcatcaaccgaatgaactttcgaaatcagctaaagtttatgatggccacaacccatggtatgagggcttttccggccctcaaggctgttctgccagctgttggggggaaaaggggaaattacccagggcgttgggtatgcccgtctgtgaatccattatttggccacacccacctccccatccctgtggctctccgatccccagccctgcagagggaagagctatttaagagcattgggagtacaggaaaaacaaggcaggcccttgaacaagaagccataccaccatcccatccaagaggtacatgcccagaaactcctgccctttggatgcatttgagtgattgtgcatgtgagcatgtgtgtgtgtatggacgtgcctgtggatgtgaattcccatcaggtaaacatgtacaagaccgcattcctgggcaagtatcttatatgggattgtgagagtgctgggggagaatttgagaatgtgtgtgtttacatgtcatccgtcgtgggttagaaaggaggcatcatatgtataaatatgtaatcgtcacaggcttacaagggcagcatgtgtgcatgtcatttgcatagtgttagaatagaaaggcatcatgtatgtatacacgtagtgggcagagtcagaaaggcttgcaaagagaatgtgcagttttagttggagaggagactgtcaggatcggaccctgtggatggaattcctaagccttgaatctaacttgaggatgtaggtgaagtatatagtggaggcagacattgccttcaacccctccaccccaattctgcagaacgagtcccaggaggactagaggaagtgcaggggtggtcccatcaccacatcattcctgtgtgagggacagttccacggagccaggagggacaagaggtgacattcgaaatgcacggtcggaagccactctgtgtgtactctgtgacttagccccatgcaagtgcacatctgtgctctgggattgctaagtcagacagctgagcaggggctgggtaaagggtaagctgtcctggaaggaagtgaccaggctgtgtgtacctgtccttcacagagctgacagcatgaaggtcctcctgttgctagcagttgtgatcatggcctttggtaagagtggaccctgaactcagcacaatgagagaggtaacctgaggagggaggcaccctatcccctggctttccttcctgtgggcctggccctctcttagtgtgaggaggaagaagccatttgtggggagagaaagtagcagagagatgccatgtggagttggggcacagaggttcaccacccttgaccagcttatttccccatttcctttcaggctcaattcaggtccaggggagccttctggagtttgggcaaatgattctgtttaagacaggaaagagagctgatgttagctatggcttctacggttgccattgtggtgtgggtggcagaggatcccccaaggatgccacagattggtaagaccaccccagtccccctatcctctgtcactccagctggacgggactaagagggagctggtactcactacctcagtgtcccaccgaatcccagccagccgatgttagcagattgggagctctgccctggaccactctaaagttcttgagtctctgctcagaaccaaaggtcaaaggaagtgctggggtaccaggactcaagggccgtgagaaggcagcctcagtaaggtctgtcctccaaccaggtgctgtgtgactcatgactgttgttacaaccgtctggagaaacgtggatgtggcacaaagtttctgacctacaagttctcctaccgagggggccaaatctcctgctctagtaagataccctgagatacctgcccgctttcttcacgggggtgttgagcacacacatgcatgctgggaactttactggtgcaggcttacttacacaagcaggcctgttagcaggacagcagggccaaagatgtagctcagctggctgggtgctagcctagcatacgtgagggcctgggttccaccctcagcagtgtatgaaatgcacaaaatttggcatgacctgaatcccagtgctcatgtgcaggcaggaggatcagaagttcaaggccatcttcagctacttagagaactcaaaggcagcctaagctataaagaccctgtcccctcacccctcgtccctcgcccctcgctcctcccccttccccctctccctcccctcccccccaaaaaaaccctagaagagggtggctagggatcgaggcaaacctctggcagcgccatgtgtggccactgtgtgtccccatcagatggtcagatggggttctgccttcccaggaagcagacagttccccacgagcagccatgagacagtagccatcagctctgtgtccgtttccccctaattgcagcaaaccaggactcctgccggaaacagctgtgccagtgcgataaagctgccgctgaatgttttgcccggaacaagaaaagctacagtttaaagtaccagttctacctcaacaagttttgcaaagggaagacgcccagttgctgaaagagccatcttctgaaacatccagacatcctctaacacctctcctagcccaaccaagttccccagtgatcaagaaaacacccctctccaaccctagaagcaggcgggcccttctgtcttcacccagaaggagccgctgaagcctgatctttccccaacactccacagccttggatccgcccactttcacttttcccttggcatccaacttcctgctgcgtagtacctaagagagtcctgagaggctctcgcaagtaaagcaattcatcaacaaccacgtgtgtgttctcataactcgaaacgagacagatataaaatatgcatgctcaaagtataggccttgaggctggggaggtggctcagtccataaagtgcttgccaaaaaaaaaaaaaaacaaaaaaaacaaaaacacgagggcctatgttcaacccccagaacccagggacatcaagggcattcttgtttgcaatcctagagttggggaaagaaagaaagtggacccctggggctcaatggccagccaggctagc

SEQ ID NO: 9502 - protein, 146 aa, Rattus norvegicus
  ref <308>: DATABASE ACCESSION NUMBER: SWISS-Prot / CAA35909
  ref <309>: DATABASE ENTRY DATE: 2002-06-15
MKVLLLLAVVIMAFGSIQVQGSLLEFGQMILFKTGKRADVSYGFYGCHCGVGGRGSPKDATDWCCVTHDCCYNRLEKRGCGTKFLTYKFSYRGGQISCSTNQDSCRKQLCQCDKAAAECFARNKKSYSLKYQFYPNKFCKGKTPSC

SEQ ID NO: 9503 - DNA, 997 bp, Homo sapiens
  ref <308>: DATABASE ACCESSION NUMBER: Refseq / NM_000300
  ref <309>: DATABASE ENTRY DATE: 2002-11-05
gaaggaaaaagagcaacagatccagggagcattcacctgccctgtctccaaacagccttgtgcctcacctacccccaacctcccagagggagcagctatttaaggggagcaggagtgcagaacaaacaagacggcctggggatacaactctggagtcctctgagagagccaccaaggaggagcaggggagcgacggccggggcagaagttgagaccacccagcagaggagctaggccagtccatctgcatttgtcacccaagaactcttaccatgaagaccctcctactgttggcagtgatcatgatctttggcctactgcaggcccatgggaatttggtgaatttccacagaatgatcaagttgacgacaggaaaggaagccgcactcagttatggcttctacggctgccactgtggcgtgggtggcagaggatcccccaaggatgcaacggatcgctgctgtgtcactcatgactgttgctacaaacgtctggagaaacgtggatgtggcaccaaatttctgagctacaagtttagcaactcggggagcagaatcacctgtgcaaaacaggactcctgcagaagtcaactgtgtgagtgtgataaggctgctgccacctgttttgctagaaacaagacgacctacaataaaaagtaccagtactattccaataaacactgcagagggagcacccctcgttgctgagtcccctcttccctggaaaccttccacccagtgctgaatttccctctctcataccctccctccctaccctaaccaagttccttggccatgcagaaagcatccctcacccatcctagaggccaggcaggagcccttctatacccacccagaatgagacatccagcagatttccagccttctactgctctcctccacctcaactccgtgcttaaccaaagaagctgtactccggggggtctcttctgaataaagcaattagcaaaaaaaaaaaaaaaaaaaaaaaaaaaaaa

SEQ ID NO: 9504 - protein, 144 aa, Homo sapiens
  ref <308>: DATABASE ACCESSION NUMBER: SWISS-Prot / P14555
  ref <309>: DATABASE ENTRY DATE: 2002-06-15
MKTLLLLAVIMIFGLLQAHGNLVNFHRMIKLTTGKEAALSYGFYGCHCGVGGRGSPKDATDRCCVTHDCCYKRLEKRGCGTKFLSYKFSNSGSRITCAKQDSCRSQLCECDKAAATCFARNKTTYNKKYQYYSNKHCRGSTPRC

SEQ ID NO: 9505 - DNA, 2376 bp, Rattus norvegicus
  ref <308>: DATABASE ACCESSION NUMBER: EMBL / X51615
  ref <309>: DATABASE ENTRY DATE: 1992-03-05
cgcggccgtccgctctcccaactcgcagccagtcggcgcgtcccgcctactgagcgcagcctccaccaggatccgcggggaccagctcgggatcagccggcgacccacttctgaccaacccaggagcggcccgatacccactcccgaccaacccgcgaccgacccagggacccactccggacctgctccttacaggggacagcgcctcgccgcttcccgccgcccagcgcccgcacgctcctcgggacacagtgccaaccatccagaggacaagatggattggggcacactacagagcatcctcgggggtgtcaacaagcactccaccagcattgggaaaatctggctcactgtcctcttcatcttccgcatcatgatcctcgtggtggccgcgaaggaggtgtggggagatgagcaagccgattttgtttgcaacactctccagcctggctgtaagaatgtgtgctacgaccactacttccccatctctcacatccggctctgggctctgcagctgatcatggtgtccacgccggccctcctggtagctatgcacgtggcctaccggagacacgaaaagaaacggaagttcatgaagggagagataaagaacgagtttaaggacatcgaagagatcaaaacccagaaggtccgtatcgaagggtccctgtggtggacctacaccaccagcatcttcttccgggtcatcttcgaagctgtcttcatgtatgtcttttacatcatgtacaatggcttcttcatgcagcgtctggtgaagtgtaacgcctggccttgtcccaatacagtggactgcttcatttccaggcccacagaaaagactgtcttcacggtgttcatgatctctgtgtctggaatttgcatcctgctaaacatcacagagctgtgctatctgttcattaggtattgctcagggaagtccaaaagaccagtctaatgcattgcctggctgttaagcaaagatgagggagaggatgaggcaacctgtgcttagttatcagagttcagctaccagcatctcccgggcaaacattcccaccttaaatgccgccatttgaagtcccccgcaggcctcccatgaaactccagaagcctccatgggcctcccttcccccaaagctcccaaacaaaggcccaattctatgcctgtattaatgggttctaaagttagttagaccccgtgctggtgtgactatgctttaggatacattcacagtttaaacaaagggatctcacattgtttctcttcctctgaggacaggagacatgagcccagtcctgaggaaggtacagagaaagttccttcttccgggtccccttccccaagttgcccccagttaagggtaaagaatcttcgttctgttattttctttcatagtttaagtttgcaacaatggacaaaagctatttaatgttcaagctagctgtgtccttttttttttttttaaatgaaaaccttaaaatgataggttcttttgttcttaaaatgatctggaaagcattatacattcctcctatttcagaggttcggtttgtgatgtgagcatggtgtataaccagatctcacaaggtctttaaaacgttggccttttggttatgggaaacctgggctgtggctgagagcccacctactgtattcatccttaggtgtgctgagtacagcccgcaacaacgttacagcctgtctcaaatgagacaaactggaagcttctcgtgttagcttctgacaagaagaggccttgattaaaattttcaaccgtaattttgtgtaagaggcagataggttatgcctacaactgccccctgccatgagcctaactcagcccccctccacccccagctcgtctactctgtagctgtgggatgtggcagtcagtatcaaaagacttcatgagtttgcttgggaatttcactgccatggtacaatttaatggtgcagaaacaagatggggtggttttcaaagaaccgatgaaacttctagactctaaatcctgttgattaaaactgagtttttctactttgaatgtctgtttgcctcccttttcagcattgccttctaaactggaaacagaaatgttgatatttggaaaaaatagaagaaactagtttaggtcaatgtgtaacttttctaggacaagttgaaccttagcattgtcattctgcctgatgtgttgtccacaagatgacagtcaacaaatccaacaggggacacttcttcctgccaagaatgtcgttgggaagccattctgtaacaataaataagagttgtggtttaaagtctacactattttacctaatgaagaacttattgctgatgttcagaaattcgacattgaaaggtgttttgccaatacggg

SEQ ID NO: 9506 - protein, 261 aa, Rattus norvegicus
  ref <308>: DATABASE ACCESSION NUMBER: SWISS-Prot / AAD50911
  ref <309>: DATABASE ENTRY DATE: 2002-10-01
MDWGTLHTVIGGVNKHSTSIGKVWITVIFIFRVMILVVAAQEVWGDEQEDFVCNTLQPGCKNVCYDHFFPVSHIRLWALQLTFVSTSALLVAMHVAYYRHETARKFIRGEKRNEFKDLEDIKRQKVRIEGSLWWTYTSSIFFRIIFEAAFMYVFYFLYNGYHLPWVLKCGIDPCPNLVDCFISRPTEKTVFTVFMISASVICMLLNVAELCYLLLKLCFRRSKRTQAQRNHPNHALKESKQNEMNELISDSGQNAITSFPS

SEQ ID NO: 9507 - DNA, 671 bp, Rattus norvegicus
  ref <308>: DATABASE ACCESSION NUMBER: EMBL / X51706
  ref <309>: DATABASE ENTRY DATE: 1993-09-12
ccgagaatgaagaccattctcagcaatcagactgtcgacattccagaaaatgtcgacatcactctgaaggggcgcacagtcattgtgaagggccccagaggaactctgaggagggacttcaatcacatcaatgtagagctgagtcttcttggaaagaaaaagaaaaggctccgtgttgacaagtggtggggtaacaggaaggaactggccactgtcagaaccatctgcagtcatgttcagaacatgatcaagggtgtgacactgggcttccgttacaagatgaggtctgtgtatgctcacttccctatcaacgtcgttattcaggagaatgggtctctggttgaaatccgaaatttcttgggtgaaaaatacatccggagggttcggatgaggacaggtgttgcttgttctgtctctcaagcccagaaggatgagttaatccttgaaggaaatgatattgaacttgtttcaaattcagcggctctgattcagcaagccacaacagttaaaaacaaggatatcaggaagtttttggatggcatctatgtttctgagaagggaaccgtccagcagcctgacgaatgagacctcagtttcctagcttcagaaacaagatcctgataacaagtacagtttgggctctgtggaaacaataaaagacttatatattg

SEQ ID NO: 9508 - protein, 192 aa, Rattus norvegicus
  ref <308>: DATABASE ACCESSION NUMBER: SWISS-Prot / CAA36002
  ref <309>: DATABASE ENTRY DATE: 1994-06-01
MKTILSNQTVDIPENVDITLKGRTVIVKGPRGTLRRDFNHINVELSLLGKKKKRLRVDKWWGNRKELATVRTICSHVQNMIKGVTLGFRYKMRSVYAHFPINVVIQENGSLVEIRNFLGEKYIRRVRMRTGVACSVSQAQKDELILEGNDIELVSNSAALIQQATTVKNKDIRKFLDGIYVSEKGTVQQPDE

SEQ ID NO: 9509 - DNA, 671 bp, Rattus norvegicus; identical to SEQ ID NO: 9507
  ref <308>: DATABASE ACCESSION NUMBER: EMBL / X51706
  ref <309>: DATABASE ENTRY DATE: 1993-09-12

SEQ ID NO: 9510 - protein, 192 aa, Rattus norvegicus; identical to SEQ ID NO: 9508
  ref <308>: DATABASE ACCESSION NUMBER: SWISS-Prot / CAA36002
  ref <309>: DATABASE ENTRY DATE: 1994-06-01

SEQ ID NO: 9511 - DNA, 3987 bp, Rattus norvegicus
  ref <308>: DATABASE ACCESSION NUMBER: EMBL / X52140
  ref <309>: DATABASE ENTRY DATE: 1995-03-23
agtatggagagaaggtcgtttaaaaaggcagatgtccctttaaggtttgctttgctgctgcccgtggactttagcctaaacagggtcccgcgaagttggctttatttgtccatgtctcggacacagcctgggtagctgccagtgagatttcagggacggagcgcgcaaaggggggggaaatgtggcaatccatctgggatgtgagacgcgtggagagggcttagcagcatttgaccaaaacacaggaaatcactcctccacagctcctgggcgcagcagcggctggggccactgccggacaccctcggagaccacacgagtgacccagagcgcaagtcgccagcgtcccggttctgcctgttcctgccagctcctgcccacgaaccggcacgtagctggttccagcagccgctccagcaatggtccccaggcgtcctgccagcctagaggtcactgtagcctgcatatggcttctcacggtcatcctaggcttctgcgtctccttcaatgttgatgtgaaaaactcaatgagtttcagtggcccagtagaggacatgtttggatacactgttcaacaatatgaaaacgaagaaggcaaatgggttcttattggttctcctttagttggccaacccaaagcaagaactggagatgtctataagtgtccggttgggagagagagagcaatgccttgcgtgaagttggacttgccagttaacacatcgatccccaatgtcacagaaataaaggaaaacatgacatttggatcaactttagtcaccaacccgaatggaggatttctggcatgtgggcccttgtatgcctatagatgtggacatttgcattatacaactggaatatgttctgatgtcagtcctacatttcaagttgtgaactcctttgcccctgtacaagaatgcagcacccagctggacatagtcatcgtcctggatggctccaacagcatctacccctgggaaagtgtcatcgcctttttaaacgaccttcttaagaggatggatattggccctaagcagacacaggtcgggattgtacagtatggagagaatgtaacccatgagttcaacctcaataagtattcatccacagaagaggtccttgtcgcagcaaacaaaataggccgacagggaggcctccaaacgatgacagcccttggaatagacacagccaggaaagaggcattcactgaagctcggggtgccaggaggggagttaaaaaagtcatggttattgtgaccgacggagaatcgcatgacaactatcgcctgaaacaggtcatccaagactgcgaggacgaaaacattcagcgattttccatagctatccttggccactataacagggggaacttaagcactgaaaaatttgtggaggaaataaaatcgatcgcaagcgagcccacggaaaagcacttcttcaatgtctcggatgagttggccctggtcactattgttaaagctctgggagaaaggatattcgctttggaagcgacagctgaccagtcagcagcttcatttgagatggaaatgtctcagactggcttcagtgctcactactcccaggactgggtcatgcttggagcggtgggagcctatgactggaacggaactgtggtcatgcagaaggctaaccagatggtcatccctcataacaccacctttcaaactgagcccgccaagatgaacgagcctctggcttcttatttaggttacacagtgaactcggccaccatccctggagatgtgctctacatcgctgggcagcctcggtacaatcatacgggccaggtcgtcatctacaagatggaggatgggaacatcaacattctgcagacactcggcggagagcagattggttcctactttggtagtgtcttaacaacaattgacatcgacaaagattcttatactgatctgcttctcgtcggggcccccatgtacatggggacagagaaagaggaacagggcaaggtgtacgtgtacgctgtgaatcagacaaggtttgaatatcaaatgagcctggaaccaattaggcagacctgctgctcatccctgaaggataattcatgcacgaaagaaaacaagaatgagccctgcggggcccgcttcggaacagcaattgctgctgtaaaagacctcaacgtggatggatttaatgacgtcgtgattggagctccgctggaagatgaccacgcaggagctgtgtacatttatcatggcagtggcaagaccataagggaggcgtatgcacaacgcattccatcaggtggggatggcaagaccctgaaatttttcggccagtctatccacggagagatggatttaaatggtgacggtctgactgacgtgaccattggaggccttggtggagcagccctcttctgggccagagatgtggctgtagttaaagtgaccatgaattttgaacccaataaagtgaatattcaaaagaaaaactgccgtgtggagggcaaagaaacagtgtgcataaatgctacaatgtgttttcatgtgaaattaaagtctaaagaggactcaatttacgaggctgatctgcagtaccgtgtcacccttgattcactgaggcagatatcacggagctttttttctggaactcaggaaaggaagattcaaagaaatatcaccgttcgagaatcagaatgcatcaggcactccttctacatgttggacaaacatgactttcaggactctgtgagagtgactctggattttaatctcactgatccagaaaatggtcctgtacttgatgacgctctgccaaactcagtccacgaacacattccctttgccaaagactgtggaaacaaggaaagatgcatttcagacctcactctgaatgtgtccaccacagaaaagagcctgctgatcgtcaagtcccagcatgacaagttcaacgttagcctcaccgtcaaaaacaaaggagacagtgcgtacaacaccaggacagtggtgcagcattcaccaaatctgattttttcgggaattgaggagatccaaaaagatagctgtgaatctaatcaaaatatcacttgcagagttggatatcctttcctaagagcaggagaaacggttaccttcaaaataatattccagtttaacacatcccatctctcggaaaatgcaatcattcacttaagtgcaacaagtgacagtgaggagcccctggaatctcttaatgataatgaagtaaatatttccatcccagtaaaatatgaagttggactgcagttttacagttctgcgagtgaacatcacatttcagtcgctgccaatgagacgatccctgagtttattaactccactgaggacattgggaatgaaattaatgtcttctatacgattagaaagagggggcatttcccaatgccagaacttcagctgtcaatttcattccccaatttgacggcagatggttatcctgtactgtacccaattggatggtcatcttcagataatgtgaactgtagaccccggagccttgaggacccctttggcatcaactctgggaagaaaatgacaatatcgaagtctgaggttctcaaaagaggcacaatccaggactgcagtagtacgtgtggagttgccaccatcacgtgtagcctccttccttccgacctgagtcaagtgaatgtctcgctcctcctgtggaaaccgactttcataagagcacatttttccagcttaaaccttactctaagaggagaacttaagagtgaaaattcatcgctgactttaagtagcagcaaccggaagcgagagctggctattcagatatccaaagacgggctcccaggcagagtgccgctgtgggttatcctcctgagcgccttcgcggggctactgctgctaatgctccttatattggctctgtggaagattggattcttcaaaaggccactgaagaagaaaatggagaaatgaaaggtttcatagaaaaaaaaaaaaa

SEQ ID NO: 9512 - protein, 1180 aa, Rattus norvegicus
  ref <308>: DATABASE ACCESSION NUMBER: SWISS-Prot / P18614
  ref <309>: DATABASE ENTRY DATE: 2002-06-15
MVPRRPASLEVTVACIWLLTVILGFCVSFNVDVKNSMSFSGPVEDMFGYTVQQYENEEGKWVLIGSPLVGQPKARTGDVYKCPVGRERAMPCVKLDLPVNTSIPNVTEIKENMTFGSTLVTNPNGGFLACGPLYAYRCGHLHYTTGICSDVSPTFQVVNSFAPVQECSTQLDIVIVLDGSNSIYPWESVIAFLNDLLKRMDIGPKQTQVGIVQYGENVTHEFNLNKYSSTEEVLVAANKIGRQGGLQTMTALGIDTARKEAFTEARGARRGVKKVMVIVTDGESHDNYRLKQVIQDCEDENIQRFSIAILGHYNRGNLSTEKFVEEIKSIASEPTEKHFFNVSDELALVTIVKALGERIFALEATADQSAASFEMEMSQTGFSAHYSQDWVMLGAVGAYDWNGTVVMQKANQMVIPHNTTFQTEPAKMNEPLASYLGYTVNSATIPGDVLYIAGQPRYNHTGQVVIYKMEDGNINILQTLGGEQIGSYFGSVLTTIDIDKDSYTDLLLVGAPMYMGTEKEEQGKVYVYAVNQTRFEYQMSLEPIRQTCCSSLKDNSCTKENKNEPCGARFGTAIAAVKDLNVDGFNDVVIGAPLEDDHAGAVYIYHGSGKTIREAYAQRIPSGGDGKTLKFFGQSIHGEMDLNGDGLTDVTIGGLGGAALFWARDVAVVKVTMNFEPNKVNIQKKNCRVEGKETVCINATMCFHVKLKSKEDSIYEADLQYRVTLDSLRQISRSFFSGTQERKIQRNITVRESECIRHSFYMLDKHDFQDSVRVTLDFNLTDPENGPVLDDALPNSVHEHIPFAKDCGNKERCISDLTLNVSTTEKSLLIVKSQHDKFNVSLTVKNKGDSAYNTRTVVQHSPNLIFSGIEEIQKDSCESNQNITCRVGYPFLRAGETVTFKIIFQFNTSHLSENAIIHLSATSDSEEPLESLNDNEVNISIPVKYEVGLQFYSSASEHHISVAANETIPEFINSTEDIGNEINVFYTIRKRGHFPMPELQLSISFPNLTADGYPVLYPIGWSSSDNVNCRPRSLEDPFGINSGKKMTISKSEVLKRGTIQDCSSTCGVATITCSLLPSDLSQVNVSLLLWKPTFIRAHFSSLNLTLRGELKSENSSLTLSSSNRKRELAIQISKDGLPGRVPLWVILLSAFAGLLLLMLLILALWKIGFFKRPLKKKMEK

SEQ ID NO: 9513 - DNA, 4986 bp, Homo sapiens
  ref <308>: DATABASE ACCESSION NUMBER: Refseq / NM_012211
  ref <309>: DATABASE ENTRY DATE: 2002-04-04
aggaggctgccgctctggcttgccgccccccgccgccgctgcacaccggacccagccgccgtgccgcgggccatggacctgcccaggggcctggtggtggcctgggcgctcagcctgtggccagggttcacggacaccttcaacatggacaccaggaagccccgggtcatccctggctccaggaccgccttctttggctacacagtgcagcagcacgacatcagtggcaataagtggctggtcgtgggcgccccactggaaaccaatggctaccagaagacgggagacgtgtacaagtgtccagtgatccacgggaactgcaccaaactcaacctgggaagggtcaccctgtccaacgtgtccgagcggaaagacaacatgcgcctcggccttagtctcgccaccaaccccaaggacaacagcttcctggcctgcagccccctctggtctcatgagtgtgggagctcctactacaccacagggatgtgttcaagagtcaactccaacttcaggttctccaagaccgtggccccagctctccaaaggtgccagacctacatggacatcgtcattgtcctggatggctccaacagcatctacccctgggtggaggttcagcacttcctcatcaacatcctgaaaaagttttacattggcccagggcagatccaggttggagttgtgcagtatggcgaagatgtggtgcatgagtttcacctcaatgactacaggtctgtaaaagatgtggtggaagctgccagccacattgagcagagaggaggaacagagacccggacggcatttggcattgaatttgcacgctcagaggctttccagaagggtggaaggaaaggagccaagaaggtgatgattgtcatcacagatggggagtcccacgacagcccagacctggagaaggtgatccagcaaagcgaaagagacaacgtaacaagatatgcggtggccgtcctgggctactacaaccgcagggggatcaatccagaaacttttctaaatgaaatcaaatacatcgccagtgaccctgatgacaagcacttcttcaatgtcactgatgaggctgccttgaaggacattgtcgatgccctgggggacagaatcttcagcctggaaggcaccaacaagaacgagacctcctttgggctggagatgtcacagacgggcttttcctcgcacgtggtggaggatggggttctgctgggagccgtcggtgcctatgactggaatggagctgtgctaaaggagacgagtgccgggaaggtcattcctctccgcgagtcctacctgaaagagttccccgaggagctcaagaaccatggtgcatacctggggtacacagtcacatcggtcgtgtcctccaggcaggggcgagtgtacgtggccggagccccccggttcaaccacacgggcaaggtcatcctgttcaccatgcacaacaaccggagcctcaccatccaccaggctatgcggggccagcagataggctcttactttgggagtgaaatcacctcggtggacatcgacggcgacggcgtgactgatgtcctgctggtgggcgcacccatgtacttcaacgagggccgtgagcgaggcaaggtgtacgtctatgagctgagacagaaccggtttgtttataacggaacgctaaaggattcacacagttaccagaatgcccgatttgggtcctccattgcctcagttcgagacctcaaccaggattcctacaatgacgtggtggtgggagcccccctggaggacaaccacgcaggagccatctacatcttccacggcttccgaggcagcatcctgaagacacctaagcagagaatcacagcctcagagctggctaccggcctccagtattttggctgcagcatccacgggcaattggacctcaatgaggatgggctcatcgacctggcagtgggagcccttggcaacgctgtgattctgtggtcccgcccagtggttcagatcaatgccagcctccactttgagccatccaagatcaacatcttccacagagactgcaagcgcagtggcagggatgccacctgcctggccgccttcctctgcttcacgcccatcttcctggcaccccatttccaaacaacaactgttggcatcagatacaacgccaccatggatgagaggcggtatacaccgagggcccacctggacgagggcggggaccgattcaccaacagagccgtactgctctcctccggccaggagctctgtgagcggatcaacttccatgtcctggacactgctgactacgtgaagccagtgaccttctcagtcgagtattccctggaggaccctgaccatggccccatgctggacgacggctggcccaccactctcagagtctcggtgcccttctggaacggctgcaatgaggatgagcactgtgtccctgaccttgtgttggatgcccggagtgacctgcccacggccatggagtactgccagagggtgctgaggaagcctgcgcaggactgctccgcatacacgctgtccttcgacaccacagtcttcatcatagagagcacacgccagcgagtggcggtggaggccacactggagaacaggggcgagaacgcctacagcacggtcctaaatatctcgcagtcagcaaacctgcagtttgccagcttgatccagaaggaggactcagacggtagcattgagtgtgtgaacgaggagaggaggctccagaagcaagtctgcaacgtcagctatcccttcttccgggccaaggccaaggtggctttccgtcttgattttgagttcagcaaatccatcttcctacaccacctggagatcgagctcgctgcaggcagtgacagtaatgagcgggacagcaccaaggaagacaacgtggcccccttacgcttccacctcaaatacgaggctgacgtcctcttcaccaggagcagcagcctgagccactacgaggtcaagctcaacagctcgctggagagatacgatggtatcgggcctcccttcagctgcatcttcaggatccagaacttgggcttgttccccatccacgggattatgatgaagatcaccattcccatcgccaccaggagcggcaaccgcctactgaagctgagggacttcctcacggacgaggtagcgaacacgtcctgtaacatctggggcaatagcactgagtaccggcccaccccagtggaggaagacttgcgtcgtgctccacagctgaatcacagcaactctgatgtcgtctccatcaactgcaatatacggctggtccccaaccaggaaatcaatttccatctactggggaacctgtggttgaggtccctaaaagcactcaagtacaaatccatgaaaatcatggtcaacgcagccttgcagaggcagttccacagccccttcatcttccgtgaggaggatcccagccgccagatcgtgtttgagatctccaagcaagaggactggcaggtccccatctggatcattgtaggcagcaccctggggggcctcctactgctggccctgctggtcctggcactgtggaagctcggcttctttagaagtgccaggcgcaggagggagcctggtctggaccccacccccaaagtgctggagtgaggctccagaggagactttgagttgatgggggccaggacaccagtccaggtagtgttgagacccaggcctgtggccccaccgagctggagcggagaggaagccagctggctttgcacttgacctcatctcccgagcaatggcgcctgctccctccagaatggaactcaagctggttttaagtggaactgccctactgggagactgggacacctttaacacagacccctagggatttaaagggacacccctacacacacccaggcccacgccaaggcctccctcaggctctgtggagggcatttgctgccccagctactaaggtgctaggaattcgtaatcatccccatcctccagagaaacccagggaggaagactgtaaatacgaacccaatctgcacactccaggcctctagttccagaaggatccaagacaaaacagatctgaattctgcccttttctctcacccatcccacccctccattggctcccaagtcacacccactcccttccccatagataggcccctggggctcccgaagaatgaacccaagagcaagggcttgatggtgacagctgcaagccagggatgaagaaagactctgagatgtggagactgatggccaggcaagtgggaccaggatactggacgctgtcctgagatgagaggtagccgggctctgcacccacgtgcattcacattgaccgcaactcacacattcccccaccagctgcagccccttgctctcagctgccaaccctcccgggtcacttttgttcccaggtacctcatgggaagcatgtggatgacacaatccctggggctgtgcattcccacgtcttcttgctgcagcctgcccctagacatggacgcaccggcctggctgcagctgggcagcaggggtaggggtagggagcctcccctccctgtatcaccccctccctacacacacacacacacacacacacacacactgcctcccatccttccctcatgcccgccagtgcacagggaagggcttggccagcgctgttgaggggtcccctctggaatgcactgaataaagcacgtgcaaggactcccggagcctgtgcagccttggtggcaaatatctcatctgccggcccccaggacaagtggtatgaccagtgataatgccccaaggacaaggggcgtgcctggcgcccagtggagtaatttatgccttagtcttgttttgaggtagaaatgcaagggggacacatgaaaggcatcagtccccctgtgcatagtacgacctttactgtcgtatttttgaaaaattaaaaatacagtgtttaaaaacaaaaaaaaaaaaaaaaaaaaa

SEQ ID NO: 9514 - protein, 1189 aa, Homo sapiens
  ref <308>: DATABASE ACCESSION NUMBER: SWISS-Prot / Q9UKX5
  ref <309>: DATABASE ENTRY DATE: 2002-06-15
MDLPRGLVVAWALSLWPGFTDTFNMDTRKPRVIPGSRTAFFGYTVQQHDISGNKWLVVGAPLETNGYQKTGDVYKCPVIHGNCTKLNLGRVTLSNVSERKDNMRLGLSLATNPKDNSFLACSPLWSHECGSSYYTTGMCSRVNSNFRFSKTVAPALQRCQTYMDIVIVLDGSNSIYPWVEVQHFLINILKKFYIGPGQIQVGVVQYGEDVVHEFHLNDYRSVKDVVEAASHIEQRGGTETRTAFGIEFARSEAFQKGGRKGAKKVMIVITDGESHDSPDLEKVIQQSERDNVTRYAVAVLGYYNRRGINPETFLNEIKYIASDPDDKHFFNVTDEAALKDIVDALGDRIFSLEGTNKNETSFGLEMSQTGFSSHVVEDGVLLGAVGAYDWNGAVLKETSAGKVIPLRESYLKEFPEELKNHGAYLGYTVTSVVSSRQGRVYVAGAPRFNHTGKVILFTMHNNRSLTIHQAMRGQQIGSYFGSEITSVDIDGDGVTDVLLVGAPMYFNEGRERGKVYVYELRQNRFVYNGTLKDSHSYQNARFGSSIASVRDLNQDSYNDVVVGAPLEDNHAGAIYIFHGFRGSILKTPKQRITASELATGLQYFGCSIHGQLDLNEDGLIDLAVGALGNAVILWSRPVVQINASLHFEPSKINIFHRDCKRSGRDATCLAAFLCFTPIFLAPHFQTTTVGIRYNATMDERRYTPRAHLDEGGDRFTNRAVLLSSGQELCERINFHVLDTADYVKPVTFSVEYSLEDPDHGPMLDDGWPTTLRVSVPFWNGCNEDEHCVPDLVLDARSDLPTAMEYCQRVLRKPAQDCSAYTLSFDTTVFIIESTRQRVAVEATLENRGENAYSTVLNISQSANLQFASLIQKEDSDGSIECVNEERRLQKQVCNVSYPFFRAKAKVAFRLDFEFSKSIFLHHLEIELAAGSDSNERDSTKEDNVAPLRFHLKYEADVLFTRSSSLSHYEVKLNSSLERYDGIGPPFSCIFRIQNLGLFPIHGIMMKITIPIATRSGNRLLKLRDFLTDEVANTSCNIWGNSTEYRPTPVEEDLRRAPQLNHSNSDVVSINCNIRLVPNQEINFHLLGNLWLRSLKALKYKSMKIMVNAALQRQFHSPFIFREEDPSRQIVFEISKQEDWQVPIWIIVGSTLGGLLLLALLVLALWKLGFFRSARRRREPGLDPTPKVLE

SEQ ID NO: 9515 - DNA, 3114 bp, Rattus norvegicus
  ref <308>: DATABASE ACCESSION NUMBER: EMBL / X52711
  ref <309>: DATABASE ENTRY DATE: 1993-09-12
caggagcttgcctgaccccagtggcaaggcttccagattcttctgaatcaaaccctttatgtccaaccgaatccacctggaaaacacgcaagagtgagttcctagaacgtcaaaatgaaggagcggacctctgcatgccgtcacgggacaccacagaaacatcctgatacctctgaagagagccaggcaatggagtctgtggataacctctgcagtcagtatgaggagaaggtgcggccctgcattgacctcatcgactccctgcgagctctgggtgtggagcaagacctggccctgcctgccatcgctgtcattggggaccagagttcagggaagagctctgtgctggaagcactgtctggagtggccctccccagaggcagtggtattgttaccaggtgtcctctggtgctgaaattgaagcaactgaagcagggagaaaaatggagcggcaaggtcatttataaggacaccgagattgagatctcacacccttcactggtagaaagggaaatcaataaagcccagaacttgattgctggggaagggttgaagattagctctgatctcattagcttggaggttagctctccacatgtcccagacctgactctgattgaccttcctggtatcacaagagtggctgtgggtgaccagcctgcagacatcgaacacaagatcaagagacttatcactgaatacatccagaaacaggagaccatcaacctggtggtggtccccagcaatgtggacattgccaccacagaggccctgaaaatggctcaggaggtggaccctcaaggggatagaaccatagggatcttgaccaagcccgatctggtggacagagggactgaagacaaggtcgtggatgtggtgcggaacctcgtgtgccacctgaagaagggctacatgatagtcaagtgcaggggtcagcaggacatccaggagcagctgagcctggctgaggctcttcagaaggagcaagtcttcttcaaggaacaccctcaattcagagttcttctcgaggatgggaaggccacagtgccctgcttggcaaagagactgaccatggagctcacctcccacatctgtaaatcgctgccaatattggaaaatcaaataaatgtgaatcatcagattgcgagtgaggagctgcagaagtacggagcagacataccagaagatgacagtaagaggctgtcctttctgatgaataaaatcaatgtcttcaataaggatatcctaagtttggtacaagcacaagaaaacatatcatgggaagaaagccggctgttcaccaaactgcgaaatgagtttcttgcttggaatgattatattgaggaacatttcaaaaaaaccctaggttcttctgagaaacacagccagatggaaaaatttgaaagtcattatcgtggccgggaactgccagggtttgtggactataaggcatttgagaacattatcaagaaggaagtcaaggccctggaagaacccgctctgaacatgctgcacagggtcactaccatggtcaaaaatgccttcacaaaggtttcatcaaacaattttggtgattttttaaacctccacagtactgccaagtccaaaattgaagacatcagatttaaccaagaaaaagaagccgaaaaactgatccgacttcacttccagatggaacacattgtctactgccaggaccaggcttacaagaaagccttgcaggagatcagagagaaggaagctgagaaagagaagtcaacctttggtgcctttcaacataactctcctcgaaaggagttgactaccactgagatgacccagcacctgaatgcctactaccaggagtgcggaaggaacattgggagacagatccctctgatcatccagtactccatcctgcaaacatttgggcaggaaatggagaaagcaatgcttcagcttctacaggacaccagtaagtgcaactggttcctgactgagcagagtgacagcagagagaagaagaagttcctgaagaggcggcttttaaggctggatgaggctcagcggaagcttgccaaattctccaattaatcaggcttgctatgtgacttccctggtcacagctagcgtcccctgcacaatgaccctttagctgtttaccttatgttagtatgttgcctttagactgtggaagcatgccctctgcaaactctgaggagacgaagagaggagccatggagagtcattctacttcagcagtaagacacgaccctctcaaagcacaggaggctggcacctctcagggtccttcctgctcctaactgccatttctttgtcaggaggatgtcctggctgagtacttcagaagggatgtctcctggctttgtactgctctgcctggagtagtgctagaggtgtgacagagtcctagcaggacagctctttgtaggcataaattttttgcaacctaattttagcaagggttcaacctcacttttagcccaccacccatcagaggtagtgggacagaaaagttattaggatatgggggaagtgctcagcaatagttctttgggggtgagctcaactttctttggcagcataacaaacaccaaataagactcagaagttgcagatcagtcctctaggcaggcagacaccaggcacgaaccagcagctgtagatcaatcttaaagaaagctcgccagccagcctgaggtaaggctgtggaagcagcaaacttcctcagcaacctcacaagtagttcttaggcaagtttcttctaatggtagtgttaccacaagttgagcccaacaatgctatgcaaggcaaaccattacatgcacgttgttagtgaagaataagtaggcagagcaaaccaacgctcagttgctcgtctcccagtgttttgtggggccgtatttatctccttcatcatgggtcctttcacatgtttgcaatattaaatcatcctttcacctgtgtccgcttcaggacaacagtctttcacaagtttgcttcagcaagacaccctttcacctgtgtgccccagcaaaacatcatttgacataactttctaaagaaactagaagtttccacttcaagttcttccaataaaattcttgctaaatg

SEQ ID NO: 9516 - protein, 652 aa, Rattus norvegicus
  ref <308>: DATABASE ACCESSION NUMBER: SWISS-Prot / P18588
  ref <309>: DATABASE ENTRY DATE: 1995-02-01
MKERTSACRHGTPQKHPDTSEESQAMESVDNLCSQYEEKVRPCIDLIDSLRALGVEQDLALPAIAVIGDQSSGKSSVLEALSGVALPRGSGIVTRCPLVLKLKQLKQGEKWSGKVIYKDTEIEISHPSLVEREINKAQNLIAGEGLKISSDLISLEVSSPHVPDLTLIDLPGITRVAVGDQPADIEHKIKRLITEYIQKQETINLVVVPSNVDIATTEALKMAQEVDPQGDRTIGILTKPDLVDRGTEDKVVDVVRNLVCHLKKGYMIVKCRGQQDIQEQLSLAEALQKEQVFFKEHPQFRVLLEDGKATVPCLAKRLTMELTSHICKSLPILENQINVNHQIASEELQKYGADIPEDDSKRLSFLMNKINVFNKDILSLVQAQENISWEESRLFTKLRNEFLAWNDYIEEHFKKTLGSSEKHSQMEKFESHYRGRELPGFVDYKAFENIIKKEVKALEEPALNMLHRVTTMVKNAFTKVSSNNFGDFLNLHSTAKSKIEDIRFNQEKEAEKLIRLHFQMEHIVYCQDQAYKKALQEIREKEAEKEKSTFGAFQHNSPRKELTTTEMTQHLNAYYQECGRNIGRQIPLIIQYSILQTFGQEMEKAMLQLLQDTSKCNWFLTEQSDSREKKKFLKRRLLRLDEAQRKLAKFSN

SEQ ID NO: 9517 - DNA, 2787 bp, Homo sapiens
  ref <308>: DATABASE ACCESSION NUMBER: Refseq / NM_002462
  ref <309>: DATABASE ENTRY DATE: 2002-02-04
agagcggaggccgcactccagcactgcgcagggaccgccttggaccgcagttgccggccaggaatcccagtgtcacggtggacacgcctccctcgcgcccttgccgcccacctgctcacccagctcaggggctttggaattctgtggccacactgcgaggagatcggttctgggtcggaggctacaggaagactcccactccctgaaatctggagtgaagaacgccgccatccagccaccattccaaggaggtgcaggagaacagctctgtgataccatttaacttgttgacattacttttatttgaaggaacgtatattagagcttactttgcaaagaaggaagatggttgtttccgaagtggacatcgcaaaagctgatccagctgctgcatcccaccctctattactgaatggagatgctactgtggcccagaaaaatccaggctcggtggctgagaacaacctgtgcagccagtatgaggagaaggtgcgcccctgcatcgacctcattgactccctgcgggctctaggtgtggagcaggacctggccctgccagccatcgccgtcatcggggaccagagctcgggcaagagctccgtgttggaggcactgtcaggagttgcccttcccagaggcagcgggatcgtgaccagatgcccgctggtgctgaaactgaagaaacttgtgaacgaagataagtggagaggcaaggtcagttaccaggactacgagattgagatttcggatgcttcagaggtagaaaaggaaattaataaagcccagaatgccatcgccggggaaggaatgggaatcagtcatgagctaatcaccctggagatcagctcccgagatgtcccggatctgactctaatagaccttcctggcataaccagagtggctgtgggcaatcagcctgctgacattgggtataagatcaagacactcatcaagaagtacatccagaggcaggagacaatcagcctggtggtggtccccagtaatgtggacatcgccaccacagaggctctcagcatggcccaggaggtggaccccgagggagacaggaccatcggaatcttgacgaagcctgatctggtggacaaaggaactgaagacaaggttgtggacgtggtgcggaacctcgtgttccacctgaagaagggttacatgattgtcaagtgccggggccagcaggagatccaggaccagctgagcctgtccgaagccctgcagagagagaagatcttctttgagaaccacccatatttcagggatctgctggaggaaggaaaggccacggttccctgcctggcagaaaaacttaccagcgagctcatcacacatatctgtaaatctctgcccctgttagaaaatcaaatcaaggagactcaccagagaataacagaggagctacaaaagtatggtgtcgacataccggaagacgaaaatgaaaaaatgttcttcctgatagataaaattaatgcctttaatcaggacatcactgctctcatgcaaggagaggaaactgtaggggaggaagacattcggctgtttaccagactccgacacgagttccacaaatggagtacaataattgaaaacaattttcaagaaggccataaaattttgagtagaaaaatccagaaatttgaaaatcagtatcgtggtagagagctgccaggctttgtgaattacaggacatttgagacaatcgtgaaacagcaaatcaaggcactggaagagccggctgtggatatgctacacaccgtgacggatatggtccggcttgctttcacagatgtttcgataaaaaattttgaagagttttttaacctccacagaaccgccaagtccaaaattgaagacattagagcagaacaagagagagaaggtgagaagctgatccgcctccacttccagatggaacagattgtctactgccaggaccaggtatacaggggtgcattgcagaaggtcagagagaaggagctggaagaagaaaagaagaagaaatcctgggattttggggctttccagtccagctcggcaacagactcttccatggaggagatctttcagcacctgatggcctatcaccaggaggccagcaagcgcatctccagccacatccctttgatcatccagttcttcatgctccagacgtacggccagcagcttcagaaggccatgctgcagctcctgcaggacaaggacacctacagctggctcctgaaggagcggagcgacaccagcgacaagcggaagttcctgaaggagcggcttgcacggctgacgcaggctcggcgccggcttgcccagttccccggttaaccacactctgtccagccccgtagacgtgcacgcacactgtctgcccccgttcccgggtagccactggactgacgacttgagtgctcagtagtcagactggatagtccgtctctgcttatccgttagccgtggtgatttagcaggaagctgtgagagcagtttggtttctagcatgaagacagagccccaccctcagatgcacatgagctggcgggattgaaggatgctgtcttcgtactgggaaagggattttcagccctcagaatcgctccaccttgcagctctccccttctctgtattcctagaaactgacacatgctgaacatcacagcttatttcctcatttttataatgtcccttcacaaacccagtgttttaggagcatgagtgccgtgtgtgtgcgtcctgtcggagccctgtctcctctctctgtaataaactcatttctagcag

SEQ ID NO: 9518 - protein, 661 aa, Homo sapiens
  ref <308>: DATABASE ACCESSION NUMBER: SWISS-Prot / P20591
  ref <309>: DATABASE ENTRY DATE: 2001-10-16
VVSEVDIAKADPAAASHPLLLNGDATVAQKNPGSVAENNLCSQYEEKVRPCIDLIDSLRALGVEQDLALPAIAVIGDQSSGKSSVLEALSGVALPRGSGIVTRCPLVLKLKKLVNEDKWRGKVSYQDYEIEISDASEVEKEINKAQNAIAGEGMGISHELITLEISSRDVPDLTLIDLPGITRVAVGNQPADIGYKIKTLIKKYIQRQETISLVVVPSNVDIATTEALSMAQEVDPEGDRTIGILTKPDLVDKGTEDKVVDVVRNLVFHLKKGYMIVKCRGQQEIQDQLSLSEALQREKIFFENHPYFRDLLEEGKATVPCLAEKLTSELITHICKSLPLLENQIKETHQRITEELQKYGVDIPEDENEKMFFLIDKINAFNQDITALMQGEETVGEEDIRLFTRLRHEFHKWSTIIENNFQEGHKILSRKIQKFENQYRGRELPGFVNYRTFETIVKQQIKALEEPAVDMLHTVTDMVRLAFTDVSIKNFEEFFNLHRTAKSKIEDIRAEQEREGEKLIRLHFQMEQIVYCQDQVYRGALQKVREKELEEEKKKKSWDFGAFQSSSATDSSMEEIFQHLMAYHQEASKRISSHIPLIIQFFMLQTYGQQLQKAMLQLLQDKDTYSWLLKERSDTSDKRKFLKERLARLTQARRRLAQFPG

SEQ ID NO: 9519 - DNA, 453 bp, Rattus norvegicus
  ref <308>: DATABASE ACCESSION NUMBER: EMBL / X52733
  ref <309>: DATABASE ENTRY DATE: 1997-02-17
ccgccatgccatccagactgaggaagacccggaaactccggggccacgtgagccacggccacggtcgcatcggtaagcaccgcaagcacccaggaggccgcgggaatgctggaggcatgcatcaccacaggatcaactttgacaaatatcatccaggttacttcggcaaagttggcatgaggcattaccacttgaagaggaaccagagcttctgcccaactgtcaacctggataaattatggacgttggtcagcgagcagacacgggtcaatgcagcaaaaaacaagaatggagttgctcccatcattgacgttgttcgatcaggctactacaaagttctggggaaggggaagctccctaagcaacctgtcatcgtgaaggccaagttcttcagcagaagagctgaagagaagataaagggtgtgggaggtgcctgtgtcctggtggcttaag

SEQ ID NO: 9520 - protein, 147 aa, Rattus norvegicus
  ref <308>: DATABASE ACCESSION NUMBER: SWISS-Prot / CAA36947
  ref <309>: DATABASE ENTRY DATE: 1995-11-01
PSRLRKTRKLRGHVSHGHGRIGKHRKHPGGRGNAGGMHHHRINFDKYHPGYFGKVGMRHYHLKRNQSFCPTVNLDKLWTLVSEQTRVNAAKNKNGVAPIIDVVRSGYYKVLGKGKLPKQPVIVKAKFFSRRAEEKIKGVGGACVLVA

SEQ ID NO: 9521 - DNA, 514 bp, Homo sapiens
  ref <308>: DATABASE ACCESSION NUMBER: Refseq / NM_000990
  ref <309>: DATABASE ENTRY DATE: 2001-05-17
ctttttcgtctgggctgccaacatgccatccagactgaggaagacccggaaacttaggggccacgtgagccacggccacggccgcataggcaagcaccggaagcaccccggcggccgcggtaatgctggtggtctgcatcaccaccggatcaacttcgacaaataccacccaggctactttgggaaagttggtatgaagcattaccacttaaagaggaaccagagcttctgcccaactgtcaaccttgacaaattgtggactttggtcagtgaacagacacgggtgaatgctgctaaaaacaagactggggctgctcccatcattgatgtggtgcgatcgggctactacaaagttctgggaaagggaaagctcccaaagcagcctgtcatcgtgaaggccaaattcttcagcagaagagctgaggagaagattaagagtgttgggggggcctgtgtcctggtggcttgaagccacatggagggagtttcattaaatgctaactacttttaaaaa

SEQ ID NO: 9522 - protein, 147 aa, Homo sapiens [sequence omitted]

SEQ ID NO: 9523 - DNA, 1473 bp, Rattus norvegicus
  ref <308>: DATABASE ACCESSION NUMBER: EMBL / X52817
  ref <309>: DATABASE ENTRY DATE: 1994-02-23
cccaccgccgccgcagccgggcagcgacgcagagtgcaagctcagcgactggaggagagccacgagcccgccaagcccgcaccatgcagccactgccgattccaccaagatggactgtgtgtggagcaactggaaaagtcaggctattgaccttctgtactggcgggacatcaagcagacggggattgtgttcgggagcttcctgctgctgctcttctccctgacccagttcagcgttgtgagcgtcgtcgcctacctggccctggctgccctctctgccaccatcagcttccgcatctacaagtccgttctacaagctgtgcagaaaacagatgagggtcaccctttcaaggcctacctggagctggagatcaccctgtcccaggagcagatccagaagtacacagactgcctgcagctatacgtgaacagcactctgaaggagctacggaggctcttccttgtccaagacctagtggattccttaaaatttgcagtcctcatgtggctcctgacctacgttggcgcactcttcaatggcctgaccctgctgcttatggctgtggtttcgatgtttactctacctgtggtatatgttaagcaccaggcacaggttgaccaatatctgggacttgtgaggactcacataaacaccgttgtggcaaagatccaggctaaaatccccggcgcaagaggcatgctgagtagatggttgccccaggagaagccggacatgaatgggggtgtctggagtggtaacagctctctccttcctcgttactgcgaattgattgtttcccttccccagtaccataatcttagaggcaaacttcgagacaggtgttttcagtcttttcctgtactcttaggatatttgagtcccccccgccccttgtcaagcactaaagtatagagtgtgttagatgtggtttttaattttgtgttgctaaaaaaaaaaaaagtgcatgatggtgagagctcacgttctccttcgtcccttgctgtcctccccctgcaatgcttctgtggcttctactgtccctgtggctaggcccttcttgccaagtgcgctgacacatagtgggtcgcttatcatgtccttgggttgctggttggattcatctctaataacactatatagaatcataggccaatgttttagcattttacccccccacacacagaacataaaaattaatataaaacagttgaccgtgtatatggtgatccgttttgtataactaagaatgatcgaattaaagaataaatccaaaaatgaacgcacagtacttttattgtatgggatgcctgggctgatttacatgtatggtaactaaagtgccagcatgttgactttattacgatttgtatttcttcctctgtagttcctaacggactcaatcacagactctgggtatttgcacttatgtacttgatactagaatgcaccaataaatgtgactcaaatgtaaa

SEQ ID NO: 9524 - protein, 267 aa, Rattus norvegicus
  ref <308>: DATABASE ACCESSION NUMBER: SWISS-Prot / CAA37001
  ref <309>: DATABASE ENTRY DATE: 2003-02-01
MDCVWSNWKSQAIDLLYWRDIKQTGIVFGSFLLLLFSLTQFSVVSVVAYLALAALSATISFRIYKSVLQAVQKTDEGHPFKAYLELEITLSQEQIQKYTDCLQLYVNSTLKELRRLFLVQDLVDSLKFAVLMWLLTYVGALFNGLTLLLMAVVSMFTLPVVYVKHQAQVDQYLGLVRTHINTVVAKIQAKIPGARGMLSRWLPQEKPDMNGGVWSGNSSLLPRYCELIVSLPQYHNLRGKLRDRCFQSFPVLLGYLSPPRPLSSTKV

SEQ ID NO: 9525 - DNA, 1139 bp, Rattus norvegicus
  ref <308>: DATABASE ACCESSION NUMBER: EMBL / X52840
  ref <309>: DATABASE ENTRY DATE: 1992-10-13
agatttgaaccgccaccatgtcgagcaaaaaagcaaagaccaagaccaccaaaaagcgccctcagcgcgcaacgtccaacgtgttcgccatgtttgaccagtcccagatccaggagttcaaagaggccttcaacatgatcgaccagaaccgggacggcttcattgacaaggaggacctacacgacatgctcgcgtctctggggaagaaccccaccgacgcctacctggacgccatgatgaacgaggccccgggccgcatcaatttcaccatgttcctcaccatgtttggagagaagctgaacggcaccgacccagaggacgtcatcagaaacgccttcgcttgcttcgatgaggaagccacaggcaccatccaggaggattacctgagggagctgctgaccaccatgggtgaccgcttcacagatgaggaagtggatgagctgtacagggaggcccccatcgacaaaaagggcaatttcaactacatcgagttcacgcgcatcctcaagcacggagcgaaagacaaagatgactgaagaggctgcagctgacattcctgttgagtttccttattcacttcatgtctcagacacagcccccataggacctactgtgtgccactttgtgtccctcagacaccccctcccataggcctactgtgtgccgcttagtccctcagacaccccctcccataggcctactgtgtgccacttagtccctcagacaccccctcccataggcctactgtgtgccatttgtccctcagacaccccctcccataggacctactgtgtaccacttggtttctcagacagccccacccccaaacccccctaaggacctactgcgggccacttagtttcacagcctttcctttttttaatgtatttattccagaccctttctgccacttagcatgtgtataatcagactggaatggggacaatgttgtaattgtactgaaaatgagatgcaaataaaaaaatcaaccaatgtgaaagcccaggaaaatatatcggcatttctggttttgctggatttttttacatttttatataataaaaatgttattttgaaataaagattatgctgactcaaggtggagtataaaacaaaaaaaaaaaaaaaaaaaaaaaaaa

SEQ ID NO: 9526 - protein, 171 aa, Rattus norvegicus; identical to SEQ ID NO: 1768
  ref <308>: DATABASE ACCESSION NUMBER: SWISS-Prot / P18666
  ref <309>: DATABASE ENTRY DATE: 2001-10-16

SEQ ID NO: 9527 - DNA, 944 bp, Homo sapiens
  ref <308>: DATABASE ACCESSION NUMBER: EMBL / X54304
  ref <309>: DATABASE ENTRY DATE: 1993-09-12
gcggccagcgcgtggtttttagcggctctctgggtagcagggtggtgtgatagcggccgagggctcggaagggtgctcggattctcgtagctgtgccgggacttaaccaccaccatgtcgagcaaaagaacaaagaccaagaccaagaagcgccctcagcgtgcaacatccaatgtgtttgctatgtttgaccagtcacagattcaggagttcaaagaggccttcaacatgattgatcagaacagagatggtttcatcgacaaggaagatttgcatgatatgcttgcttcattggggaagaatccaactgatgagtatctagatgccatgatgaatgaggctccaggccccatcaatttcaccatgttcctcaccatgtttggtgagaagttaaatggcacagatcctgaagatgtcatcagaaatgcctttgcttgctttgatgaagaagcaactggcaccatacaggaagattacttgagagagctgctgacaaccatgggggatcggtttacagatgaggaagtggatgagctgtacagagaagcacctattgataaaaaggggaatttcaattacatcgagttcacacgcatcctgaaacatggagccaaagacaaagatgactgaaataacttcaaattccagccaacgtccttgttgcactttgggtattctgagattttctcttgccattcccttaggctttagcagctttgcatttcctgttgtatttattctcagccattttgggcatatgtatctttataatcagactggaaacgggactttctattaatatcattttcagaataaaaaataggataatttaacctaccagcccttctcccccaataactgtgggtctatacagagtcaatatattttttcagagaaagttagttcggctcgattttttctgaatcataattaaactttattgc

SEQ ID NO: 9528 - protein, 170 aa, Homo sapiens
  ref <308>: DATABASE ACCESSION NUMBER: SWISS-Prot / P19105
  ref <309>: DATABASE ENTRY DATE: 2002-06-15
SSKRTKTKTKKRPQRATSNVFAMFDQSQIQEFKEAFNMIDQNRDGFIDKEDLHDMLASLGKNPTDEYLDAMMNEAPGPINFTMFLTMFGEKLNGTDPEDVIRNAFACFDEEATGTIQEDYLRELLTTMGDRFTDEEVDELYREAPIDKKGNFNYIEFTRILKHGAKDKDD

SEQ ID NO: 9529 - DNA, 936 bp, Rattus norvegicus
  ref <308>: DATABASE ACCESSION NUMBER: EMBL / X53052
  ref <309>: DATABASE ENTRY DATE: 1990-08-17
gaacttcggtctgcctccttttggagggccatatttgctgagttctttgctaccctcttctatgtcttctttgggctgggatcctcactgcgttgggcccctggacccctacatgtcctgcaagtggctttggcctttggcctggccctggccacactggtgcagactgtgggtcacatcagtggagcccatgtcaaccctgcggtcacttttgccttccttgtgggctcccagatgtccttgctccgtgctttctgctatatagcagcccagcttctgggagctgtggctggagcggctgtgctgtacagtgtcaccccaccagctgtccgaggaaacctagcactcaacacgctgcatgctggggtaagcgtgggccaggccaccactgtggagatcttcctgacgctccagttcgtgctctgcatctttgctacgtatgacgagaggcggaatggccgcatgggctctgtggccctggctgttggcttctccctcaccctggggcacctctttgggatgtattacactggcgcggggatgaatcccgcccgctcctttgctcctgctatcctcaccagaaacttcagcaaccactgggtgtactgggtgggcccaatcatcggcgggggcctgggtagcctgctctacgactttctcctcttcccacggctcaagagtgtttctgagagactgtctatcctcaagggagccagacccagtgactccaatggacagccagagggtacaggggaacctgtggaactgaagactcaggccctgtaaaagctgcagaacgccgctgggtttcagggaggcgcaagccagcccttggatgaagaaagagactgtggggagggggatcaatcggtacttctttattttttaacttacgtttttcattttttccttttgctgtgtgaaatctttcaagtt

SEQ ID NO: 9530 - protein, 261 aa, Rattus norvegicus
  ref <308>: DATABASE ACCESSION NUMBER: SWISS-Prot / CAA37219
  ref <309>: DATABASE ENTRY DATE: 2002-06-15
ELRSASFWRAIFAEFFATLFYVFFGLGSSLRWAPGPLHVLQVALAFGLALATLVQTVGHISGAHVNPAVTFAFLVGSQMSLLRAFCYIAAQLLGAVAGAAVLYSVTPPAVRGNLALNTLHAGVSVGQATTVEIFLTLQFVLCIFATYDERRNGRMGSVALAVGFSLTLGHLFGMYYTGAGMNPARSFAPAILTRNFSNHWVYWVGPIIGGGLGSLLYDFLLFPRLKSVSERLSILKGARPSDSNGQPEGTGEPVELKTQAL

SEQ ID NO: 9531 - DNA, 1019 bp, Homo sapiens
  ref <308>: DATABASE ACCESSION NUMBER: Refseq / NM_012064
  ref <309>: DATABASE ENTRY DATE: 2002-11-05
catgggggtagcagggacccaggcactgtgaccatcccccctgccatgtgggaactgcgatcagcctccttttggagggccatattcgctgagttctttgccaccctcttctatgtcttctttgggctggggtcctcactgcgctgggctcctggacccctgcatgttctgcaggtggctatggcatttggcttggccctggctacactggtgcagtctgtgggccacatcagtggagcccacgtcaatcctgcagtcacttttgctttccttgtgggctcccagatgtccctgctccgtgccttctgctatatggcagcccagctcctgggagctgtggctggggccgctgtgctgtatagcgttaccccacctgctgtccgaggaaacctagcactcaacacgttgcaccctgcggtgagcgtgggccaggcaaccacagtggagatcttcctgacgctccagttcgtgctctgcatctttgccacatacgacgagaggcggaatggccaactgggctccgtggccctggccgttggcttctcccttgccctggggcacctctttgggatgtattatactggtgcaggcatgaatcctgcccgctcctttgctcctgccattctcactgggaacttcactaaccactgggtgtactgggtaggcccaatcattggagggggtctgggcagcctcctgtacgactttcttctcttcccccggctcaagagtatttctgagagactgtctgtcctcaagggtgccaaacccgatgtctccaatggacaaccagaggtcacaggggaacctgttgaactgaacacccaggccctgtagaagctccagctgaatagagggagtagaaagcttctgagtttacgtggaggggtttagccagcccctagatgaagaaagagactgtggggaggggcatgtacttctttattttttaacttatgtatgtggttgttttttttttttttttccttttgctgtgtgaaatctttcaagttgcattc

SEQ ID NO: 9532 - protein, 263 aa, Homo sapiens
  ref <308>: DATABASE ACCESSION NUMBER: Refseq / NP_036196
  ref <309>: DATABASE ENTRY DATE: 2002-11-05
MWELRSASFWRAIFAEFFATLFYVFFGLGSSLRWAPGPLHVLQVAMAFGLALATLVQSVGHISGAHVNPAVTFAFLVGSQMSLLRAFCYMAAQLLGAVAGAAVLYSVTPPAVRGNLALNTLHPAVSVGQATTVEIFLTLQFVLCIFATYDERRNGQLGSVALAVGFSLALGHLFGMYYTGAGMNPARSFAPAILTGNFTNHWVYWVGPIIGGGLGSLLYDFLLFPRLKSISERLSVLKGAKPDVSNGQPEVTGEPVELNTQAL

SEQ ID NO: 9533 - DNA, 1197 bp, Rattus norvegicus
  ref <308>: DATABASE ACCESSION NUMBER: EMBL / X53054
  ref <309>: DATABASE ENTRY DATE: 1995-03-23
ctccttttctccagcatggtgtggctcgccagagattcctgtgtggcagctgtgatcctgctgctgacagtgctgagccctcccgtggcgttggtcagagaccccacgccacgatttttggaacaagttaaaggtgagtgtcatttctacaacgggacgcagcgagtccggtttctggccagatacatctacaaccgggaggagtacacgcgcttcgacagcgacgtgggcgagttccgcgcggtgaccgagctggggcggccctcagccgagtactataacaaacagaaggagtacatggagcagttgcgggccacggtggacacggcctgcaaacacgactacgagatctctgagagcttccttgttccgcggacagttgagcccaaggtgactgtgtacccttcaaagacgcagcccctggaacaccacaacctcctggtctgctctgtgagtgacttctaccctggcagcgttgaagtcagatggttccggaatggcgaggaggaaaaggatggactcgtgtccaccggcctgatccgaaatggagactggaccttccagttgctggtgatgctggagacggttcctcaaggtggagaggtttatacctgccaggtggagcatccaagcctgcccagccctgtcagagtggagtggaaagcacagtccacatctgcacaaaataagaagatgagtggagtcgggggcatcgtgctgggtctgctcttccttggagctgggctgtttgtctacttcaggaaccagaaaggacagtctggacttcagccaacaggactcctgaactgaggtgaggcgacaaggctgaaggaaggcgttctcccagtgtcaccatgtcttgaaacatgtcctgcttggcccacattcctccagagacagtgctctcccggacctggctcctcctgattctccaccccggagatctgtgctcctggtggctgtttagcccctggccaaaccttgcagccccggggacagaagccccctctctcaccactcctgctcccttttgtcccttgccctttgcctggcgcttctgagtcagtctgctgtcatatgctttctgacatctttctcaaataaacaaagaatgaaagtcatctacttcagagtttcaagcagaagaaataccattcatgcatagtaagcatgggggatagtgtataagaaataaat

SEQ ID NO: 9534 - protein, 264 aa, Rattus norvegicus
  ref <308>: DATABASE ACCESSION NUMBER: SWISS-Prot / P18211
  ref <309>: DATABASE ENTRY DATE: 1999-07-15
MVWLARDSCVAAVILLLTVLSPPVALVRDPTPRFLEQVKGECHFYNGTQRVRFLARYIYNREEYTRFDSDVGEFRAVTELGRPSAEYYNKQKEYMEQLRATVDTACKHDYEISESFLVPRTVEPKVTVYPSKTQPLEHHNLLVCSVSDFYPGSVEVRWFRNGEEEKDGLVSTGLIRNGDWTFQLLVMLETVPQGGEVYTCQVEHPSLPSPVRVEWKAQSTSAQNKKMSGVGGIVLGLLFLGAGLFVYFRNQKGQSGLQPTGLLN

SEQ ID NO: 9535 - DNA, 1197 bp, Rattus norvegicus; identical to SEQ ID NO: 9533
  ref <308>: DATABASE ACCESSION NUMBER: EMBL / X53054
  ref <309>: DATABASE ENTRY DATE: 1995-03-23

SEQ ID NO: 9536 - protein, 264 aa, Rattus norvegicus; identical to SEQ ID NO: 9534
  ref <308>: DATABASE ACCESSION NUMBER: SWISS-Prot / P18211
  ref <309>: DATABASE ENTRY DATE: 1999-07-15

SEQ ID NO: 9537 - DNA, 1197 bp, Rattus norvegicus; identical to SEQ ID NO: 9533
  ref <308>: DATABASE ACCESSION NUMBER: EMBL / X53054
  ref <309>: DATABASE ENTRY DATE: 1995-03-23

SEQ ID NO: 9538 - protein, 264 aa, Rattus norvegicus; identical to SEQ ID NO: 9534
  ref <308>: DATABASE ACCESSION NUMBER: SWISS-Prot / P18211
  ref <309>: DATABASE ENTRY DATE: 1999-07-15

SEQ ID NO: 9539 - DNA, 1197 bp, Rattus norvegicus; identical to SEQ ID NO: 9533
  ref <308>: DATABASE ACCESSION NUMBER: EMBL / X53054
  ref <309>: DATABASE ENTRY DATE: 1995-03-23

SEQ ID NO: 9540 - protein, 264 aa, Rattus norvegicus; identical to SEQ ID NO: 9534
  ref <308>: DATABASE ACCESSION NUMBER: SWISS-Prot / P18211
  ref <309>: DATABASE ENTRY DATE: 1999-07-15

SEQ ID NO: 9541 - DNA, 689 bp, Rattus norvegicus
  ref <308>: DATABASE ACCESSION NUMBER: EMBL / X53231
  ref <309>: DATABASE ENTRY DATE: 1993-09-12
tcaggtgggtacaagctgcccttggcatgccctatagcctccaaccacagccagagggatttgctgatgtaccaggcttcccactgtgtatgtacatggtaagaggatcaacctggacattagttccacctgacctctgactgatggtttggaaaacaagtttaattagaatcccttggccactgcagaggggaaaattaggctgatttctgtcccactggaggataaaggaagacttaggccagcgcttcagcttgtcaggacacgcccaatgtcgtttttcttagtggaaattgattgtgagtctttttaattccaggagcgtcctttatgacacagcttcaaaacagaacccaagtattttgagttatactccaacttctgccattgccttaaatgtagaagccaaaccttctctttatggactttcagagtggacacaaaggatcacttgctgctagatgacagtagtgtcttgggactgtccagtccctttaggaaaggaagggtctgcagctgcatgaactgggaagctgctaacggggaggaattagcgcccccaccctaaactcatccacccgaattcggcgccccagcaaccctgactccctgccagcacgtccacggctgcttaccccggcaacctcccatcccctgagccctccctcaataaatgcaatctgtagcaa

SEQ ID NO: 9542 - protein, 37 aa, Rattus norvegicus
  ref <308>: DATABASE ACCESSION NUMBER: SWISS-Prot / P18889
  ref <309>: DATABASE ENTRY DATE: 1999-07-15
MPYSLQPQPEGFADVPGFPLCMYMVRGSTWTLVPPDL

SEQ ID NO: 9543 - DNA, 2750 bp, Rattus norvegicus
  ref <308>: DATABASE ACCESSION NUMBER: EMBL / X53565
  ref <309>: DATABASE ENTRY DATE: 1995-03-23
cagactacaggatgcagttcctggttgcgttgctcctgctgagtgtcgcggtggcgagagctctgccatccgcttctaagccaaacaacacatcaagtgaaaataatcctccgattcaaccttccacgcccctgcctcctggggttgatatttctcaacaggtaaagactaacagaccgactgatcagaggctggagtcggataaagaaggccaggacaagacggtggctaggacttcggcatcagtttccagtggggtggaatctgcgaccaatctcaatttggatgattccaaaaagcaccccgaaacagcagatgccaaattgaaggaaactttgcagcagcttttgcctgtggaccccaaacaggaaaagtcaggtcagaagtttacaaaagattcaggcagccccacaggaggtgattccgacaataccacaggaggtgattctaacaagaccacaggagttgattctgacaagacatcaggaggtgattctaacaagcccacaggaagtgataatgacaagcccacaggaggtgattctaacaagcccacctccaaagtcccctccaatacagagactccaaaaattgacaaagtccagctaactgaaaaaggacagaaaccaacacttatttccaaaactgaatctggggaaaaactggcaggggactctgacttctctttaaagccagagaaaggagataagtcttcagagcctactgaagatgtggaaaccaaggagattgaagagggtgatacagagcccgaagaaggttcgccacttgaagaagagaatgaaaaggtgttgggcccttcctccagtgagaaccaagaggggacacttacagattctatgaaggatgagaaggatgaccattataaggacaattctggaaacaccagtgcagaaagcagccacttctttgcttatctggtgaccgctgctgttcttgttgctgtcctctatattgcttaccacaacaaacgaaagattattgcttttgccctggaaggaaaaagatccaaagtcactcggaggccaaaggccagtgactaccaacgtttgaacctaaagctttgattttgattttgtctgcaagaaccttgtcctccctgctgatttgtttccgaatcaagagaaatgaaaagactgacctgtggggtttggtggcaagtctgggctggcagagatgggattgcttcaggttttgcacctgcactttgatgacagtcctctggtggtgttttatttacttttgtgttccctttatgtgatgtgtccatcttccttccattcttggagtacaagcagagggagtgtgtggaaacatggctgtgaccaaaggaagaccccaccttccttaggcaggccacactatggaccaccctcccataacccctttatctttgcaactctaggagcaaactacagaggtgctttctagacaagatgtagaagatgattctgtgggatgctgatgggcagagacagggttgaaatcttctccacagaggcctcagctgcagaccagactagcaagttaaagagtgtcaaggtccagtccgtctgacagtctgtatatctctctgaaatttgcactcgagttgtgctagcacaaaagggactcactgcttctgaaagtaaaatcactgtgccatgggatttttttttttttaaatatggtgatgattattgaactgaaccagtgtgttcttgcatacagtcaccccaataggaacttcctggaaagaagcaaggtttatgccttgtggaagaaaacacatagggctttggtatacaggaaagagtttctcacagtcagttttgctttcatggtctgcagtaggtaagatagacatttagaaactccgtgcgttctccacattcctccacactgtttaagatgccagggaatgagtaatatctttcctatcctgtcatagctactcatgaaattgtaagaaaccaagtaggttccctgagataaccaaagatgtcttggattatgctgtgtctaaagttttattccagtctatatggttacacctaaagagagaaaactcttaactaatctcagggatataaaaggaaccaaaaatctgagtcctgtgcagttggagaagttgaagaagacctggtcttggagctctttctccatgctgactgtagcatgtgcctgaagtttgtatgcttggcaggtggcattctagaaatgaggtcattgctactgtcttcccgactgtgcataagtctgctgttactttttcctagctgagaagccgttttcagtctccctcagctttccgtaactcttcttcagttccccacctcttccattctctcttcctctttagccctgtttgtacacctctgatgaaaacctttccttctagcctacgtgcatgccatccctaccccgttccagttggtgttgcttctattcccttccctctctccctgacatttgcaggtttgccttggtctgttttcctcctgtttctcaaggttactcagttaacagatcaccaaataaaacagcccattttcacagcttataacacttggtaatgatggatgctggggtctgtgcatgttgacattctaggtgtctcttgcaaactgtcctttgccttatcttatggcgttgggggagggtgcccaggtctctcttgctttgactgtcgcatccattatttatcctttctgtgacctcacatttctttggtctccttcccaagaacccag

SEQ ID NO: 9544 - protein, 357 aa, Rattus norvegicus; identical to SEQ ID NO: 6341
  ref <308>: DATABASE ACCESSION NUMBER: SWISS-Prot / P19814
  ref <309>: DATABASE ENTRY DATE: 2001-10-16

SEQ ID NO: 9545 - DNA, 1494 bp, Homo sapiens; identical to SEQ ID NO: 6342
  ref <308>: DATABASE ACCESSION NUMBER: EMBL / BC008461
  ref <309>: DATABASE ENTRY DATE: 2001-07-13

SEQ ID NO: 9546 - protein, 480 aa, Homo sapiens; identical to SEQ ID NO: 6343
  ref <308>: DATABASE ACCESSION NUMBER: SWISS-Prot / O43493
  ref <309>: DATABASE ENTRY DATE: 2002-06-15

SEQ ID NO: 9547 - DNA, 6335 bp, Rattus norvegicus
  ref <308>: DATABASE ACCESSION NUMBER: EMBL / X53581
  ref <309>: DATABASE ENTRY DATE: 1992-04-28
ggatcccggcccgcagcagctctctgctcccagaacccgtgagaaagagacctcaccgcctggtcaggtgggcactcctgaggctgcagagcggaagagaccaccaacactgcccacccctgcccacatccctggcccaagaggaaactgtataaggcctctgggttccgtgggggagggcccaggagcgtcaggacccctgcctgagacaccgccggaacctgagggaaacagaccggataaacagttctctgcacccaaatcccatgggagggagagctgaaccttcagagaggcagacaagccttggaaaccagaagagactgctctctgtacatacatctcggacgccagaggaaaacaccaaaggccatctggaaccctggtgcactgaagctcctggaaggggcggcacaggtcttcctggttgctgccgccacagagagcccttgggcagcaccccgcctggtgaactcaagacacaggcccacaggaacagctgaagacctgcagagaggaaaaactacacgcccgaaagcagaacactctgtccccataacggactgaaagagaggaaaacaggtctacagcactcctgacacacaggcttataggacagtctaaccactgtcagaaatagcagaacaaagtaacactagagataatctgatggtgagaggcaagcgcaggaacccaagcaacagaaaccaagactacatggcatcatcggagcccaattctcccaccaaaacaaacatggaatatccaaacacaccagaaaagcaagatctagtttcaaaatcatatttgatcatgatgctggaggacttcaagaaagacgtgaagaactcccttagagaacaagtagaagcctacagagaggaatcgcaaaaatccctgaaagaattccaggaaaacacaatcaaacagttgaaggaattaaaaatggaaatagaagcaatcaagaaagaacacatggaaacaaccctggatatagaaaaccaaaggaagagacaaggagccgtagatacaagcatcaccaacagaatacaagagatggaagagagaatctcaagagcagaagattccatagaaatcattgactcaactgtcaaagataatgtaaagcggaaaaagctactggtccaaaacatacaggaaatccaggactcaatgagaagatcaaacctaaggataataggtatagaagagagtgaagactcccagctcaaaggaccagtaaatgtcttcaacaaaatcatagaagaaaacttccctaacctaaaaaaagagatacccataggcatacaagaagcctacagaactccaaatagattggaccagaaaagaaacacctcccgtcacataatagtcaaaacaccaaacgcacaaaataaagaaagaatattaaaagcagtaagggaaaaaggtcaagtaacatataaaggcagacctatcagaatcacaccagacttctcgccagaaactatgaaggccagaagatcctggacagatgtcatacagaccctaagagaacacaaatgccagcccaggttactgtatcctgcaaaactctcaattaacatagatggagaaaccaagatattccatgacaaaaccaaatttacacaatatctttctacaaatccagcactacaaaggataataaatggtaaagcccaacataaggaggcaagctataccctagaagaagcaagaaactaatcgtcttggcaacaaaacaaagcgaatgaaagcacacaaacataacctcacatccaaatatgaatataacgggaagcaataatcactattccttaatatctctcaacataaatggccttaactccccaataaaaagacatagattaacaaactggatacgcaacgaggaccctgcattctgctgcctacaggaaacacacctcagagacaaagacagacattacctcagagtgaaaggctggaaaacaattttccaagcaaatggtcagaagaagcaagctggagtagccattctaatatcaaataaaatcaatttttaactaaaagtcatcaaaaaagataaggaaggacacttcatattcatcaaaggaaaaatccaccaagatgaactctcaatcctaaatatctatgccccaaatacaagggcacctacatatgtaaaagaaaccttactaaagctcaaaacacacattgcacctcacacaataatagtgggagatttcaacaccccactctcatcaatggacagatcatggaaacagaaattaaacagagatgtagacagactaagagaagtcatgagccaaagggacttaacggatatttatagaacattctatcctaaagcaaaaggatataccttcttctcagctcctcatggtactttctccaaaattgaccatataattggtcaaaaaacgggcctcaacaggtacagaaagatagaaataatcccatgcatgctatcggaccaccacggcctaaaactggtcttcaataacaatcaaggaagaatgcccatatatacttggaaactgaacaatgctctactcaatgataacctggtcaaggaagaaataaagaaagaaattaaaaactttttagaatttaatgaaaatgaaggtacaacatacccaaacttatgggacacaatgaaagctgtgctaagaggaaaactcatagcgctgagtgcctgcagaaagaaacaggaaagagcatatgtcagcagcttgacagcacacctaaaagctctagaacaaaaagaagcaaatacacccaggaggagtagaaggcaggaaataatcaaactcagagctgaaatcaaccaagtagaaacaaaaggaccatagaaagaatcaacagaaccaaaagttggttctttgagaaaatcaacaagatagataaacccttagccagactaatgagaggacacagagagtgtgtccaaattaacaaaatcagaaatgaaaagggagacataacaacagattcagaggaaattcaaaaaatcatcagatcttactataaaaacctatattcaacaaaacttgaaaatcttcaggaaatggacaattttctagacagataccaggtaccgaagttaaatcaggaacagataaaccagttaaacaaccccataactcctaaggaaatagaagcagtcattaaaggtctcccaaccaaaaagagcccaggtccagacgggtttagtgcagaattctatcaaaccttcatagaagacctcataccaatattatccaaactattccacaaaattgaaacagatggatcactaccgaataccttctacgaagccacaattactcttatacctaaaccacacaaagacacaacaaagaaagagaacttcagaccaatttcccttatgaatatcgacgcaaaaatactcaacaaaattctggcaaaccgaatccaagagcacatcaaaacaatcatccaccatgaccaagtaggcttcatcccaggcatgcagggatggtttaatatacggaaaaccatcaacgtgatccattatataaacaaactgaaagaacaaaaccacatgatcatttcattagacgctgagaaagcatttgacaaaattcaacaccccttcatgataaaagtcctggaaagaattggaattcaaggcccatacctgaacatagtaaaagccatatacagcaaaccagttgctaacattaaactaaatggagagaaacttgaagcaatcccactaaaatcagggactagacaaggctgcccactctctccctacttattcaatatagttcttgaagttctggccagagcaatcagacaacaaaaggaggtcaaggggatacagatcggaaaagaagaagtcaaaatatcactatttgcagatgatatgatagtatatttaagtgatcccaaacattccaccagagaactactaaagctgatagacaacttcagcaaagtggctaggtataaaattaactcaaataaatcagttgccttcctctatacaaaagagaaacaagccgagaaagaaattagggaaacgacacccttcataatagacccaaataatataaagtacctcggtgtgactttaacaaagcaagtaaaagatctgtacaataagaacttcaagacactgaagaaggaaattgaagaagacctcagaagatggaaagatctcccgtgctcatggattggcaggattaatatagtaaaaatggccattttaccaaaagcaatctacagattcaatgcaatccccatcaaaataccaatccaattcttcaaagagttagacagaacaatttgcaaattcatctggaataacaaaaaacccaggatagctaaagctatcctcaacaataaaaggacttcagggggaatcactatccctgaactcaagcagtattacagagcaatagtgataaaaactgcatggtattggtacagagacagacagatagaccaatggaatagaattgaagacccagaaatgaacccacacacctatggtcacttgatttttgacaaaggagccaaaaccatcaaatggaaaaaagatagcattttcagcaaatggtgctagttcaactggaggtcaacatgtagaagaatgaagatcgatccatgcttgtcaccctgtacaagcttaagtccaagtggatcaaggacctccacatcaaaccagacacactcaaactaatagaagaaaaactagggaagcatctggaacacatgggcactggaaaaaatttcctaaacaaaacaccatggcttacgctctaagatcaagaatcgacaaatgggatctcataaaactgcaaagcttctgtaaggcaaaggacactgtggttaggacaaaacggcaaccaacagattgggaaaatatctttaccaatcctacaacagatagaggccttatatccaaaatatacaaagaactcaagaagttagaccgcagggaaacaaataaccctattaaaaaatggggttcagagctaaacaaagaattcacagctgaggaatgccaaatggctgagaaacacctaaagaaatgttcaacatctttagtcataagggaaatgcaaatcaaaacaaccgtgagatttcacctcacaccagtgagaatggctatgatcaaaaactcaggggacaacagatgctggcgaggatgtggagaaagaggaacactcctccattgttggtgggattgcaaactggtacaaccattctggaaatcagtctggaggttcctcagaaaattggacattgaactgcctgaggatccagctatacctctcttgggcatatacccaaaagatgccccaacatataaaaaagacacgtgctccactatgttcattgcagccttatttataatagccagaagctggaaagaacccagatgcccttcaacagaggaatggatacagaaaatgtggtacatctacacaatggaatattactcagctatcaaaaacaacgagtttatgaaattcgtaggcaaatggttggaactggaaaatatcatcctgagtaagctaacccaatcacagaaagacatacatggtatgcactcattgataagtggctattagcccaaatgcttgaattaccctagatacctagaacaaatgaaactcaagacggatgatcaaaatgtgaatgcttcactccttctttaaaaggggaacaagaatacccttggcagggaagagagaggcaaagattaaaacagagaatgaaggaacacccattcagagcctgccccacatgtggcccatacatatacagccacccaattagacaagatggatgaagcaaagaagtgcagaccgacaggagccggatgtagatcgctcctgagagacacagccagaatacagcaaatacagaggcgaatgccagcagcaaaccactgaactgagaataggacccccgttgaaggaatcagagaaagaactggaagatcttgaaggggctcgagaccccatatgtacaacaatgctaagcaaccagagcttccagggactaagccactacctaaagactatacatggactgaccctggactctgacctcataggtagcaatgaatatcctagtaagagcaccagtggaaggagaagccctgggtcctgctaagactgaacccccagtgaactagactggtggggggagggcggcaatggggggagggttgggaggggaacaccataaggaaggggaggggggagggggatgtttgcccggataccgaaagggaataacatcgaaatgtatataagaatactcaagttaataaaaaaaaaaaaaaaaaaaga

SEQ ID NO: 9548 - DNA, 6335 bp, Rattus norvegicus; identical to SEQ ID NO: 9547
  ref <308>: DATABASE ACCESSION NUMBER: EMBL / X53581
  ref <309>: DATABASE ENTRY DATE: 1992-04-28

SEQ ID NO: 9549 - DNA, 6335 bp, Rattus norvegicus; identical to SEQ ID NO: 9547
  ref <308>: DATABASE ACCESSION NUMBER: EMBL / X53581
  ref <309>: DATABASE ENTRY DATE: 1992-04-28

SEQ ID NO: 9550 - DNA, 6335 bp, Rattus norvegicus; identical to SEQ ID NO: 9547
  ref <308>: DATABASE ACCESSION NUMBER: EMBL / X53581
  ref <309>: DATABASE ENTRY DATE: 1992-04-28

SEQ ID NO: 9551 - DNA, 3109 bp, Rattus norvegicus
  ref <308>: DATABASE ACCESSION NUMBER: EMBL / X53773
  ref <309>: DATABASE ENTRY DATE: 1993-09-12
tccagcccgccgccgagccgctcccgggtcgcaaagatgccggccgtatccaagggggaggggatgcgaggcctagcggtcttcatctccgatatccgtaactgtaaaagtaaagaagctgaaataaagaggataaataaggagctggcaaatattagatcaaaatttaaaggtgacaaggctcttgatggctacagtaagaagaagtatgtctgcaagttactcttcatctttctccttggtcatgacattgacttcggacacatggaagctgtgaatcttctgagctcaaacagatacacggaaaagcagatcggctaccttttcatctctgtattggtgaattcaaatagtgaactgatccggttgattaacaatgccatcaagaatgacctggccagccgcaatcctacatttatgggtctggccctgcactgcatcgccaatgtaggtagccgtgagatggcagaggccttcgctggagagatccccaagatcctggtggcaggagataccatggacagtgtgaagcagagcgcagccctgtgcttgttgcgcctgtacaggacgtcacctgacctagttcctatgggcgactggacatcccgtgtggtacacctcctcaatgaccagcacttgggtgtagtgactgccgcaactagcctcatcaccacactggcccagaagaatcctgaggagttcaagacctctgtctctctagctgtctctcgactgagcagaattgtgacgtccgcgtcaacagatcttcaggattatacttactactttgtcccggctccttggctgtcagtcaaacttctgagactgctgcagtgctacccacccccagaccctgcggtgcgtggccgcctgactgagtgcttggagaccatcctgaataaggcccaggagccccccaagtccaagaaagtccagcattcaaatgccaagaacgctgtgctgtttgaggccatcagcctcatcatccaccatgacagtgagcccaacctcctggtccgtgcctgcaaccagctgggccagttcctgcagcatcgggagacaaacctgcgctacctggctctggagagcatgtgcacactggccagctctgagttctctcacgaggctgtcaagacccacatcgagactgtcatcaatgccttgaagacggaacgagatgtgagtgtgcggcagcgggcagtggacctgctctacgccatgtgcgaccgaagcaacgcccagcagattgtggctgagatgctgagctacctagaaacagctgactactccatccgggaggaaattgtgctgaaggtggccatccttgctgagaagtatgcagtggactacacttggtatgtggacaccatcctcaacctcatccgcattgcaggcgactatgtgagcgaagaggtgtggtaccgcgtcatccagattgtcatcaatcgcgatgatgtgcagggttatgctgccaagacggtatttgaggcattgcaggctccagcatgtcatgagaacttggtcaaagtgggcggctacatcctgggcgagtttggaaacttgatagcgggagacccacgatccagccctctgatccagttcaacctgctccactccaagttccacttgtgcagcgtccccactcgggcactcctgctgtccacctacatcaagttcgtgaacctctttccagaggtaaaggctaccattcaggacgtgctgcgcagtgacagccaactgaagaacgcagatgtggagctgcagcagcgggctgtggagtacctgcgactgagtactgttgccagcactgatatcctggcaactgtcctggaagaaatgccacccttccctgagcgtgagtcctccatcttggccaagctgaagaagaagaagggcccaagcacagtgactgacctggaggagaccaagcgtgagcgaagcatcgatgtgaatgggggccccgaacccgttccagccagcaccagtgctgcgtccacaccttctccatcagcagacctgctgggtctgggggccgttccccctgctcccacagggccccctccctcctctggcggtgggttactggtggacgtgttctcagactcagcttctgcagttgcacctcttgcacccggctctgaagacaactttgccaggtttgtttgtaaaaacaatggtgtgttgtttgaaaaccagctgcttcaaattggactgaagtcagaatttcggcagaatttaggtcgaatgttcatattttatggtaacaagacctccacgcagttcctaaactttactccaacactaatctgtgctgacgaccttcagactaatctgaacctgcagactaagcccgtggacccaactgtggatgggggcgcacaggtgcaacaggtgatcaacattgagtgtatatctgattttacagaggcacctgtcctcaacatccagttcaggtatggtggtaccttccagaatgtttctgttaagcttcccatcactctcaacaaatttttccagcccacagaaatggcttctcaggatttctttcaacgttggaagcagttgagcaatccacagcaagaagtgcagaatatcttcaaagcaaagcatccgatggacacagaaatcactaaagcgaagattattggatttggttctgcgctcctggaagaagttgatccaaaccctgcaaattttgtgggtgctggcataatacataccaaaaccacccagatcggctgcttgttgcgcctggagccaaacctgcaagctcagatgtacagactcaccttgcgtaccagcaaagacaccgtctctcagagactatgtgaattgctgtcggaacagttctaatccacagaccagaagatcaggctctttgtttgtgcgtctctctcgtctctctcgtttgtctttgtaccacactgcagataaacaccccttgtctgaaaactgccattcaaggcacctccagtcctacacctacagccagcccctgggtgtgaagggaatgcaggacacagtttgagaagggctgcagcaggcctgccccgtcaaagaagggtgcctgggcctgggaaatcaaggcagtcctgtggttcaacctaca

SEQ ID NO: 9552 - protein, 937 aa, Rattus norvegicus
  ref <308>: DATABASE ACCESSION NUMBER: SWISS-Prot / P18484
  ref <309>: DATABASE ENTRY DATE: 2001-10-16
PAVSKGEGMRGLAVFISDIRNCKSKEAEIKRINKELANIRSKFKGDKALDGYSKKKYVCKLLFIFLLGHDIDFGHMEAVNLLSSNRYTEKQIGYLFISVLVNSNSELIRLINNAIKNDLASRNPTFMGLALHCIANVGSREMAEAFAGEIPKILVAGDTMDSVKQSAALCLLRLYRTSPDLVPMGDWTSRVVHLLNDQHLGVVTAATSLITTLAQKNPEEFKTSVSLAVSRLSRIVTSASTDLQDYTYYFVPAPWLSVKLLRLLQCYPPPDPAVRGRLTECLETILNKAQEPPKSKKVQHSNAKNAVLFEAISLIIHHDSEPNLLVRACNQLGQFLQHRETNLRYLALESMCTLASSEFSHEAVKTHIETVINALKTERDVSVRQRAVDLLYAMCDRSNAQQIVAEMLSYLETADYSIREEIVLKVAILAEKYAVDYTWYVDTILNLIRIAGDYVSEEVWYRVIQIVINRDDVQGYAAKTVFEALQAPACHENLVKVGGYILGEFGNLIAGDPRSSPLIQFNLLHSKFHLCSVPTRALLLSTYIKFVNLFPEVKATIQDVLRSDSQLKNADVELQQRAVEYLRLSTVASTDILATVLEEMPPFPERESSILAKLKKKKGPSTVTDLEETKRERSIDVNGGPEPVPASTSAASTPSPSADLLGLGAVPPAPTGPPPSSGGGLLVDVFSDSASAVAPLAPGSEDNFARFVCKNNGVLFENQLLQIGLKSEFRQNLGRMFIFYGNKTSTQFLNFTPTLICADDLQTNLNLQTKPVDPTVDGGAQVQQVINIECISDFTEAPVLNIQFRYGGTFQNVSVKLPITLNKFFQPTEMASQDFFQRWKQLSNPQQEVQNIFKAKHPMDTEITKAKIIGFGSALLEEVDPNPANFVGAGIIHTKTTQIGCLLRLEPNLQAQMYRLTLRTSKDTVSQRLCELLSEQF

SEQ ID NO: 9553 - DNA, 31737 bp, Homo sapiens
  ref <308>: DATABASE ACCESSION NUMBER: EMBL / AC006942
  ref <309>: DATABASE ENTRY DATE: 2000-03-03
gatcatgccactgcactctagcctgggtgacagagcaagactctgtctcaaaaaaaaaaaagaaaaagaaaacagaaaataactttggaattggaattatacagaatgtaaaagaagtatatttcatatgtttcaataaataagagaagcattttaaaatatgagtaaagtttaagcagatttgaaaatataattgaaatagtcaaaaattgccaggcacagtagtggcttacacctataatccaggcactttgggaggctgaggtgggaggatcacttgaggccggaagttcaagatcagcaacatagtgagaccctattgccacaaaaactaaaatattagccgggtggggtgctgtgtgcctgggtagtccatccaggaggctgaggcaggaggattgcttgagcctgggaggatgaggctgcagtgagctatgatctcatcactgcactctaacctgggtgacagagtaagaccctgtctaaacaaacaaacaaaaaaaaccaaaaaacaaataaatgtttaaaacattaaaaattaggtgtctgaatttagttagcagagtaggcacagccaaagccagaattagtggcctggcagtagaactgaagaaagacatcaaaatgcagcccaaagaagacaaagcgatggggattttaggaaagagacaaagactcatggaagacagagaacatctaacagaattgccatttagagttgtagggagagatcgtgacataggcagtgttcgaagagagataatggttgaaaatattccagaatggatgaaagaggctgatccccagattcaaataggccaggaaatcataagcaaaagtacagactgtagggggtgactgtggggcagcaagaccagccaggcatctgtcaccaggtccaggtcagagctcgcggtggcttggaccagggctgtggcggtcatgtggttatgagaagggcatgtttcgggagtagagtcgatggattatatgtgctgtgctaggatgaggtggggacattgaacaggtgagtgaatgatggcagacctttcagcaatgtgacaaaggccataggaaaatgggtcagagagggcagaacctgagtgtggtttggtcatgctgaatttgagatgtgtattagacatctgagtaggactctggggaggaagttggattgcagggagtcagggcgggagggagagagatctgagagagatcggcaccgtccaataaaaatataatgcaaaatacaggccaggcacagcagctcacacccgtaatcccagcaccttgggaggccaaggtgggcagatcacttgaggtcaggagttcaagaacagcttggccaacgtggtgaagccccgtctctactaaaaatacaaaaattagtcaggtgtggtggcgggcacctgtaatcccagctacttgggaggcttaggcaggagaattgcttgaacccaggaggtggaggttgcagtgagtggagattgtgccactgcactccagcctgggtgacagagcgagactccatctcaaaaaaaaaaaacattagtggggtgcagtggtgcacacctgtagtcccagctactcaggaggctgaggcaggagaatcgcataaacccggggggcagaggttgcagtgagccgagattgcaccactgcactccagcccgagtgacagagtgagactccatcttaacaaaaaacaaacaaacaaaaagcaaaatacaaatgtgtgcctgtaatcccagctactcgagtgactgagatgggaggattgcttgagctcaagaggcccaggctgcagtgagctgtgatcatgcctaggtgacagtgacaccctgtctaaaaaaaatataatgcaagccacataggtgtttttctgttttctagtatttaatatttcagtttaacctgatccacacaaaatattatcactttgacactgaatcagcgtaaaaattattcacgagctattttatttgacatctgtgtttggtgctaagtctttggaatgcggcgttgcgggtgtctctcagtttggactcgctgcagttccagtgctctgggggctgttgtatctgacagcatggggattgatggcagttaagctcgggcctggtgaagcccctgagggcaggtgttaactgggaattcccaaaagctgggcccttgagtggccctggtgcagcccagcgtgttacgctctggcagggggggtgggagtcatgatcaggggtgtgggaggaaaatcaggatcaggccatgactcagaatgctaagaactttgatggaggagggagtggccagtcgcaaatgctgccagcagtttctttaggacaaggacaggcagtcagcatcagcttgggggagacagaggttacaagccaccctgaagagggaagaaccgggcactttgaggactgagagggaggccaccgtggccaacatgtgtgggtgcagatgacattgtccctggagtggatgccgaggggtggtgctctgccagggtcaaggggccagggtggggctgtctggctctaggctgccccctccacactggaaacttggcctcagcagtgactggggcacgaaggaactttattttgtaggtagacttttatttaactttttattttttggagacagggtcttgccctgttgcccaggctggagtgcagtggcacagtcttggctcactgcaacctccgactcctgggctgaagcgatcttcccacctcagccccctgagtagctgtgattataggcgtgcaccaccatgcctggctaatttttgtatttctttttttttttgtagagatggggttttgctatgttgcccaggctccaggctggtcttgaactccagagctcaagcaatcctcctgcctcagcctcccaaagtgttgggattacaggtgtgagccaccactcccatctaggctttttttgtttgttttttttgttttttgtttttttttttttgaggcagtctctctctgtcacccaggctggagtgcagtggtgcaatcttggctcactgcaacctctgcctcccaagttcaagcaattctcttgtctcagcctcctgagtagctgggattacaggtgtgtgccaccacacctggctattttttttttttttttagtagagacgaggtttgccatgttggccagactggtctcaaactcttgacctctattgatccatctgcctcagcctcccaaagtgctaggattacaggcgtgagcctctgcgcccggtcattttaaccatttgaaggtgttcagttcagtggtttctagtatattgatgatgctgtgcaacaaccactaccacctaattgcagaacactcattgctccaaaaaaagactctgtacccattagcagtccctccccattccctcttccccccagcccctggctgccaccaatctgctttctgtcacagatttgcctaatgtggacatttcatagaaatggaaccgcacagtaggtggccttctgtgtctggcttcttccactcaacaagatgtttttcaggttcatccacattgtggtgcatatccgtgatttgctcgagatagagtctcactctgctgcccaggctggagtgcagtggcatgatcatagctaactgcagccctgacctcccaggctcaggtgatcctcccacgtcagccactccagcagccgggactacaggcacaagccaccaggcctggctaatatttgaattttttatagagacagggtctcactatattacccaggctagtcttgaactcctgagctcaagtgatcctccgtggcctcagcttcccaaagtgctgagattacaggcgtgagccaccgcgcctgacttgtggttttattttttatacttgaatatgcagcttgatattgtgtagtttaacattttcctaagtagcgccatagcccttattccacttaaccaagttgataaatagctcttattcctttgtgtggtatccttatctgtaaatggagatgatagaatccgcgtccttagagggctgtggtggggagcgagcgagctgtgcgggaacacttagagcagagtttggcccagagtcaggactcgggagatgcgctgtggctcaggagatgtgtgccgtggcagcgatgggaaagtggcccagagtcagggctcgggagatgcgctgtggctcaggagatgtgcgccgtggcagcgatgggaaagtggcccagagtcagggctcgggagatgcactgtggctcgggagatgagcgccatgacagagatgggaaggtggcccagagtcagggctcgggagatgcgcgccgtgacggagatgggaaagtggcctggagtcagggctcgggagatgtgcgctgtgacggaggtgggaaagtgccgtcacaaatggagcatcgtctgtggccaggcttcttgctggtttctggttctaacttgatgaccactgggcagtgaacgtttctgtagggtgagcgtctgggggcagcactgctggtcttggtctgctgcacacacagcagtggcctttctagacagaggaagcccagagcctctccagagggcctgtccctgtgtccgcctccagctgcagcacacgagggttcccagcactttaggaggccgtagcaacaggcgtcagtcgggcgagtatctgcctggatgacggcaggagccacctgctgggtggctgcacatccagtgagacatgctgccacaggcctttgactcgtgcaggtctcccctctgaggacttctcccctgtgtcttttgctgtctgttgggtgctttctgggaaaccctttactgataggccatggctgggccagtcttgacagctcccagcacctcctcttactcaaggctatggccatgcaccacacaatctcatttctgtttttttttgagacggagtctcactctgtctcccaggttgaagtgcaatggtgagatctcagctcactgcaacctctgcctcccaggttcaagcgattctcctgccccagcctcccgagtagctaggatttcaggcacgtgccaccatgcccagctaatttttgtatttttagtagagatggggtttcaccatgttggccaggctggtctcaaactcctgacctcaggtgatccacctgcctcagcatcccaaagtgctgggattataggtgtgagccactgcgcctggcctttttttttttttttttttgtagagacagggttttaccacgttggcctggccaggccggtctcaaacacctggcctcaagtgatccgcctgcctcagcctcccaaagtgttgggattacaggtgtaagccaccatgcctggcccaccatcttatttctttctccccaaagccgacaaggctcctcattttcctgaaggggaaacagcccatcagagagggtcagtggcttacccccatctgtgccccacagtcacaacctcatgcaggcgtgtctgaccccagaaggtgctcccctgggatcctcttctagaacaacatcatgctccatgctctttgctgtgctaggagctgggttatggttggggcctggagtcagccctctgagatgggctgcccgctggctgccaggttctgtgccaggcaagtgctgaccctggtttcctgtgactgctgtgatgaattaccaccagcacagcggtgtcaaacaccggttctggatgtcggaagtccaacatccatctcacggggctaaaatcaaggcgtgggcagggctcgtcccttccgggggccctagaggagaggccgcgtccttgccttctccagctcctagaggccacctgctttccttggctcgtggccccttcccccatccccaaaggcagcagtgtggcatcttctctcctgcctgacctctgttccatcctcacatcatctctgactctgaactgtatctttcccttataaggaccctgtgatgacattgggtccacctggatcacccaggatcctctctccatctcatgatccttaactttatcatatctgcaaagtacccccacccttttttttgtttggagacagggtcttgctctgccacccaggctgcagccttcacctcccaggctaaagcgatcctcccacctcagcctgccaagtaggtgggtctacaggcatgcgccaccacgcttggctaattctcatatttctagtagagatgggggtctcaccatgttgcccaggctggtctccaactcttgggctcaagtgattctcccacctcagcctcctaaagtgctgggattacaggcgtgagccaccctaacccccagaacctgtgaatatattcccttggattcaaaagagccttgcaaagtctgttccctcacaacaggcagagggaccctttaaaaacctaagccagatcaaaaatacacccattttctcagtttgttgtggagagaagataaacgtgtgaatccacccagagacctgtgggagtgctggacaggccgaaggggtccgggggcagctgttcctgctgtcgtgttaacatcacgctgattctctgctcaccacccacagcggctttcatctcccaatcggtaaaaagccaagtcctcacttcagccaacaaggccctgcagggtctggctctctgttccctccctgtcctatctgcagccctcctgccccatggctcaggccgcagcctgcaggcctccttgctgctcctcctacacacgggctccgccttcctgatggccttggcacaggctgttccctctgcctgggatgttctgttgcagaggattttcagtctttcctccttaagttactctgttttgtttatttttaaatttttttatttatttagagacagctctaactctgttgcccaagctagagggagtgcagtggcacagtcatggtgcactgccgcctcgacctcccagtctcgagcaatcctcccacctcaccctcccgagtagctgggattacaagcctgcgccaccacacccagctaatttttgtatttttgaagagactgggtctcactgtcgcccaggctggtcttgaattcatggcctcaagtgatcctcccacctcgacctcccaaagtgctgggattataggcgtgagccaccatgcccagccctgacagtatttgatgtatgtgttttcgtggtgctgtctgaaatgtaagccctgtgaggacaagtgtttggaccactttattcaccactctatccatggagtgaacagcagtgcctggtaccccatgggcacccagtaggtgcttggtgaatgaatgaaggtgcagagccaggcttgacatgttcctgagccctgtgaggttactgagatgcaatcattttgcagatgaagacactgagtcctggtgggccgtgaggtcagcgccagactggatcctgcggccgcctggctgtctgtccctctcgctggcctcgcacacccttcctgggaggaacaggagaggaggggaggtgtgcagggctggggtcactgactctgcttcccctgccctgcatggtgtccccacagggacagcatggacagtgtcaagcagagtgcggccctgtgcctccttcgactgtacaaggcctcgcctgacctggtgcccatgggcgagtggacggcgcgtgtggtacacctgctcaatgaccagcacatggtgagcccccagccctcacacccccggatacccagggctcccacctcagccctgacccccctggatgcccggggctcccacctcagccctcacacccccggatacccagggctcccacctcagcccacgcaccccctggatgcccggggctcccacctcagccctcacgcccccggatacccagggctcccacctcagccctcacgccccctggatgcccagggctcccacctcagccctcacgcccccggatacccagggctcccacctcagccctcacgcccccggatacccagggctcccacctcagccctcacgccccctggatgcctggggctcccacctcagccctgatccccctggattcctggagcttccccctcggcgctgacgttcaccagacaccagaaaccatgatccagtgtccccggtactcattacctgcccaagtgtccagaaaccctcccatccccatctctgacactcccctggctggccagggatcctgtccagtgacccccacacccctcaccaaccacccagtcccttagaaaatcccactctgtttctaatacctggagattcccccaacagcgcccatcacctgcgcaccagcgcagaaaccttgactgtcccacccccacagtcccaaccctctagagtctcgccccttcactgctccttacccagctgcctggggtcctgccagggacaccccacacacccaggtcagtgctggccatggcgcccgaggccccgtggcctcctcaccccacccctaaagcacgcacagtgacacatgtgcacacccctaaaccccatcttcccgactgcacacacatcccgaccctgtcccgctcctgagcctctgctctcaggtaccacctcccccaggggcctgacttgtctctcctctgcccctgcagggtgtggtcacggccgccgtcagcctcatcacctgtctctgcaagaagaacccagatgacttcaagacgtgcgtctctctggctgtgtcgcgcctgagccgggtgggtgtggcctagatattggctgctggaggtggccctggcatccctatgccctctgacacccctcaggcccccactctccctgagaggcagcccagcccaaggtttacaaactcaggctctgagctggattcatcctggctcggcctcttcctggctgggtggccctggacaagtggcttcacctccctggcctcagctgccccctgtgttcagtggggataataccggtgcccacctggaggcacagagcgctgtggatagagtgctcagaacagggcctcgcgggccgagcaccccgggagccagccgccctcatgacctcctccctctcccacttctctctctgtctcccactttccctcttctggctttgcctcccgcctctctctttcctgtgcagcctctcactcctgcctggcgtccctctcccacctttgctcctgtcctgcccaggaacatcccctgaggccttgtgcatgccaggctccatgtcgggtgacaccagggacacagatgagtcagaaccaagctctgctcttaaggagctccctgtccttctggcagggaggtgactcagtcacagattgtcagaaaaggggtgactcgtgctataatggaggtaggataggtcacccataggaggcacttaacacagcctgtgagtccacgaaggcttcctgggggcggcgatcccagaattgagacttagaatacacatgcgcatctcctgggcagtcaggaagaggcctggattcgcaggcaaagagaagaacacaccagctcgtgcatccactcattgtttctttttttttttttttttttttttttttgagacggagtctcgttctgtccccaggctggagtgcagtggcgcgatctcggctcactgcaagctcccaggttcacgccattctccagccttagcctcccgagtagctgggactacaggcgcctgccactatgcccggctaattttttgtatttttagtagagacagggtttcaccgtgttagccaggatgatctcgatctcctgacctcgtgatccacccgcctcggcctcctaaagtgctgggattaccggcgtgagccactgcgcctggcccactcattgtttctttctcaggttttttttttttttgagacagggtcttgctgtcgcccaggctggagtgcagtagtgcagccatggttcactgcagcctctggctcctaggctcaagcgatctctcgcctcagcctcccgagtagctgggactgcaggtgcctggctaatttttgtattttttgtagagatcggtcttgctttgtcgcccacactggtctcaaactcctggcttcaagtgatcctcccgcctcagcctccgaaagtgctgggattacaggtgtgagccactgcactcagcctcagtcattgtttcattcattcatcacacatctgagtactgcagtgtgccaggatgacagtgaggtaggaacacagaccagcacggaggtgggacagagcttcctggagaagggcttttcaaggttgaataggagtttgcaatgaggaaaaaaagtcacatgatctttctttttttttgagatggagtttcgctcttattgcccaggctggagtgcaatggcgtgatcttggctcactgcaacctctgcctcccgggttcaagcaattctcctgcctcagcctcccaagtagcatggatcacaggcatgtgccaccacgcccagctaatttttgtatttttagtagagatggggtttcaccatgttggtcaggcttgtcttgaactcctgatctcaggtgatccacccaccttggcctcccaaagtgctgggattacaggcgtgagccactgcacctggccatgatctttcaatctttcactaattccctgcctcttccccgaacctcttcctatctgaccttgtattaggcctagggacccaaaaaagggtcagacccaatccctgcccctgagtggcttcaagccttgtagggggactacaggaaacagcctccaggagccggtgcgctgtgtgctctgacggaggaagcctggggcatgggaggctcagagccgagtgaggagggggccctgggaaactgtcacacagaagggaaccagcagagacctttcctgcccaccacacaccagcattacttggaaagatcaaccagccgggcttagtcctagttttgcccccattcagtgtgcctgacgcttcctcgctcccttcccagagcctcagattcctgcttcataaaaccattgcattggtcgggcatggtggctcatgcctgtaaccccaggacattgcgggactgaggtgggagaattgcttgaggccatgagttcgagaccagcctgggcaacatagtgagaccctgtctctacaaaaaaaacccactaacaaaaccattaacactgacagcactgcccttggaaggcaccatttgctccaccctggcatgtggacccacgtgcccctcccaccccagcccccaacttatttcttgctcttccccgccagatcgtctcctctgcctccaccgacctccaggactacacctactacttcgtcccagcaccctggctctcggtgaagctcctgcggctgctgcagtgctacccgcctccaggtaatgaacgccgtgcactccccaacccggggtggcctgctgctggcatctgggggcctcctgctccacggcgcaccaggtgggactggagggtctgggtcaggatttctctgaagctggggcggttcctctgtccccttacgtggctgcactcggggaggcaagcaggcagcccgaggcccagcgcctaccctgtgcagcatcgtggatcagcctcatagctgaggtccctgctacccgggctctcactccagccctgttgcgagggactgttaactgtgcctgttttatagatgaggaatctgaggcttggagagggagctcctggcccagcgtcactcacccggtcagtgggtgattccaggccgtgctacctgaattaccatagccctgtcaggggttttcacatctgttgggaaccttcccctactgctcacagtcacaatagccagtgtgtatgaaactcctgtagtgagccaggcactgggcagggggcacctgcacctgccgaacagagctggcaaggaggaacagccagtgtgatatgcacacagggaaactgaggcttggaggtgagacatcaccattctaggcagtaagtggcagttggcccccagactctctgctctaaacccctccctctgccactgagctcccccgagcttctgtcgccttggctgactgacctcatggagcagtttcttcggaccctgtgctgaggggcttggcacacagtaggtgctaatgcaccagttccctccattcagccagcatgtccagcacctgccaggggccagggctgatgtacaccaccaaatctctgggtgtgcatgcctgtctgtgtgcatgcctgcatgcgtgcatgcgttcgcctgtgtgtgtcgatacctgcccgtgtgcatgcatgtctgcgtgcatcccctgtgtgtggatgtgtcattgtgtgtgcatctgtatgtatgcgtgtctgtgtctatatgtggcagtgttcatggtatctctgtgtccctctatgtgtgtacatgtgtatatatcagtgtgtgcatctacatgtgtacctgtgcatgcaagtggatgtgtacatgagtgtagatacctgtgtgcatgcctgtgtgtgcgtgtctcaatgcttgccagcatctacgtgtgtccatgcatgtccctctgcacatggtgtgtgtgtacacactctgagtatacgatatggaggtgacaccagaggcccatcgtgtgtgaagccagtgatgaattctgttgtgtggccctggggacatgtcttccttctctgggcctctttttcgtcctgtcaagaagggcttaagtcatgctctaagcccatgaccaccccagaaggcccagctggtaattctggggtacacccattgcaggcacctcacccactccaaccctcggtggtgtaggaactggagacacagccttgtcctgaggctgggcctgaggacacaccaaccctgtgtcacctccttttcagcaaatggtggtgggctattgccaatttgtttgcaagtcatttttttgtcatatgcattatgaaaagtttcccagcatccagataagtacagagatttcattacttggacttcacattttgccatgtatgcatgctcttgtttattttcttctgaaatatttaaaagtaaattacagacatcatgatgttttgcctttaaatatgttgttctgggccaggcacagtggctcacgcctgtaatcccagcaatctgggaggccgaggtagaaggatcacttgagctcaggaattcgagaccagtctggccaacatggcaaaaccccatctctacaaaaaatacaaaaaattagccaggtgtggtggtgcatgcctgtagtcccagctactcaggaggctgagatgggaagatcgcttgaacccgggaggtggaggttgcagtgagccaagattgtgccactgcactccagcttgggtgacagagtgagactctgtctcaaaaaaaaataaaaaaataaaaaaacagaatatatatcacagtacaatctaggatcacatattcaatcggattctgccaggctcagtggctaacactgtcatcccagcactttgggaggctgaggcagaaggatcgcttgagcccaggagtttgagatcagactggacaacatagttgccctgtttccaaaaaataggatttaaattggattctgtctttgttatttctcgtagtctggactagcccccctacacctgtttatggagaaaccaggagatgccattgctgtgtgtcccatggtggcgactgggctcattgctgccttgtggtgtattttagcttgttcctctatctggtgaattttcctgcggaaaattctgcagaaaaatctgcggaaccattttttgctggaacgcttgacagctcttgcatacacttgaaaacacgtcacattctaggaaacgtggtgattggtgctcctgtgagctgctggctggcatctgtcagtggtggagagctctggggggtgagggggcacctggttgagccttgtctcctttggcctcccagcctctaggccaggaggatggcaccgagtgtgcctgcagtggcctcttgctgaatggacacttgggtgggtggcttgtgcatttttgtcaggggctgctcagcactcacaccagtccttgggaaggcctgggtttgggggcacctctggggaaggttcctggagcttcctttgctctgtgagaaacctaaggagcctcagagctgcagatgaggaaactgaggctcacatggtgccacctcttgcccgagagggtcagagcaggaggagagcccaggtctggggatagatcttgtgtctccagaggtgccttgtctcaccatctctgctgggctgggaagaggttgagggagcagagaccctggccctgagctgcagaattctcgagtgtcagaggcaccccgagctcctcctttggaagacaggagctggggcatggccaccaccccagcaggtgtgccaggtgggcaggacactcagccgggggcgtccccttcgtttccccagaggatgcggctgtgaaggggcggctggtggaatgtctggagactgtgctcaacaaggcccaggagccccccaaatccaagaaggtgcagcattccaacgccaagaacgccatcctcttcgagaccatcagcctcatcatccactatgacaggtgcccgcctgggcctatcagggcctgatgcctggggccaggaaagaggggcatggaggcccggactcctgagtcctaggcagagggcagggaatcttgacttttaggtagggtaggaggaggatggggctgtgaagtgtcacctgtgaggttggtgctggggcccttcctgggggcagaattgctaggtatctttctctgggctcaaaggcccagttgtctgggtcactggaggtgcagtactgcgatgcaaggccggcaaggttaagacctggatccttgggggctgtgagatgggtcagctggggcccgagtcctccaccttctcctgtcagtttctctcaccatccctctcttgtggcccctgctggcagtgagcccaacctcctggttcgggcctgcaaccagctgggccagttcctgcagcaccgggagaccaacctgcgctacctggccctggagagcatgtgcacgctggccagctccgagttctcccatgaagccgtcaagacgcacattgacaccgtcatcaatgccctcaaggtgtgagcccttggagcccaccccgggcctgccacccccctcagaaagaccagaggctcagaggcccttgggtggccaaccctgtgccaacagggagtctaaaacacacctgggctctgctctccgccctcagacggagcgggacgtcagcgtgcggcagcgggcggctgacctcctctacgccatgtgtgaccggagcaatgccaagcagatcgtgtcggagatgctgcggtacctggagacggcagactacgccatccgcgaggagatcgtgagtgctgtggggtgcgggctggactcttgggtctgaggcaggaggtggctgggggcctggattcctaagtctaagggaggaggggctggggcctggactcctgggtctccagatgggggcagtggtgagcccagatccaggtgagtgaaagcccgacatggcctgcggcacactctctctcacacgccccggcggcaggtcctgaaggtggccatcctggccgagaagtacgccgtggactacagctggtacgtggacaccatcctcaacctcatccgcattgcgggcgactacgtgagtgaggaggtgtggtaccgtgtgctacagatcgtcaccaaccgtgatgacgtccagggctatgccgccaagaccgtctttgaggtcagcatccctgaccctgaccctatgaccccacgacaggacctagaggcagagcaaggatggccggggccgtggcgcctgccagcccgcagccaccctccttctcctgcactgccgtgacctcaaaatggggcctctgcctctctgggccaacccaggggacccagggctatggtctcatgggcctgatgtgaggagtccccagggcatgggcatggggcacccagtgtgcagtcctggcccccggatctcggtagtttccctctgccccaggaaaggggccccacacagtcctgttttttgtttgtttgtttgtttgtttctggagacggagtctcactctgttgcccaggctggagtggggagtgagtgccgtggtgcgatctcggctcactgcaacctcggcctcccagcgtcaagccattctcctgcctcagcctccccagtagctggtactacaggcacgcgccaccacacccagctaatttgtttgtatttttagtagagacggggtttcaccatgttacccaggctggtttgaaactcctgagctcaggcaatctgcccgcctcggcctcccaaagtaccaggattacaggcatgagccactgcttccggcccacagccctgttttacttcctgtgtgagcttgggcccgtcactcaacctttctgtgactcagtttcccacctataaccccacctgcagcagagctttcagtgttccaccagtcagtaggtggctgcacccaccgatcccggagagggcgctcattgttgtcctctccacgcccttccccaccccactcaggcgctccaggcccctgcctgtcacgagaacatggtgaaggttggcggctacatccttggggagtttgggaacctgattgctggggacccccgctccaggtgagggagcctcagcctgcaggggagaacacacatgcttctgaggggtccagggcttgggggatccccaggggtctcagggcaggcagtgatgggctcccatcctctcggcctccaccccaatccacctagcagggtaagaaaggagcttagtcccaggatcgtggacagagtgtgactgcggcccctgtctggtgcctggggagggccactcccctccagcagcttggggtcctgggacgggtccatcctagggaggggcacctctcgagggggtttctgggagagggcagtggaacctggccccgctgacacccactcctgcacacagccccccagtgcagttctccctgctccactccaagttccatctgtgcagcgtggccacgcgggcgctgctgctgtccacctacatcaagttcatcaacctcttccccgagaccaaggccaccatccagggcgtcctgcgggccggctcccagctgcgcaatgctgacgtggagctgcagcagcgagccgtggagtacctcaccctcagctcagtggccagcaccgacgtcctggtcagagccctgtccccccaccccacccctcttgcacacccccttcccgccctcccctcctcctgacccgaactgaccttccccaccccgaccgcgccaggccacggtgctggaggagatgccgcccttccccgagcgcgagtcgtccatcctggccaagctgaaacgcaagaaggggccaggggccggcagcgccctggacgatggccggagggaccccagcagcaacgacatcaacgggggcatggagcccacccccagcactgtggtgagtcccctggggtgggccctgccagggtgcctggggctgggtcctgccgggcgccgcctgtcctcaccgtgacctgcgcttcctacagtcgacgccctcgccctccgccgacctcctggggctgcgggcagcccctcccccggcagcacccccggcttctgcaggagcagggaaccttctggtggacgtcttcgatggcccggccgcccagcccagcctggggcccacccccgaggaggccttcctcaggtagcaccccctgggcccgggccccttctcgcggccacccccagggctgtcccttctcggcctctgtccccgttttccctgagcccctcccccgcccccgactcgctcctctctccatcctgatgccttcgccagccctggctgctgcctcccctgccccagcctccctgctcacgccctccctctgccactctggactccgccgaccctggccacccttcgttgtctcctttcctgtcaccgtttctcagcctgctcttccttttctccttctctccttccctcttccgtccctccctctctgtctctcttctgccctctcgctgcctatgtggaattggctgcctgccacgcctgtcttctcttgtctgctctgggattggatggctcagcgagctggagccgcctgcccccgagagccccatggctttgctggctgacccagctccagctgctgagtaaggggtggcctggggtgggaggtcggtcgggggggcggactcgggtgtccccagggagagttaggggactgggagccctcgtcaacgggttcctgatgagcagcagaggcagggacttggaggaaagggaaacttggtgtctgccgatgcgggggcacgggccagggttctattcccattggaggccactgctggatggatgcgaggttcctcgaggctctgtgaggggtctggatatgtggttctggggttctgtccttagggcttgttctcgcactcaatcgctctgggcctttgcccctccccaccaagttccttcccatctcactctgctccatgcctccagcccaggtcctgaggacatcggccctcccattccggaagccgatgagttgctgaataagtgagtcctgggagtggtgggggaggggaacgggacaggtgcggagcccaggccaggtgcagacaggcacccccgtcatcttgcgccccctgccccctcaggtttgtgtgtaagaacaacggggtcctgttcgagaaccagctgctgcagatcggagtcaagtcagagttccgacagaacctgggtgtgtcccgggggactgtgggaatgggtcggagggagaccttggggaaggggtcagagggactcagatggagctctgcctcccccacctactgcaggccgcatgtatctcttctatggcaacaagacctcggtgcagttccagaatttctcacccactgtggttcacccgggagacctccagactcatatcctctcaggcccggcccagcctcctgcctctccacgtcggccttcctcaccgtggggaagccggctgacccaggtccacacttctcttcagcctctcttgggcacgcaattagttctctgagattgagtgtctgcatctgttaagatgggggtgggattccttcccccaggacaggggatgacagtgaagtggtgtgtgggaggctttacttccagaactccacctgctccaggcctcattttgtccctgtctggcaccttccgtgtcctgccatcgtcctccactgggctccatgtcatgatgccagcaccgcctgcactcaggagccaggcctgcgggtccagacgctgatcaggcctgatctgggctgagtcactttgcctctctgggctctcctgtccccgctgtgaagtgtatgtagaccctcctcttcctcatagggttattgtgaagatcagagtgtctggaaaaccctggaagggcggctggaggtatcagtcccccctgcccgttctctgggcctccattgccacattcatgaaattagaaaagctcgacctgaaaactccttctggccgggcatgggggctcacacctgtaatcccagcactggcaggctgaggccagtggatcatttgaggtcaggagttcaagaccagcctggccaacatggtgaaaccccatctccactaaaaatacaaaaatcagctgggtggtagtggcacgcgactgtaatcccagctactcaggaggctgagacaggagaatcgcttgagcctgggaggtggtggttgtggtgagccgagattgtaccactacactccagtctgggcgacagtctcaaaaaaaagaaaaagaaaagaaaaaattccttcttcggtcgggcacggtggctcacgcctgtaatcctagcactttgagtggccaaggtggttggatcacgaggtcaggagatcgagaccattctggctaacatggtgaaaccccttctctactaaaaatacaaaaaattagccgggcgtggtggtgggcgcctgtagtcccagctactcgggaggctgaggcaggagagtggcgtgaacccaggaggcgaagttgcagtaagccgagattgcgccgctgcactccagcctgggcgacagcgagactccgtctcaggaaaaaaaaaaaaaaaaattccttctttcataatttccagaggctcgtgcaggcagctcagtggaggcagtgacaaaagaacatgagacccaggccttcccagtgggctactgacacggatgcagatgatgataacactaattgctaccatctttgtgtacttaccatgtgccgggcacacagacaagtacttgtgatggattcttttcttttctttttttaaatagagttgaggcctcgctatgttgcccaggctggtctcaaactcctgggctcagtgatcctccccaccttggcctcccaaagtgctggattacaggcgtgagccgccacacccggctggattatttcatcaactcctgaggacattttacacatgtccttgtgttgagacagggcctcactcacccaagctggaatgcagtggcatgaacactgctcactgcagcctcgaacttctgggctcaaggcatcctcctgcctcagcctcccaagtagctgggactacaggtgcacatcaccatgcctggctaatttttttgtagagatggggtcttgccatgttgcccaggcttacacatgtccagaggctaagagaggttaagtggttgcccacagccactcaggtggttaagagctgggattcaaacccaagtcagcctccagagctaatactattatgtctcagtgcggtgtgacattgtggaaggccaaaggaggcacctagggggcgcctcagaggtttccatagtatgaactttgtagttgaaccttgtaggattgagtccaggattgcaccatggggtccctcaaagacctgcaggcgggagctgccgggagctctggggttcctgacccagacctcccgggggcccacctcctctgtctggcttccttgactcctggcgggcacagctggctgtgcagaccaagcgcgtggcggcgcaggtggacggcggcgcgcaggtgcagcaggtgctcaatatcgagtgcctgcgggacttcctgacgcccccgctgctgtccgtgcgcttccggtgagtcaggtacggcgcggccggtgggcggagcctccggggtgaggggcggggcctaatggagcctccctttcacctcatcaggtacggtggcgccccccaggccctcaccctgaagctcccagtgaccatcaacaagttcttccagcccaccgagatggcggcccaggatttcttccagcgctggaagcagctgagcctgtgaggggtggggagggggcggagccaaagccgcgcctctgggtgggcgggtcgggccgtccaggtccctgacttgaaccttcccggtccccagccctcaacaggaggcgcagaaaatcttcaaagccaaccaccccatggacgcagaagttactaaggccaaggtgagagaccgcgggcgtgtttgccggcctatggctgctttgcttctctgagcctctgttttcccatctgtaaagtggggccaattcccatccccaagggttttttgggatctgggatgccactgtgtggtaactaacagctctggcacactctgacggcgccccccctcctcccagcttctggggtttggctctgctctcctggacaatgtggaccccaaccctgagaacttcgtgggggcggggatcatccagactaaagccctgcaggtgggctgtctgcttcggctggagcccaatgcccaggcccaggtgagtgctgctgtgggaggcctgaggccggcaggaaggccgcctgtcatctctgcgtccacccttcctgcctcactgttctttaattcacgtccccactttgaccctcctcctctcacatttctttgtccacttttactcctctttatctatcagtttaatctcctgtctccaacctctggtgttcctctcctcttcctgtccctccctgatttctacctttccatatcctttccacctttctctcatcttttataattttcttcctctctggcgcctctgttgatttcagtcttacatttttctctcctgtgtcttgtatcacctttctggcccctttatccttccttccttctatctcccttgggtcccgacttccctgggctccccatctcctctgagttctgcccccaatgcccccacccagatgtaccggctgaccctgcgcaccagcaaggagcccgtctcccgtcacctgtgtgagctgctggcacagcagttctgagccctggactctgccccgggggatgtggccggcactgggcagccccttggactgaggcagttttggtggatgggggacctccactggtgacagagaagacaccagggtttgggggatgcctgggactttcctccggccttttgtatttttatttttgttcatctgctgctgtttacattctggggggttagggggagtccccctccctccctttcccccccaagcacagaggggagaggggccagggaagtggatgtctcctcccctcccaccccaccctgttgtagcccctcctaccccctccccatccaggggctgtgtattattgtgagcgaataaacagagagacgctaacagccccatgtctgtgtccatcacccactgctaggtagtcaaagaagtggggtgagggcatgcagagtgtgggtggccaggcttcgcagcccatgggtgggactctggggagacagcagcagcagcagccgccgaagccccagctgcaaggccaccagacgcactcctgtgcctggttcctcagtccccaacaccaggtagcaagctctgggcagctgggcctggtagacctcatcttctgtcttctctggtggccctggctctggagaaagaacagggggcactgacatgacaagtagcatgctaacctttgcaagccacaccacatcctgatcccaagttctgaacgcgtggggtctctgaacacaggttttgggagcctcctgccaggggagggcctcggggctctagctggctgtcagcaacttgaagaccacaatgatgtcactcagctcaccctcttcctctttctcagccttggcccccattttcctggagaaactgtgcagctgcaggtgatcctcttagcaatacacatggcgaacacggcagcaacacaggagctcctgtagccttttccaggagcccacccgccccactgtacaaggcgggtggagggaaacaggcaggggccagtgggaggtggagtcgcacagctaagaaggggtgcagcccccgagttggagctcttgaccactgtgctgcattcatccgggcttcactggggtcacagcgccatcccaggtccctttctttgtctttctgggcccttaagggttctacgacaatttttccgttctaacccagaatcttgtgaaatcctcctccataccctcagcctatcagcaaagcctgtgcttttggcagttgtgcagagcgctggactgtgtggatatgggagcaagatcccctgtgttcaaatatggctctgccactcatgagctgagcctcagtttcctcatctgtaatatgggaatgatgaggtaatgggatagtcctcacctgtgaggatgaagtgatttcattctttcattacgtgtaaaggcactgggaagaggtgaggtctcagtgttaactattgttgactatgatccaggagattctgaagccaggcggggacctcccttcccctcccttcccatctgcatcaatgctcagatctcaaggaaaaccactgccctatggcccagtgcatactgggttcctccggatcctccaaccccacctcctactcccattttgtgcgacctgggactcagtgtccccgcctgcgcagtgggagcactgtgccttccgctgacctggtgggaagtgcgtggaggtgaccagggtatagaagtttcggaggaggcgccggcgctgttctggtgaaggctctgctgggaggaaaaggcggtgatgcagagcgcctccccggcccacgcccctcctacccctgcccctgcccctgtcctcagtcacctttatcccccaagggctccacggtgaagaggcagcgcttcagttccaggtggaggagcagcagcctgtgggaaagggaagggaatgtcatggctggggaagaggacatgacccccgacccactccctccatccgagccctacccgaggatgtctgtgtgaagggggaagccactgggcagcgcccggggtcccaacggcagacaggcccgcaacgggtccagcagtggctgccaccagcgctccagaagctgcagggggcgtggtcattgtgaggtcgtcatgggaaggcggggccggcgggggaggtcggggggtgtacaaggataggggcgtggtcaatcgggaggggcggggcctgcaagaagagtggagggcggagggcagaagggactggggaaggggcgaggcctggaagaatagaggcagaggcgggagcggccgatcttggcgggtaggtgaatgactggagcgcagtccagaagaggcggggctggggaaagatgccgctggcagggcagggtggtggggaagggccctcctggtagcgggtgtcctaagagcgaaagcgggacgtggcgcgggttcacctgtggatacaactggctgaggggtgggctcggcccgcagagtagacacagctccaggctcggcagcagagtcagggtcaggagccggtgtgggacctgaagcagggcacaggctggggctcatcgcggcccggcccctttccatcgcagatcccgcctcctcgcgactcggcccccaggtcacatccctccgtcggtgcccgccacccactcaccgtggggctcccgtgcggcaggtacaccgggtagtcgcgagcggtctgcggcggcagggaccccaccagccaggggagcagcacggcctcgggcgtccccagccgccaccaaccctctgttgctgccaccacccggccggacaccaccagactgacgaaggtcgtgcccgcggcctcagcgaacccggagagggcttcctgggtacgggaggcaggaggactgggagtcagcagacaagcgtagggggtggcagcgacttcccagatgggcagggaatggggagaaacccacagccagccccgagctcgcgcagtggccatgctcctacgtctcaccctctctgagcctgagttccttcactttcatacgaagtcacatccccaactcacactgtgaagtctgtgaaatctgattaaacatctagcctgggcgggcaaactgaagctaataatgtaaccgcagcagctaccgttcatccaggcctgttacatgccgagtaggcaccattagcaacgtagagaagccaagtcacctgctgagagtcacatgcctgggaggccgccacaccaggcaagtccacaagagcagtatttaagtagaggtagctagagatctgagaggcaggaggaagaacatgcactgaggttggaaacttgttgggatctcaggactgtgaggtagctgggtggaagtagactgtggatttagcaacaggttagggggtgccaggtgccacaggccttcaaacaccaggctgaggagctgggaccttgtcctgggggaggtggaggctgccggagggctgtgagcaggaaaggggcagagccagctctggatatagtagggttcttctggtggccgggtgtgatggctcacacctgtcatcccagcactatgggaggctgaggcgggaggactgcttgagcccaggagttcgagaccagcccgggcaacttaatggaaacccatccccaaccctagtccatctcttaaaaaaaaaaatagctgaatgtcagccgggcgcggtggctcatgcctgtaatcccagcactttgggaggctgaggcgggtggatcacgaggtcaggcgttcaagaccagcctggccaacatagtgaaaccctgtctctactaaaaatacaaaaaattagctgggccaggcgtggtgaccagcgcttataatcctagctactcgggaggttgaggcaggggaatcgtttgaacccaggaggcagaggttgcagtgagccaagattgcgccattgcactccagcccctgtgacagtgtaagactctgtctcaaaaaaaaaaaaaaaaaaaaaatagctgaatgtggtggcacagtgcctatagtgtcagctactggggaggctgagatgagaggatcacttgaatccaggagttcaaggctgcagtgagctatgactgagccactgtgctctagcctggatgacagagcaagaccctgtctcagaaaagaaagaaagatggcccaggcgcagtggctcacgcctgtcatcccagcactgtgggaggccaaggcaggtggatcacctgaggtaagaagttcgagaccagcttggccaacatggtgaaaccctgtctctactaaaaatacaaaaaattagccgggcgtagtggtgggcgcctgtaatcccagctgctcgggaagctgaggcaggagaattacttgaacccgggaggcgcaggctgcagtgagccgagatggtgccattgtactccagcctgggcaacaagagtgaaactacgtctcaaataaaaagagagaaagaaaagaaaaaagaaaagaaagagaaagaaaagaaaaaaaaaaaagaaaaaagattcttctgggaccaggtggggataggactggaagctgagaggataggaggaggttgggacaatggtccagaagaaagaggatgaggactgagccagggccagcagaacaggtgtaagagtttccatagcatccccagtacctgcaagagggacccctctggaggaatcacgcagtccacacactgggtcaggtccccgatgagctccgagtcccccaggaagctgtcgatgaggcaataactggcctaggagaggaagaagggaccagcctaggattcaagtgggcccagggtcagacaaccaagaacctgtgggaccaggctgccccaggggctgctgggaactgtagttcccaaatggcagtgcccaggtatcctaacttcccaccctcatgtcctgcaacctcaccctcaagtccttcttcagtctctccacgttgcggatattggtcagttcttcaagtcccacaagaaggacctagaagaatcatataggagaggatgggcgaggggctgggacttgaactcctgggtctgaaggaagagggggctgggactcccacttctgggtctggggactggggagtcaagattcctgggttctggccgggcgcggaggctcatgcctgtaattccagcactttgggaggccaaggtgggtggatcacttgaggtcaggagtttgagaccagcctggccaatatggtgaaaccccgtctctacaaaaaatacaaaaattagctgggcatggtggcacgtgcctgtaatcccagctacttgggaagctgaggcacgagaatcgcttgaacctgggaggcagaggttgcagtgagccgagatcaagccactgcactccagcctgggcaacagagcgagactccgtctcaaaacaaaacaaacaaacaaacaaaagattcctgggttctgaggaaggaagtgttggtggtctgcactcctaggtctgagggaaaaggatgctgagatctcagattcctggtctggggagaaaagaggactggtgagtctcaccatggctccaaacaccatttggagtagtctctccagcctcagctcagagatgcccacctcagatgacagaacaatgagggtgatgctgtggaatggaagtgagaagaatgagtcaaggcctggggaatcaggaaggggtatgttggagtccgcccattgatcctagaacaccagatacatcctctctcagaccaacctgcctttcttatagagaacatcagggatcaaagagggtaactggcttgctaaagatcccatagccaaattaacagctgcttttagagagctggaaggcctccggggtcatcttcaacagggactatcacccaggccctgtccctgtcccacgttccctcctggggacctgtcatggaagcttttccacaccacagtcgtgttctcggtcctcgcagagctcagctgcacctccagattctgcccaaacatgtggactccattgagggaaccgatgacagagaacgggagctaaggaggggttagggacatcagacaagagcacccccccatccccttcccccttaggacccaagtgtgccagctcccagccccatcctctttccatatgacctggcagtgcctctttggggaaccaggcttattggtccattgcctcctcggtcctacaaattcaacactgaaacttccccagcccctactgccttgaagacccagagtcaaaacaccgaacccccttcggtttagatacaggcgtccaaggccccacctgctgacgggcgggggcgccgccgcgactgctcctgcagaatagggggaccccgctggaggccgcgaggcacagcagatgcacagtgccgcccgtcccctcctcccccatttaggactcccaccgcggtccctcacgtggggactgtcagtgcgggtcttggagcatggcggtaatcagagtaactcggcctgtggtccggagccgccagagggcgagatggggagctgattggaagaggattaacttcccgccttcttcacccaactcaaacagaccctcaaaccctattcaggcacctcccccaaacccattaggttctcttccgccctagccggaagtcacggtacccctaacaaagatggcggcaaattgaatttgcaaagctttctagtttctccgaggaggtaaagagaaccaagaagccggattgaagatgatgactgcgccaaggcgttgcctagccaccatcctgtaggctttgatgatttacattctaaacggaaaaaacagctgtgcccggatcaaagattgcgatggtcccaaagcattgcctagcaaccacattccctgtaggtttccagtatatagtagtaaacaatgtgccctactcaaagatggcgaccgtggcggggcgttgccaagcaaccaccattcagcctgatatccattccaaggctgtaaacagctgtgccctgctcaaagatggcggcacgtcgaagtccgagcaccctccttggggcgaaatcgagaaaaacaccatctcccctacaaccttcgagggtggttgagtccagcgatcgttgcctagtaaccactaaaaaaaaggttgtttttgttattagaaaaaagaaaacaaggaaatcctttattttccagaataataaaaataatatcatttctgtaatgaatttatacatgatagcataccatgtaaaatgtgaaaaatcccttccccaatttttttcctaaaatacagtttaacgtagactattcatacgttttcacaaagatgatcaatatactaacatttccacactttcttttttgccatgaaaaagtatgtctatttcatcttaataatgtatttttataatctattttatggatgtgacaaattgatttgaccaattctgtattgatgtacattaggttgttgaactcctccagactagccaactagtgctgggacagcattttactgactttttaaaatgcccttatgaatatttttattattttacacaggcagcatttacttgtaatgacaaaagtatttatgattcatttttcccttcctcttccttcttgcagatcagcccatctttctagcataatttttaattttcctacttcctaaagtacatctttttctcttttttttttttttgggagaggggacagggtctcgttctgtcgcccaaggtggagtgcagtggaaccatctcggctaactgcaacctccgcctccaggattcaagcgattctcctgcctcagcctcctgagtagctgggattacaggtgtgcccccaccacgtccagctaatttttgtagtttttgtggagacagggtgtcgccatgttgcccaagctggtctcaaactctttggctcaaatgatccacccacctcagcctctcaaagtgctgggactacaggcaggagccaccatgcctggcctaggtaccattttaatcttccttcttgcctattgatattttttttcctttctctggattacttttatcttccttacaactttattaaaatgttagttacacaggcataaaagagggggctgctctagatgaaaagaaacttgagacataatgtctaaatatgtgtgtggtctttgtttggatcctgatacaaataaaccaactgtaaaaacacattttgagacaattggaacgtttgattacacacttactgttggatgatactaagaagttaattttgttacaggtaacaatggcatactagtaatgtaagaaagtgttcataaaattggaaagatgcctgccaagcacacaggagtaaaatcatatgattgtatggatttgaaggcttcagcaggccaggcgcggcggcttacgcctgtaatcccagcactttgggaggccaaggtgggcgggtcacctgaggtctggagttcgagaccagcctgaccaacatggagaaaccccggctctactaaaaatacaaaattagctgggcgtggtggcgcatgcctgtaaactcagctactcgggaggctgaggcaggataatcgcttgaacccaggaggtggaggctgccgtgagccgagactgtgccattgcactgcagcctgggcaacaagaacaaaactccatctcaaaaaaaaaaaaaaaaaaaaagcttcagcaaatgagactgtctcaaaaaaaaaagggcttccgcaggctcactgcctataatccgggcactctaggaggccaaaacgggtggatcacctgaggtcaggagtttgagaccagcctggccaacatggtaaaaccctgtctctaacaaaaatacaaaaatttgcctgcgaggtggcacacacctgtagtcccagctactggggaggcagaggcaggagaatcggtggaaccagggaggcagaggctgcagcgagccgacactgcgccactgcactccagtctgggcgacagagcgagattttgtcaaaaaaaaaataataaaataaaaaaaaataaaaataaaaataaaagataaaagaaaaatagaaacccaataaaaaataattttaaatgataaaggtaaaaacctttatcattaggctttctgtaagtacttttcaattggtgattattattattattattacttttttttttttgagacagcgcctcgctccgtcccccaggctggagtgcagtggcgcgatctctgttcactgcaagctccgccttccgggttcacgccattctcctgcctcagcctccggagtagctgggactacaggcgcccgccaccacgccccgctaatttttttttttttttttttggattttcagtagagacggggtttcaccgtgttagcaaggatggtctcgatctcctgacctcgtgatctgcccgccttggcctcccaaagtgc

SEQ ID NO: 9554 - protein, 977 aa, Homo sapiens [sequence omitted]

SEQ ID NO: 9555 - DNA, 1481 bp, Rattus norvegicus
  ref <308>: DATABASE ACCESSION NUMBER: EMBL / X53944
  ref <309>: DATABASE ENTRY DATE: 1993-09-12
ctctgaagagcctgatttagcccacattgctgtctgtcttttcctaggaacattttggagtcgcgttcctctgtgtgggccatggcacctctgagccagataagcacccacctcaactccacctgcggggcagaaaactccactggcgtcaaccgggcccgtccgcacgcctactacgccctgtcctactgtgctctcatcctagccatcatctttggcaacggcctggtatgtgctgctgtgctgagggagcgtgccctgcagaccaccaccaactacctagtggtgagcctggctgtggccgacctgctagtggccacgttggtgatgccgtgggtggtgtacttggaggtgacaggtggagtctggaatttcagccgcatttgctgtgacgtttttgtcaccctggatgtcatgatgtgtacagccagcatcctgaacctctgtgccatcagcatagacaggtacacagcggtggtcatgccagttcactatcagcacggcaccgggcagagctcctgtagacgtgtggcactcatgatcacagctgtgtgggtgctggcttttgctgtgtcctgccctctcctctttggtttcaacacaacaggggatcccagcatctgctccatctccaaccctgattttgtcatttactcttcagtggtgtccttctacgttcccttcggggtgactgtcctggtctatgccaggatctacatagtcctgaggcaaaggcaaagaaaacggatcctcactcgacagaacagccagtgcatcagtatcagacctggctttcctcagcagtcttcctgtctgaggctgcatcccattcggcagttttcaataagggccaggtttctgtcagatgccacaggacaaatggagcacatagaagacaaacaatatccccagaaatgccaggacccccttttgtcacacctgcagcccccctcacctggtcagacacatggggggctgaagcgctactacagcatctgccaagacactgccttgagacacccaagcttggaaggcggggcagggatgagccccgtggaaaggactcggaactccttgagccccaccatggcacccaagctcagcttagaggttcgaaaactcagcaacggcaggttatccacgtccctgaggctggggcccctgcagcctcggggagtaccacttcgagagaagaaggccacccagatggtggtcattgtgcttggagccttcattgtctgctggctgcccttcttcctgactcacgttcttaatacccactgtcaagcatgccacgtgtccccagagctttacagagccacaacgtggctaggctatgtgaacagtgccctgaatcctgtgatctataccaccttcaatgtggagttccgcaaagccttcctcaagatcctgtcctgctgaaggaggagaagagaccgcactcctttaccacttcgagatgccaggcagtttgaaccctg

SEQ ID NO: 9556 - protein, 446 aa, Rattus norvegicus
  ref <308>: DATABASE ACCESSION NUMBER: SWISS-Prot / P19020
  ref <309>: DATABASE ENTRY DATE: 2000-05-30
MAPLSQISTHLNSTCGAENSTGVNRARPHAYYALSYCALILAIIFGNGLVCAAVLRERALQTTTNYLVVSLAVADLLVATLVMPWVVYLEVTGGVWNFSRICCDVFVTLDVMMCTASILNLCAISIDRYTAVVMPVHYQHGTGQSSCRRVALMITAVWVLAFAVSCPLLFGFNTTGDPSICSISNPDFVIYSSVVSFYVPFGVTVLVYARIYIVLRQRQRKRILTRQNSQCISIRPGFPQQSSCLRLHPIRQFSIRARFLSDATGQMEHIEDKQYPQKCQDPLLSHLQPPSPGQTHGGLKRYYSICQDTALRHPSLEGGAGMSPVERTRNSLSPTMAPKLSLEVRKLSNGRLSTSLRLGPLQPRGVPLREKKATQMVVIVLGAFIVCWLPFFLTHVLNTHCQACHVSPELYRATTWLGYVNSALNPVIYTTFNVEFRKAFLKILSC

SEQ ID NO: 9557 - DNA, 1316 bp, Homo sapiens
  ref <308>: DATABASE ACCESSION NUMBER: Refseq / NM_033663
  ref <309>: DATABASE ENTRY DATE: 2001-10-26
taaagaaaacggatacattcgaaagcagctatgaaacatgcactaaggtctaatagggaagctggaaaagcagcactcaagtaatttcaccttagaggcaaaaatgggtgatttctttctgttcatttcatagtttctgagtcctgagaaaggcaaagtttgctttgcttgggtatgtctgctgtcagtaaatggctgcaggagccgaagtggtaaactcctcggtctccagaaatcagaagaaaattttaggaagccccttggcatcacgcacctccctctgggctatggcatctctgagtcagctgagtagccacctgaactacacctgtggggcagagaactccacaggtgccagccaggcccgcccacatgcctactatgccctctcctactgcgcgctcatcctggccatcgtcttcggcaatggcctggtgtgcatggctgtgctgaaggagcgggccctgcagactaccaccaactacttagtagtgagcctggctgtggcagacttgctggtggccaccttggtgatgccctgggtggtatacctggaggtgacaggtggagtctggaatttcagccgcatttgctgtgatgtttttgtcaccctggatgtcatgatgtgtacagccagcatccttaatctctgtgccatcagcatagacaggtacactgcagtggtcatgcccgttcactaccagcatggcacgggacagagctcctgtcggcgcgtggccctcatgatcacggccgtctgggtactggcctttgctgtgtcctgccctcttctgtttggctttaataccacaggggaccccactgtctgctccatctccaaccctgattttgtcatctactcttcagtggtgtccttctacctgccctttggagtgactgtccttgtctatgccagaatctatgtggtgctgaaacaaaggagacggaaaaggatcctcactcgacagaacagtcagtgcaacagtgtcaggcctggcttcccccaacaaaccctctctcctgacccggcacatctggagctgaagcgttactacagcatctgccaggacactgccttgggtggaccaggcttccaagaaagaggaggagagttgaaaagagaggagaagactcggaattccctgagtgccacttcgggagaagaaggcaacccaaatggtggccattgtgcttggggccttcattgtctgctggctgcccttcttcttgacccatgttctcaatacccactgccagacatgccacgtgtccccagagctttacagtgccacgacatggctgggctacgtgaatag

SEQ ID NO: 9558 - protein, 400 aa, Homo sapiens
  ref <308>: DATABASE ACCESSION NUMBER: SWISS-Prot / P35462
  ref <309>: DATABASE ENTRY DATE: 2002-06-15
MASLSQLSSHLNYTCGAENSTGASQARPHAYYALSYCALILAIVFGNGLVCMAVLKERALQTTTNYLVVSLAVADLLVATLVMPWVVYLEVTGGVWNFSRICCDVFVTLDVMMCTASILNLCAISIDRYTAVVMPVHYQHGTGQSSCRRVALMITAVWVLAFAVSCPLLFGFNTTGDPTVCSISNPDFVIYSSVVSFYLPFGVTVLVYARIYVVLKQRRRKRILTRQNSQCNSVRPGFPQQTLSPDPAHLELKRYYSICQDTALGGPGFQERGGELKREEKTRNSLSPTIAPKLSLEVRKLSNGRLSTSLKLGPLQPRGVPLREKKATQMVAIVLGAFIVCWLPFFLTHVLNTHCQTCHVSPELYSATTWLGYVNSALNPVIYTTFNIEFRKAFLKILSC

SEQ ID NO: 9559 - DNA, 1362 bp, Rattus norvegicus
  ref <308>: DATABASE ACCESSION NUMBER: EMBL / X54096
  ref <309>: DATABASE ENTRY DATE: 1993-09-12
ggcacgaggcactgggctgtaatggggctgcctggctccccttggcagtgggtgctgttgctgttggggctactgctccctcctgccacctccttctggctcctcaatgtgctcttccccccgcacaccacgcccaaggctgaactcagtaaccacacacggcctgtcatcctcgtgcctggctgcatggggaaccggctagaagccaagctggataaaccaaatgtggtaaactggctgtgctaccgaaagacagaggacttttttaccatctggctggatttcaacatgtttctacccctcggggtggactgctggattgataacaccagggttgtctacaaccgaagctctgggcacatgtccaatgcccctggtgtacagatccgtgtccctggctttggcaagacctactctgttgaatacttggatgacaacaagctagcaggctacctgaacacactggtgcagaatctggttaacaatgggtatgtgcgggatgagacagtgcgggccgcaccctatgactggcgtctggcaccccgccagcaggatgaatactaccagaagctggcaggactggtagaggagatgtatgctgcttacgggaagcctgttttccttattggacacagccttggctgcctacatgtgctccatttcttactgcgtcagccacagtcctggaaggaccacttcattgatggcttcatctctctcggggccccatggggcggttccatcaagcccatgcggatcctggcctcaggtgacaaccagggcatcccgatcatgtccaacataaagctgagagaagaacagcgcataaccacaacttccccctggatgtttccagctcaccacgtgtggcctgaagaccacgtgttcatttccacaccaaacttcaactacacaggccaagacttcgagcgtttttttgcagatcttcattttgaagaaggctggcacatgtttctacagtctcgtgacctactagcaggcctcccagcgcctggtgtagaagtatattgtctatacggtgtaggcatgcccacagcccacacctacatctatgaccacaactttccctacaaagacccggtggctgcactctatgaagatggggacgacactgtagccacacgtagcactgagctctgtggccaggtgcagggccgccagtcacagggtgtacacttgctccgcatgaatgggacagatcatctcaacatggtcttcagcaataagacactggagcatattaatgctatcctactgggtgcctacccgcatggcactcctaagtccccaaccgccagcctaggtcccccaccaacggaataaagacttactgttatgaaa

SEQ ID NO: 9560 - protein, 440 aa, Rattus norvegicus
  ref <308>: DATABASE ACCESSION NUMBER: SWISS-Prot / P18424
  ref <309>: DATABASE ENTRY DATE: 2002-06-15
MGLPGSPWQWVLLLLGLLLPPATSFWLLNVLFPPHTTPKAELSNHTRPVILVPGCMGNRLEAKLDKPNVVNWLCYRKTEDFFTIWLDFNMFLPLGVDCWIDNTRVVYNRSSGHMSNAPGVQIRVPGFGKTYSVEYLDDNKLAGYLNTLVQNLVNNGYVRDETVRAAPYDWRLAPRQQDEYYQKLAGLVEEMYAAYGKPVFLIGHSLGCLHVLHFLLRQPQSWKDHFIDGFISLGAPWGGSIKPMRILASGDNQGIPIMSNIKLREEQRITTTSPWMFPAHHVWPEDHVFISTPNFNYTGQDFERFFADLHFEEGWHMFLQSRDLLAGLPAPGVEVYCLYGVGMPTAHTYIYDHNFPYKDPVAALYEDGDDTVATRSTELCGQVQGRQSQGVHLLRMNGTDHLNMVFSNKTLEHINAILLGAYPHGTPKSPTASLGPPPTE

SEQ ID NO: 9561 - DNA, 1744 bp, Homo sapiens
  ref <308>: DATABASE ACCESSION NUMBER: EMBL / M12625
  ref <309>: DATABASE ENTRY DATE: 2000-03-04
tgaggcctgactttttcaataaaacattgtgtagttctgggcctcctgctgccccggctctgtttcccctggcgccaagagaagaaggcggaactgaacccaggcccagagccggctccctgaggctgtgcccctttccggcaatctctggccacaacccccactggccaggccgtccctcccactggccctagggcccctcccactcccacaccagataaggacagcccagtgccgctttctctggcagtaggcaccagggctggaatggggccgcccggctccccatggcagtgggtgacgctgctgctggggctgctgctccctcctgccgcccccttctggctcctcaatgtgctcttccccccgcacaccacgcccaaggctgagctcagtaaccacacacggcccgtcatcctcgtgcccggctgcctggggaatcagctagaagccaagctggacaaaccagatgtggtgaactggatgtgctaccgcaagacagaggacttcttcaccatctggctggatctcaacatgttcctaccccttggggtagactgctggatcgataacaccagggttgtctacaaccggagctctgggctcgtgtccaacgcccctggtgtccagatccgcgtccctggctttggcaagacctactctgtggagtacctggacagcagcaagctggcagggtacctgcacacactggtgcagaacctggtcaacaatggctacgtgcgggacgagactgtgcgcgccgccccctatgactggcggctggagcccggccagcaggaggagtactaccgcaagctcgcagggctggtggaggagatgcacgctgcctatgggaagcctgtcttcctcattggccacagcctcggctgtctacacttgctctatttcctgctgcgccagccccaggcctggaaggaccgctttattgatggcttcatctctcttggggctccctggggtggctccatcaagcccatgctggtcttggcctcaggtgacaaccagggcatccccatcatgtccagcatcaagctgaaagaggagcagcgcataaccaccacctccccctggatgtttccctctcgcatggcgtggcctgaggaccacgtgttcatttccacacccagcttcaactacacaggccgtgacttccaacgcttctttgcagacctgcactttgaggaaggctggtacatgtggctgcagtcacgtgacctcctggcaggactcccagcacctggtgtggaagtatactgtctttacggcgtgggcctgcccacgccccgcacctacatctacgaccacggcttcccctacacggaccctgtgggtgtgctctatgaggatggtgatgacacggtggcgacccgcagcaccgagctctgtggcctgtggcagggccgccagccacagcctgtgcacctgctgcccctgcacgggatacagcatctcaacatggtcttcagcaacctgaccctggagcacatcaatgccatcctgctgggtgcctaccgccagggtccccctgcatccccgactgccagcccagagcccccgcctcctgaataaagaccttcctttgctaccgtaagccctgatggctatgtttcaggttgaagggaggcactagagtcccacactaggtttcactcctcaccagccacaggctcagtgctgtgtgcagtgaggcaagatgggctctgctgaggcctgggactgagct

SEQ ID NO: 9562 - protein, 440 aa, Homo sapiens
  ref <308>: DATABASE ACCESSION NUMBER: SWISS-Prot / P04180
  ref <309>: DATABASE ENTRY DATE: 2002-06-15
MGPPGSPWQWVTLLLGLLLPPAAPFWLLNVLFPPHTTPKAELSNHTRPVILVPGCLGNQLEAKLDKPDVVNWMCYRKTEDFFTIWLDLNMFLPLGVDCWIDNTRVVYNRSSGLVSNAPGVQIRVPGFGKTYSVEYLDSSKLAGYLHTLVQNLVNNGYVRDETVRAAPYDWRLEPGQQEEYYRKLAGLVEEMHAAYGKPVFLIGHSLGCLHLLYFLLRQPQAWKDRFIDGFISLGAPWGGSIKPMLVLASGDNQGIPIMSSIKLKEEQRITTTSPWMFPSRMAWPEDHVFISTPSFNYTGRDFQRFFADLHFEEGWYMWLQSRDLLAGLPAPGVEVYCLYGVGLPTPRTYIYDHGFPYTDPVGVLYEDGDDTVATRSTELCGLWQGRQPQPVHLLPLHGIQHLNMVFSNLTLEHINAILLGAYRQGPPASPTASPEPPPPE

SEQ ID NO: 9563 - DNA, 2871 bp, Rattus norvegicus
  ref <308>: DATABASE ACCESSION NUMBER: EMBL / X54249
  ref <309>: DATABASE ENTRY DATE: 1992-05-13
gaattccgagaaaggaaattagggggaaatgtcttaaaggaaagagggaaaggagagattcacggagataaagatcttggatccaaacaaaccgagccaatccgaattaagatctttgaaggggggtacaaatccaatgaagattatgtgtatgtcagaggacgtggacggggaaagtacatttgtgaagagtgtggaattcgctgtaagaagccaagcatgctgaaaaaacatatacgcactcatactgatgttcggccttatgtatgcaagttatgtaattttgccttcaagacgaaaggaaacctaacgaaacacatgaaatctaaggcccacatgaaaaagtgtctggagctgggcgtctcgatgacatcagtagatgagacagaaacagaagaagcagaaaatatggaagatttgcacaaaacatctgagaagcacagcatgtccggcatttcaactgaccaccagttctcagatgctgaggaatctgacggagaggatggagacgataatgatgaagatgatgaagacgatgatgactttgatgaccaaggagatttgacacccaaaacaaggtcaagaagcaccagtcctcagcctcctcggttctcctccttgcctgtcaatgttggcgctgtagcccacggcgtcccctcagatagctctctgggacattcgtcattgatcagctatttggttactctacccagtattcaggtcactcagctcatgacacccagtgactcttgtgaagacacccagatgacagaatatcagaggctgttccagagcaaaagcacagactccgaacccgacaaagacaggttagacatcccaagctccatggacgaagaggccatgttgtcttcagagccaagctcctccccaagggacttctccccctcaagctaccggtcctcaccaggatatgattcttcaccctgtcgagataattcgccaaagaggtatctgatacccaaaggagatttgtcacccagaagacatttatcacctagaagagatctatcacccatgaggcatctgtcaccaagaaaagaagctgcattgaggagagagatgtcccaaggggatgcttcaccaaggaggcatttgtccccacggagaccattgtctcctggaaaagacattacaacaagaagggacctctctcccagaagagagagaagatatatgactaccattagagcaccatctcccagaagggctttataccataacccaccattaccaatggggcagtatctgcaaacagagccaattgtattggggcctcctaatctaagaagaggattacctcaggttccttacttcagtctctatggagaccaagaaggtgcttatgaacatcacggctccagccttttccctgagggtcctactgactatgtcttcagtcatcttcccctccattctcagcagcaagtgcgagctcctatccccatggtgccagttggtgggatccaaatggttcactccttgccgccagccatttccggtttacatcctccacccacattgcctctgcccacagagggctctgaggagaagaaaggagcacccggggaggccctcacccaggatccctacaccctttccaggcggcatgagaaacaagcccctcacgttttgcagtcatctggtctacctagttctccctcctccccacggctattgatgaaacagagtacttcagaagacagcctaaattccacagagagagaacaggaggaaaacatacagacttgtacaaaagccatcgcctcactccggattgcaacagaagaggcagctctgcttggggctgatcagcccacatgggtgcaggagtccccgcagaaacccttggagagtgcacacatcagcattagacactttagcgggcctgagccaggtcagctctgtacctcagccgcccaccctgacttacacgatggtgaaaaggacacttttggtacatcacagactgcagtagcccaccccacgttttacagcaagggcagtgtggatgagaagcaggtggactttcagagcagcaaggaattatctttaagcacagaggaaggcaatgagccctcatcggaaaagaatcgactccattgatctgcaatgcatggacacattcatttccacatttccccctccccccttttgtttttgtttttctagggatagaaataaacgagttgatagcatgcctgtcctaagttacagtagttggctattataaatacttttgttattttgaagacaattagggaaattaacaagtcatcttgagcctgaccaaaacaaaatttgaaattaacctattgggtctggtaactttgaaaaaaattgtacagatgtttgtgccttttctttactttgcttatattcttataagcatttttttagcggtaatttgtacatattttagaatttgtgtatctgctttgtaataaatgtaatctctttcctcttttggacacttggatcttaacgacgtaaagcaaagcagcatctatatatattgtgaggttgcactaaaacatatttttatatgataaaactgaacagcttttatgtacagctctcattctgtaatactaatatttattttgtttcataaactgtacatttttttcttaatgttgtggattgcttttctatgtgaagcatgggttccctgttgcgtaactagaacagaaatgtccattgtaagcaagatatttaaactagaatatcttattctgcacttatgcataagttacaaaaaaaagataaagaacgtatcagtcggttcttaacctgtaaattctttttgtctcttgtttgccggattgacaataacttaagagctgggaattc

SEQ ID NO: 9564 - protein, 707 aa, Rattus norvegicus
  ref <308>: DATABASE ACCESSION NUMBER: SWISS-Prot / CAA38150
  ref <309>: DATABASE ENTRY DATE: 2003-02-01
EFRERKLGGNVLKERGKGEIHGDKDLGSKQTEPIRIKIFEGGYKSNEDYVYVRGRGRGKYICEECGIRCKKPSMLKKHIRTHTDVRPYVCKLCNFAFKTKGNLTKHMKSKAHMKKCLELGVSMTSVDETETEEAENMEDLHKTSEKHSMSGISTDHQFSDAEESDGEDGDDNDEDDEDDDDFDDQGDLTPKTRSRSTSPQPPRFSSLPVNVGAVAHGVPSDSSLGHSSLISYLVTLPSIQVTQLMTPSDSCEDTQMTEYQRLFQSKSTDSEPDKDRLDIPSSMDEEAMLSSEPSSSPRDFSPSSYRSSPGYDSSPCRDNSPKRYLIPKGDLSPRRHLSPRRDLSPMRHLSPRKEAALRREMSQGDASPRRHLSPRRPLSPGKDITTRRDLSPRRERRYMTTIRAPSPRRALYHNPPLPMGQYLQTEPIVLGPPNLRRGLPQVPYFSLYGDQEGAYEHHGSSLFPEGPTDYVFSHLPLHSQQQVRAPIPMVPVGGIQMVHSLPPAISGLHPPPTLPLPTEGSEEKKGAPGEALTQDPYTLSRRHEKQAPHVLQSSGLPSSPSSPRLLMKQSTSEDSLNSTEREQEENIQTCTKAIASLRIATEEAALLGADQPTWVQESPQKPLESAHISIRHFSGPEPGQLCTSAAHPDLHDGEKDTFGTSQTAVAHPTFYSKGSVDEKQVDFQSSKELSLSTEEGNEPSSEKNRLH

SEQ ID NO: 9565 - DNA, 2871 bp, Rattus norvegicus; identical to SEQ ID NO: 9563
  ref <308>: DATABASE ACCESSION NUMBER: EMBL / X54249
  ref <309>: DATABASE ENTRY DATE: 1992-05-13

SEQ ID NO: 9566 - protein, 707 aa, Rattus norvegicus; identical to SEQ ID NO: 9564
  ref <308>: DATABASE ACCESSION NUMBER: SWISS-Prot / CAA38150
  ref <309>: DATABASE ENTRY DATE: 2003-02-01

SEQ ID NO: 9567 - DNA, 573 bp, Rattus norvegicus
  ref <308>: DATABASE ACCESSION NUMBER: EMBL / X54510
  ref <309>: DATABASE ENTRY DATE: 1994-11-30
gcttcctgtccggtgagcgtcgaacgactgaagcggtggcccatagtgcattgcgatggcgggtaggcgtgtgtaggcggagccagggccggaagtagaacggtggcggcggcggtgactctggcagctcgggactcagtgcaagtaccacagactcaaccatgactgttcagaggatcttcaggctctcctctgtccttcggtcagcagtctctgtgcatttgaggaggaacattggtgttacagctgtggcgtttaataaggaacttgatcctgtacagaaactcttcttggacaagataagagagtacaaagcaaagcgactggcgtctggaggacctgttgatactggcccagaatatcagcaagaggtggacagagagctttttaagcttaaacaaatgtatggtaaaggagagatggataagtttcctaccttcaattttgaggatcccaaatttgaagtcctcgacaaaccccagtcctgaggaacatacaaaccatgtggtaatttgtcatgacttagttgtacaattaatctaaaaaattcaaataaacattcacttcacagct

SEQ ID NO: 9568 - protein, 108 aa, Rattus norvegicus
  ref <308>: DATABASE ACCESSION NUMBER: SWISS-Prot / P21571
  ref <309>: DATABASE ENTRY DATE: 2002-06-15
MTVQRIFRLSSVLRSAVSVHLRRNIGVTAVAFNKELDPVQKLFLDKIREYKAKRLASGGPVDTGPEYQQEVDRELFKLKQMYGKGEMDKFPTFNFEDPKFEVLDKPQS

SEQ ID NO: 9569 - DNA, 1151 bp, Homo sapiens
  ref <308>: DATABASE ACCESSION NUMBER: EMBL / BC002872
  ref <309>: DATABASE ENTRY DATE: 2001-07-13
ggcacgagggccgcccgactgccatcgcccggcccggccgcgcccgcggaaccagaccaggcagatcgggagcggtgccgagaaaaatttccttactagatgacatttcatcgcaatgtccgatcgtttggggcaaattaccaagggcaaggatgggaaaagcaagtactcgactctcagcctgtttgataagtataaaggaaaatcagtagacgcgattagatcctcagttattcctagacatggcttacagagtcttgggaaagttgctgcagcccggcgcatgccaccgcctgcaaacctgccaagcttgaagtctgaaaacaaaggaaacgaccccaacatcgtgatagtacccaaggacgggacgggatgggcaaacaagcaggatcagcaagacccaaagagttccagtgcgacggcctctcagccgccggagtcgctgccgcagccgggtttgcagaaatctgtctccaatttgcagaaaccgacacagtcaatcagtcaggagaatacaaattcagtgccaggtggaccaaagtcatgggcacagctgaatggaaagccagtaggacacgaaggtggtttaaggggctcaagccgactgttatccttctctcccgaggaatttccgacgctgaaagcagctggagggcaggacaaggctggcaaagaaaagggcgtcttagatctgtcgtatgggccaggaccaagcctccgccctcagaatgtgacaagctggagggagggcggtgggcgacacataatttctgccacgtctctgagcacctccccaactgagctgggcagcaggaactcgagtacgggagatggagccccctcctcggcatgtaccagcgattctaaggacccctctctccgcccggctcagcctgtccgaaaaggggcttcacagttcatgggaaatgtataccacccacctacataccatgacatgcttcctgcttttatgtgttcgccgaagtcatcagaaaaccagggtacagtggaacgaggctcttttccccttcctcagctccgccttgaacctcgagttccttttagacagttccagatgaatgaccaagactggaattatggtgctagattagtaaacatgacttttaatgagtaaaaaaaaaaaaaaaaaa

SEQ ID NO: 9570 - protein, 108 aa, Homo sapiens
  ref <308>: DATABASE ACCESSION NUMBER: SWISS-Prot / P18859
  ref <309>: DATABASE ENTRY DATE: 2002-06-15
MILQRLFRFSSVIRSAVSVHLRRNIGVTAVAFNKELDPIQKLFVDKIREYKSKRQTSGGPVDASSEYQQELERELFKLKQMFGNADMNTFPTFKFEDPKFEVIEKPQA

SEQ ID NO: 9571 - DNA, 573 bp, Rattus norvegicus; identical to SEQ ID NO: 9567
  ref <308>: DATABASE ACCESSION NUMBER: EMBL / X54510
  ref <309>: DATABASE ENTRY DATE: 1994-11-30

SEQ ID NO: 9572 - protein, 108 aa, Rattus norvegicus; identical to SEQ ID NO: 9568
  ref <308>: DATABASE ACCESSION NUMBER: SWISS-Prot / P21571
  ref <309>: DATABASE ENTRY DATE: 2002-06-15

SEQ ID NO: 9573 - DNA, 1151 bp, Homo sapiens; identical to SEQ ID NO: 9569
  ref <308>: DATABASE ACCESSION NUMBER: EMBL / BC002872
  ref <309>: DATABASE ENTRY DATE: 2001-07-13

SEQ ID NO: 9574 - protein, 108 aa, Homo sapiens; identical to SEQ ID NO: 9570
  ref <308>: DATABASE ACCESSION NUMBER: SWISS-Prot / P18859
  ref <309>: DATABASE ENTRY DATE: 2002-06-15

SEQ ID NO: 9575 - DNA, 573 bp, Rattus norvegicus; identical to SEQ ID NO: 9567
  ref <308>: DATABASE ACCESSION NUMBER: EMBL / X54510
  ref <309>: DATABASE ENTRY DATE: 1994-11-30

SEQ ID NO: 9576 - protein, 108 aa, Rattus norvegicus; identical to SEQ ID NO: 9568
  ref <308>: DATABASE ACCESSION NUMBER: SWISS-Prot / P21571
  ref <309>: DATABASE ENTRY DATE: 2002-06-15

SEQ ID NO: 9577 - DNA, 1151 bp, Homo sapiens; identical to SEQ ID NO: 9569
  ref <308>: DATABASE ACCESSION NUMBER: EMBL / BC002872
  ref <309>: DATABASE ENTRY DATE: 2001-07-13

SEQ ID NO: 9578 - protein, 108 aa, Homo sapiens; identical to SEQ ID NO: 9570
  ref <308>: DATABASE ACCESSION NUMBER: SWISS-Prot / P18859
  ref <309>: DATABASE ENTRY DATE: 2002-06-15

SEQ ID NO: 9579 - DNA, 573 bp, Rattus norvegicus; identical to SEQ ID NO: 9567
  ref <308>: DATABASE ACCESSION NUMBER: EMBL / X54510
  ref <309>: DATABASE ENTRY DATE: 1994-11-30

SEQ ID NO: 9580 - protein, 108 aa, Rattus norvegicus; identical to SEQ ID NO: 9568
  ref <308>: DATABASE ACCESSION NUMBER: SWISS-Prot / P21571
  ref <309>: DATABASE ENTRY DATE: 2002-06-15

SEQ ID NO: 9581 - DNA, 1151 bp, Homo sapiens; identical to SEQ ID NO: 9569
  ref <308>: DATABASE ACCESSION NUMBER: EMBL / BC002872
  ref <309>: DATABASE ENTRY DATE: 2001-07-13

SEQ ID NO: 9582 - protein, 108 aa, Homo sapiens; identical to SEQ ID NO: 9570
  ref <308>: DATABASE ACCESSION NUMBER: SWISS-Prot / P18859
  ref <309>: DATABASE ENTRY DATE: 2002-06-15

SEQ ID NO: 9583 - DNA, 811 bp, Rattus norvegicus
  ref <308>: DATABASE ACCESSION NUMBER: EMBL / X54617
  ref <309>: DATABASE ENTRY DATE: 1991-01-11
tccatcttccctccaggcaccatccaggaggattacctgagggagctgctcaccaccatgggcgaccgcttcacagatgaggaagtggatgagctgtacagggaggcccccatcgacaaaaaggggaatttcaactacatcgagttcacgcgcatcctcaagcacggagcgaaagacaaagatgactgaagagctgtggcttccagccaaatgtccctgttgccattgggtcctcctggagcggtcggctgcccttgcttttctgccttttgcttcccttgttttgtatttattctcagccactttgggccacgtgtaccttcatcatcagactggaaacgggactttctgtcattgttcgatgagaacgtaaggtaatttaacttacagacagtcttgtcccttgtaataactgcagccacagagtcagtatattttttcagagaaagttatccactcaattttttctgaatgataattaaactttctgataaaatacttagttgtttagccttctttccctacttgacttttagttttaccgagtctttccccaagcagggtagatgaggtgaatgacagcctgtcagagtttgctcccactcttcagttgtgtttccagttgtgtttccatcggcaatcccagtttcctctactcctagtttattctctctctccctcctggaaatcaagataaagctccttgggtacccaagactttgtcttccagtttggaaaataaggcctgaattctcgatccctggggtagctcagactccccttaaacgtctctctgcattacttcctgcag

SEQ ID NO: 9584 - protein, 171 aa, Rattus norvegicus
  ref <308>: DATABASE ACCESSION NUMBER: SWISS-Prot / CAA38437
  ref <309>: DATABASE ENTRY DATE: 2001-10-16
SSKRAKTKTTKKRPQRATSNVFAMFDQSQIQEFKEAFNMIDQNRDGFIDKEDLHDMLASMGKNPTDEYLDAMMNEAPGPINFTMFLTMFGEKLNGTDPEDVIRNAFACFDEEAIGTIQEDYLRELLTTMGDRFTDEEVDELYREAPIDKKGNFNYIEFTRILKHGAKDKDD

SEQ ID NO: 9585 - DNA, 2175 bp, Rattus norvegicus
  ref <308>: DATABASE ACCESSION NUMBER: EMBL / X54793
  ref <309>: DATABASE ENTRY DATE: 1992-05-06
gcagaaatgcttcgactacccacagtccttcgccagatgagaccagtgtctcgggcactggctcctcatctcactcgggcctatgccaaagatgtaaaatttggtgcggatgctcgagccttaatgcttcaaggtgtagaccttttagccgatgctgtagctgttacaatggggccaaagggaagaacagtgattattgaacagagttggggaagtcccaaagtaacaaaagatggggtcactgttgcaaagtcaattgatttaaaggataaatacaaaaatatcggagctaagcttgttcaggatgttgccaataacacaaatgaagaggctggggatggcaccaccactgccactgttctggcacggtctattgccaaggagggctttgagaagatcagcaaaggggctaatccagtggaaatccggagaggtgtgatgttggctgttgatgctgtaattgctgaacttaagaaacaatctaaacctgtgacaacccctgaagaaattgctcaggttgctacaatttctgcaaacggagacaaagacattgggaacatcatttctgatgcaatgaagaaggttggaagaaagggtgtcatcacagtgaaggatggaaaaaccctgaatgatgagctagaaattattgaaggcatgaagtttgatagaggatatatttccccatattttattaacacatcaaaaggtcaaaaatgtgaattccaagatgcctatgttttgttgagtgaaaagaaaatttctagtgttcagtccattgtacctgctcttgaaattgccaatgctcaccggaagcccttggtcataattgctgaagatgttgatggagaagctcttagcacactggttttgaacaggctaaaagttggtcttcaggttgtagcagtcaaagctccagggtttggggacaacaggaagaaccagcttaaagatatggctatcgctactggtggtgcggtgtttggagaagagggtttgaatctaaatcttgaagatgttcaagctcatgatttagggaaagttggagaggtcatcgtcaccaaagatgatgccatgcttttgaaaggaaaaggtgacaaagctcacattgaaaaacgtattcaagaaatcactgagcagctagacatcaccactagtgaatatgagaaggaaaagctgaacgagcgacttgctaaactctcagatggagtagccgtgttgaaggttggagggacaagtgatgttgaagtgaatgagaagaaagacagagttacagatgctctcaatgctacaagagcagctgttgaagaaggcattgttctaggagggggctgtgctctacttcggtgcatcccagccttggattcattaaagcctgctaatgaagatcagaagataggtatagaaattattaaaagagcacttaaaattcctgcaatgacgattgctaagaatgcaggtgttgaaggatctttgatagttgaaaaaattctgcagagttcctcagaggttggctatgatgccatgcttggagattttgtgaacatggtggaaaagggaatcattgatccaacaaaggttgtaagaactgctttactggatgctgctggggtggcccccctgctaactacagccgaagctgtagtgacagaaattcctaaagaagagaaggaccctggaatgggtgcaatgggtggaatgggagggggtatgggaggtggcatgttctaactcctagaatagtgctttgcccttatcaatgaactgtggcaggaagctcaaggcaggttcctcaccaataacttcagagaagtcacctgaagaaaatgactgaagagaaggctggctgatcactgtaaccatcagttactggtttcctttgacaatacataatggtttactgctgtcattgtccatgcctacagataatttattttgtatttttgaataaagacatttgtacattcctgatgctgggtgcaagagccagtgtcctgctttcaacttaaatcactgaggcatctctactgttctgttagcatcaggactgtagcgctgtgtcaccacatgagaagttcagaagcagcctttctgtggagggtgagaatgattgtgtacagagtagagaagtatccaattatgtgacaacctttgtgtaataaaattttgtttaaagtt

SEQ ID NO: 9586 - protein, 573 aa, Rattus norvegicus; identical to SEQ ID NO: 8844
  ref <308>: DATABASE ACCESSION NUMBER: SWISS-Prot / P19226
  ref <309>: DATABASE ENTRY DATE: 2001-10-16

SEQ ID NO: 9587 - DNA, 476 bp, Homo sapiens
  ref <308>: DATABASE ACCESSION NUMBER: EMBL / BF063615
  ref <309>: DATABASE ENTRY DATE: 2000-10-18
ttctttttttaactttaaacaaatttttattacacaaaggttgtcacataattggatacttctctactttgtacacaattattctcactctccacagaaaggtattttgatgcttacagtgctgggtataattgttgatgccactcattgccctgttgcattggagaggacttggctgtatatgctgaatttcaaaccagtgagccttggtgagacgcttaggccaagcatgaagtggacacactggtccccatagaaccagcagcagtaaaagaagaggaaagcatagcaccatcttttctggtctcagtgttggggctcctgctgagaacagaggctgtgattagtccaaagctcaaaagctgttgtctgcctttcttctctaacccttcgagccctgtgtgtatagggaaggggaagaaatattctgagctttcagaaggagaatcctagggtttggcagattaacttcttgt

SEQ ID NO: 9588 - protein, 573 aa, Homo sapiens
  ref <308>: DATABASE ACCESSION NUMBER: SWISS-Prot / P10809
  ref <309>: DATABASE ENTRY DATE: 2002-06-15
MLRLPTVFRQMRPVSRVLAPHLTRAYAKDVKFGADARALMLQGVDLLADAVAVTMGPKGRTVIIEQSWGSPKVTKDGVTVAKSIDLKDKYKNIGAKLVQDVANNTNEEAGDGTTTATVLARSIAKEGFEKISKGANPVEIRRGVMLAVDAVIAELKKQSKPVTTPEEIAQVATISANGDKEIGNIISDAMKKVGRKGVITVKDGKTLNDELEIIEGMKFDRGYISPYFINTSKGQKCEFQDAYVLLSEKKISSIQSIVPALEIANAHRKPLVIIAEDVDGEALSTLVLNRLKVGLQVVAVKAPGFGDNRKNQLKDMAIATGGAVFGEEGLTLNLEDVQPHDLGKVGEVIVTKDDAMLLKGKGDKAQIEKRIQEIIEQLDVTTSEYEKEKLNERLAKLSDGVAVLKVGGTSDVEVNEKKDRVTDALNATRAAVEEGIVLGGGCALLRCIPALDSLTPANEDQKIGIEIIKRTLKIPAMTIAKNAGVEGSLIVEKIMQSSSEVGYDAMAGDFVNMVEKGIIDPTKVVRTALLDAAGVASLLTTAEVVVTEIPKEEKDPGMGAMGGMGGGMGGGMF

SEQ ID NO: 9589 - DNA, 1159 bp, Rattus norvegicus
  misc_feature (1)..(1159): n=a, c, g or t
  ref <308>: DATABASE ACCESSION NUMBER: EMBL / X55286
  ref <309>: DATABASE ENTRY DATE: 1995-07-20
ccgattaggtccccaaaacgggggacgtccatggggatgaacatgatttccaagggtacggagaaagcacttctgaagcttcaagagttctttcctgagctgcagattctggcggtcagtggtaactattgcaccgacaagaaacctgctgccataaactggatcgaagggagaggaaagactgtggtttgtgaagctgtcattccagccaaggtggtgagagaagtattaaagagcactacggaagctatggttgacgtaaacattaataagaatcttgtgggctctgccatggctggtagcataggaggctacaacgcccatgctgccaacatcgtcactgccatctacattgcatgtgcccaggatgcagcacagaatgtggggagttcaaactgtattactttaatggaagcaagtggtcccncnnntgaagacttgnnnnncagctgnnncatgccgtctatagagatcggaaccgtgggtggtgggaccaaccttctacctcagcaagcctgcctgcagatgctaggtgttcaaggggcgtgcaaagacaatcctggagaaaatgcacggcagcttgcccgaattgtgtgtggcactgtaatggctggtgagttgtccttgatggcagcattggcagcaggacatcttgtcagaagtcacatggttcacaacagatcaaagataaatttacaagatctgcagggaacatgcaccaagaaggcagcttgagcatcctgacatacttgaactgaaacacgggcattgggttctcaaggtctaacatgaaatctgtgaattaaaaatgtcagtgcagtgtcttgtggaagatgaacgtgatcagtgagcctgcttggtttctggctctttcagagacgtctgcggtcctttgcaccagactcctcagacgtgggaactatggttctttccgtgccgtattctagaaagatctcatgtggatgtcatggtgctctgagcaccacagatgtgactgcagctcgtttctaaaagctgccacaagctggaagctggtgttttgacgaaatgatggatcttggtgatcagtgtggggctcacctccaatgggttaaaatggagttttaaatgacactgtagctgacagaactctcgatttttatttattcagtctgggcgg

SEQ ID NO: 9590 - protein, 887 aa, Rattus norvegicus; identical to SEQ ID NO: 3589
  ref <308>: DATABASE ACCESSION NUMBER: SWISS-Prot / P51639
  ref <309>: DATABASE ENTRY DATE: 2002-06-15

SEQ ID NO: 9591 - DNA, 2904 bp, Homo sapiens; identical to SEQ ID NO: 3590
  ref <308>: DATABASE ACCESSION NUMBER: EMBL / M11058
  ref <309>: DATABASE ENTRY DATE: 1999-07-02

SEQ ID NO: 9592 - protein, 888 aa, Homo sapiens [sequence omitted]

SEQ ID NO: 9593 - DNA, 1159 bp, Rattus norvegicus; identical to SEQ ID NO: 9589
  misc_feature (1)..(1159): n=a, c, g or t
  ref <308>: DATABASE ACCESSION NUMBER: EMBL / X55286
  ref <309>: DATABASE ENTRY DATE: 1995-07-20

SEQ ID NO: 9594 - protein, 887 aa, Rattus norvegicus; identical to SEQ ID NO: 3589
  ref <308>: DATABASE ACCESSION NUMBER: SWISS-Prot / P51639
  ref <309>: DATABASE ENTRY DATE: 2002-06-15

SEQ ID NO: 9595 - DNA, 2904 bp, Homo sapiens; identical to SEQ ID NO: 3590
  ref <308>: DATABASE ACCESSION NUMBER: EMBL / M11058
  ref <309>: DATABASE ENTRY DATE: 1999-07-02

SEQ ID NO: 9596 - protein, 888 aa, Homo sapiens [sequence omitted]

SEQ ID NO: 9597 - DNA, 1159 bp, Rattus norvegicus; identical to SEQ ID NO: 9589
  misc_feature (1)..(1159): n=a, c, g or t
  ref <308>: DATABASE ACCESSION NUMBER: EMBL / X55286
  ref <309>: DATABASE ENTRY DATE: 1995-07-20

SEQ ID NO: 9598 - protein, 887 aa, Rattus norvegicus; identical to SEQ ID NO: 3589
  ref <308>: DATABASE ACCESSION NUMBER: SWISS-Prot / P51639
  ref <309>: DATABASE ENTRY DATE: 2002-06-15

SEQ ID NO: 9599 - DNA, 2904 bp, Homo sapiens; identical to SEQ ID NO: 3590
  ref <308>: DATABASE ACCESSION NUMBER: EMBL / M11058
  ref <309>: DATABASE ENTRY DATE: 1999-07-02

SEQ ID NO: 9600 - protein, 888 aa, Homo sapiens [sequence omitted]

SEQ ID NO: 9601 - DNA, 1159 bp, Rattus norvegicus; identical to SEQ ID NO: 9589
  misc_feature (1)..(1159): n=a, c, g or t
  ref <308>: DATABASE ACCESSION NUMBER: EMBL / X55286
  ref <309>: DATABASE ENTRY DATE: 1995-07-20

SEQ ID NO: 9602 - protein, 887 aa, Rattus norvegicus; identical to SEQ ID NO: 3589
  ref <308>: DATABASE ACCESSION NUMBER: SWISS-Prot / P51639
  ref <309>: DATABASE ENTRY DATE: 2002-06-15

SEQ ID NO: 9603 - DNA, 2904 bp, Homo sapiens; identical to SEQ ID NO: 3590
  ref <308>: DATABASE ACCESSION NUMBER: EMBL / M11058
  ref <309>: DATABASE ENTRY DATE: 1999-07-02

SEQ ID NO: 9604 - protein, 888 aa, Homo sapiens [sequence omitted]

SEQ ID NO: 9605 - DNA, 2153 bp, Rattus norvegicus
  ref <308>: DATABASE ACCESSION NUMBER: EMBL / X55446
  ref <309>: DATABASE ENTRY DATE: 1992-05-29
gagggctaaaatggagctgctgggattcactacgcttgctcttgtggtttcggtgacttgcctcagcctcctttcagtgtggacaaaactgcgcactagggggaggctgcccccggggccccaccccccttcccattattgggaatctactgcaactgaacctcaaggacatcctgcatcgctttccaagctggccaaagagtacgggcctgtttacacgctgtactttggaacctctcctactgtggtcctgcatggctatgatgtggtgaaggaggcgcttctccagcaaggggatgagttcctcgggagaggacctctgcccatcatcgaagatacccataagggatatggactcattttcagtaatggagagaggtggaaagtcatgcgacgcttctccctcatgactctgaggaacttcggaatggggaagagaagcctagaggagagggtgcaggaggaagcctggtgccttgtggaggaattacaaaaaacaaaagctcagccctttgaccccaccttcatcctggcctgtgctccctgcaacgtgatctgctccattcttttcaacgatcgattccagtacaacgacaagacgttcctcaaccttatggatcttttaaataaaaattttcaacaagtgaactccgtgtggtgccagatgtacaacctttggccaacgatcataaagtatctccctggaaagcatatagaatttgcaaaaagaattgatgatgttaaaaacttcattcttgaaaaagtgaaggaacaccagaagtccctggatcctgccaaccctcgggactacattgactgttttctcagcaagattgaggaggagaaggacaacctgaagtctgagttccatctggagaacttggctgtctgtgggtctaacttgtttacggcaggcaccgagacaaccagcaccaccctgagattcgggctcctgctccttatgaagtatccagaggtgcaagccaaagttcatgaggaacttgaccgtgtgattggacgccaccaaccccccagcatgaaggacaagatgaagctgccttataccgatgctgtattgcatgagattcaaagatacatcactctggttggttccagtctgccccatgctgtggtccaggacacaaaattcagagactatgtcatccccaagggtactactgtactcccgatgctgtcttccgtcatgctggatcaaaaggagtttgccaacccagagaagtttgatccaggacactttctggataaaaatggctgcttcaagaagacagactactttgttcccttctcccttggaaagcgggcctgtgttggtgagagtttggcccggatggagctcttcctgttcttcaccacccttctgcaaaagttttccctgaagactctggtggagcccaaggaccttgacatcaagcctattactaccgggattatcaatttgccgccaccttacaagctgtgccttgttcctagataagggtttatccttttaatcattcaaatcaaagtaattgtttcctttttctataaatattctttttatgctaagcactgcctaggccagaaacatcatgcatgaaaaccacatggacatttatttcgatttaaaaatctaggtcttaaaagcttccaggacacaggcagtgtgtctgtgtccctcaactgctctagaaaccaggccccaagcacaactgacaccagatatgcaagaccctcatcagacgccacctacaagtagcactgtgtgctcttctgtagctttggaaatagaattgttttctgtcattgtttcaatagagaaattaatgtaatggcctacgttcattttcctgttcacacttaaaaacatttacatgatttgtgccacattcacaaaataaattctcaccctgacaataaaaaaaaaggaattcctgttggccgagttgtcagtcagcgtgaactctgccaccagctccctaagaaggggcattgaaggacccttcataggtttttggaggtaataaagccaggatatcatagagccttaagcggaccattgcagcactagctttcaggtgggggaattccaaaaaaaaaaaaaaaaaaaaaaaaaaaaaaaaaaaaaaaaaaaaaaaaaaaaaaaaaaaggaatt

SEQ ID NO: 9606 - protein, 494 aa, Rattus norvegicus
  ref <308>: DATABASE ACCESSION NUMBER: SWISS-Prot / P24470
  ref <309>: DATABASE ENTRY DATE: 2002-06-15
MELLGFTTLALVVSVTCLSLLSVWTKLRTRGRLPPGPTPLPIIGNLLQLNLKDIPASLSKLAKEYGPVYTLYFGTSPTVVLHGYDVVKEALLQQGDEFLGRGPLPIIEDTHKGYGLIFSNGERWKVMRRFSLMTLRNFGMGKRSLEERVQEEARCLVEELQKTKAQPFDPTFILACAPCNVICSILFNDRFQYNDKTFLNLMDLLNKNFQQVNSVWCQMYNLWPTIIKYLPGKHIEFAKRIDDVKNFILEKVKEHQKSLDPANPRDYIDCFLSKIEEEKDNLKSEFHLENLAVCGSNLFTAGTETTSTTLRFGLLLLMKYPEVQAKVHEELDRVIGRHQPPSMKDKMKLPYTDAVLHEIQRYITLLPSSLPHAVVQDTKFRDYVIPKGTTVLPMLSSVMLDQKEFANPEKFDPGHFLDKNGCFKKTDYFVPFSLGKRACVGESLARMELFLFFTTLLQKFSLKTLVEPKDLDIKPITTGIINLPPPYKLCLVPR

SEQ ID NO: 9607 - DNA, 566 bp, Homo sapiens
  misc_feature (1)..(566): n=a, c, g or t
  ref <308>: DATABASE ACCESSION NUMBER: EMBL / AW450584
  ref <309>: DATABASE ENTRY DATE: 2000-02-21
cggccgctcagcatgtccgggcactttctgctcgcacccatccccgagtcctcctcggactacctactgcccaaggacatcaaactggcggtactgggcgccggccgcgtgggcaagagcgcaatgatcgtgcgcttcctgaccaagagattcattggagactatgaaccgaatacaggcaagctgtattcacggctggtctatgtcgagggggaccagctctccctgcagatccaggatactcccgggggcgtccagatccaagacagcctcccccaggtcgtcgattccctgtccaaatgcgtgcagtgggccgagggttttctgctggtctattccatcacagactatgacagctacttgtccatccgacccctttatcagcacatccggaaggtccaccctgactctaaagcccctgtcatcatcgtgggcaacaagggggaccttttgcatgcccggcaggtgcagacacaggacggtattcagctagccaatgagctgggcagcctgttccttgaaatttccactagcganaactaccaagatgtctgtgatgtgtttca

SEQ ID NO: 9608 - protein, 490 aa, Homo sapiens; identical to SEQ ID NO: 5075
  ref <308>: DATABASE ACCESSION NUMBER: Refseq / NP_000760
  ref <309>: DATABASE ENTRY DATE: 2002-11-05

SEQ ID NO: 9609 - DNA, 4259 bp, Rattus norvegicus
  ref <308>: DATABASE ACCESSION NUMBER: EMBL / X55660
  ref <309>: DATABASE ENTRY DATE: 1993-09-12
aaaaaagaggattccgtggcttaaaaaaaaagtttgaaagcctctgacttaatagtttccaccaccaaggaaactgaggcccagagagaggaaatgacctgggtaagatctccgagggaccagtagttgaacagggactaggagttaaaatttcatgggaggtgcctgtaacaggacctgccttggggtctctgctggaaagagagacctgattgggtttcccagcagtcttcagtggcttgctccgtggctgcctcagccaggtctccagcagccacacctggggatctggcccccgtcctgtcctccagccccacccacctcggctccatgccccccccagtcagcttcgggaccctggcagtgagcaggcacgtggcagccaaggccctgtgaccaggccagggagacggagctctggggtcccagtcacctgcccccccatggagctgagaccctggttgctatgggtggtagcagcagcaggagccttggtcctgctagcagctgaagctcgcggccagaagatcttcaccaacacgtgggctgtgcacatttctggaggcccagctgtggctgatagtgtggcacggaagcatgggttccacaacctgggccagatcttcggtgactattaccacttctggcacagagcagtgacaaagcggtccctgtcgcctcaccgcccgcggcacagccggctacagagggtgcctcaagtgaagtggctggagcagcaggtagccaagcaaagggccaagagggacgtgtatcaggagcccacagaccccaagttccctcagcagtggtacctgtctggggtcactcagcgagacctgaatgtgaaggaagcctgggcccagggcttcacagggcgtggcattgtggtctccatcctggatgacggcattgaaaagaaccatcctgacttggcaggcaattatgacccgggagccagctttgatgtcaatgaccaggaccctgacccacagcctcggtacacgcagatgaatgacaacaggcacggcactcggtgtgccggggaagtggcagcggtggccaacaatggtgtctgtggtgtaggtgtagcttacaatgcccggattggaggggtgcgtatgttggatggcgaggtgactgacgcggtagaggcacgttcgctgggcctgaatcccaaccacatccacatctacagcgccagctggggccccgaggacgacggcaagaccgtggatgggccagcccggctcgccgaggaggccttctttcggggagttagccagggccgcggagggctgggctccatctttgtctgggcctcagggaatgggggccgggaacatgacagctgtaactgtgacggctacaccaacagtatctacacgctgtccatcagcagtgccacacaattcggcaacgtgccctggtacagtgaggcctgctcctccacactggccaccacctacagcagtggcaaccagaatgagaagcagattgtgacaactgacttgaggcagaagtgcactgagtctcacacaggcacctcagcctccgcccctttggcagctggtatcattgctctcaccctggaggccaacaagaacctcacctggcgggacatgcagcacctggtggtgcagacctcaaagccagcacatctcaacgctaacgattgggccaccaatggcgtgggccggaaagtgagccattcctatggctacgggctgttggatgcaggtgccatggtggccctggcccagaactggacaacagtggccccccagcggaagtgcatcattgaaatcctggcagagcccaaggacattggcaaacggctagaggtgcgcaagaccgtgacagcgtgcctgggtgagcccaaccacatctccagactggaacacgttcaggcacggctcaccctgtcttacaatcgccgtggtgacctggctatccacctcatcagccccatgggcacccgttccaccctattagctgccagaccacatgactactctgctgatggatttaatgactgggctttcatgacaactcattcctgggatgaggacccctctggcgagtgggtcctagagattgaaaataccagcgaggccaacaactatgggacgctgaccaagttcactctcgtcctatatggcacagcctctgagggtctctctgcacctccagagagcagcggctgcaagaccctcacatccagccaggcctgcgtggtgtgtgaggaaggtttctcactgcaccagaaaagctgtgtccagcgttgcccaccaggcttcacaccccaagtccttgatacacactacagcactgagaatgatgtggagatcatccgtgccagcgtctgcaccccctgccacgcctcatgtgccacttgccagggcccagctcccacagactgcctcagctgccccagccatgcctccctggaccctgtggagcaaacctgctcccggcaaagccagagcagccgagagtcccgacctcagcagccacctcccgcactgcgcccagaggtggaagtggagccccggttgcgggctgggctggcctctcacctgccggaggtcctggccggcctcagctgccttatcatcgctctcatctttggcatcgtcttcctcttcctgcatcggtgttcaggcttcagcttccggggagtgaaagtgtacaccatggaccgtggcctcatctcctacaaggggctgcctcctgaggcctggcaggaggagtgcccatctgactcagaagaggatgagggccggggcgagaggaccgcctttatcaaagaccagagcgccctttgatgagcccactgcccaccctatcaaatcgatcccttcctcggcactttttaattcaccaaagtatttttttatcttgggactgggtttggaccctagctgggaggtgagaggggcagagacccttgggcctacctgtttgcctgaggtggggtcccgggagcctcaccccccaccaaccctccatgtggaggaaggagtaaatctttagggcagcttcctgcagagtgaagaggggcagcctttctgactccctggccagctgcagccttgcccctcccctgcccctcagaaagcaataatggtccccatccaggcaacagggaggctggccaggaggtacttgaagaaggtggccacctctccaagggcttttgcatcccctgaccctctctggctcaggatgagcctctgaagaagcttgcagtcacaggaagggaccaaagcaaacgaggcactctccagtgtgcctgcactcttgctctcagcctgcctctgcactccaggtctccacctcagctggtagccaggctgagctagacctgcacaggtcaggctctggggccttatgctggtgtcctgaccatcctctatggcaccccccccccaagccagggccttgttttctgagcccggggctgcctgggcagttggcgctcacagtccaggagcccctgggtgggtggtggggagggacggtggctcctcccacctcccacccgatgctgctttcccctgtggggatctcaggagctgtttgaggatatattttcactttgtgattattcactttagatgctgatttttttttttttgtatttttaatgggggtagcagctggaccattcaccttctcctacccatgtccaccctgcctttcccatggctgcccagctctgaggcagagggaatcactaagccccaagtcctgaagaggcaggccagccagctgggctccaggaaagggggtcatggtgggaggggtaggctgacatcatctgtttcaaatggggttgtgccacaggcttttgggttgctggctctccaagtgccaggggtgggcaggtggcaccaccaagcccaaactaacactgtgccctggtggagaaagcattggcctatgatgccccccaaaccccctgttctgatgtgcctttcgcacccctcccattaggacaatcagtcccctcccacttgggcctcctcttttctttttcctagcccttctcggtacccaacctacctgtccagggtgccccttgctctcctgcccacccctagcggccatccaggctggttttgtaagatgctgggttggtgcacagtcatttttttttccttgtaatttaaacaggcctggcattgttggttctatttaatggacacgagataatgttagaggttttaaagtgattaaacgtgcagactatgcaaacc

SEQ ID NO: 9610 - protein, 793 aa, Rattus norvegicus
  ref <308>: DATABASE ACCESSION NUMBER: SWISS-Prot / P23377
  ref <309>: DATABASE ENTRY DATE: 2001-10-16
MELRPWLLWVVAAAGALVLLAAEARGQKIFTNTWAVHISGGPAVADSVARKHGFHNLGQIFGDYYHFWHRAVTKRSLSPHRPRHSRLQRVPQVKWLEQQVAKQRAKRDVYQEPTDPKFPQQWYLSGVTQRDLNVKEAWAQGFTGRGIVVSILDDGIEKNHPDLAGNYDPGASFDVNDQDPDPQPRYTQMNDNRHGTRCAGEVAAVANNGVCGVGVAYNARIGGVRMLDGEVTDAVEARSLGLNPNHIHIYSASWGPEDDGKTVDGPARLAEEAFFRGVSQGRGGLGSIFVWASGNGGREHDSCNCDGYTNSIYTLSISSATQFGNVPWYSEACSSTLATTYSSGNQNEKQIVTTDLRQKCTESHTGTSASAPLAAGIIALTLEANKNLTWRDMQHLVVQTSKPAHLNANDWATNGVGRKVSHSYGYGLLDAGAMVALAQNWTTVAPQRKCIIEILAEPKDIGKRLEVRKTVTACLGEPNHISRLEHVQARLTLSYNRRGDLAIHLISPMGTRSTLLAARPHDYSADGFNDWAFMTTHSWDEDPSGEWVLEIENTSEANNYGTLTKFTLVLYGTASEGLSAPPESSGCKTLTSSQACVVCEEGFSLHQKSCVQRCPPGFTPQVLDTHYSTENDVEIIRASVCTPCHASCATCQGPAPTDCLSCPSHASLDPVEQTCSRQSQSSRESRPQQPPPALRPEVEVEPRLRAGLASHLPEVLAGLSCLIIALIFGIVFLFLHRCSGFSFRGVKVYTMDRGLISYKGLPPEAWQEECPSDSEEDEGRGERTAFIKDQSAL

SEQ ID NO: 9611 - DNA, 4180 bp, Homo sapiens
  ref <308>: DATABASE ACCESSION NUMBER: EMBL / X17094
  ref <309>: DATABASE ENTRY DATE: 1993-09-12
gcggggaagcagcagcggccaggatgaatcccaggtgctctggagctggatggtgaaggtcggcactcttcaccctcccgagccctgcccgtctcggccccatgcccccaccagtcagccccgggccacaggcagtgagcaggcacctgggagccgaggccctatgaccaggccaaggagacgggcgctccagggtcccagccacctgtcccccccatggagctgaggccctggttgctatgggtggtagcagcaacaggaaccttggtcctgctagcagctgatgctcagggccagaaggtcttcaccaacacgtgggctgtgcgcatccctggaggcccagcggtggccaacagtgtggcacggaagcatgggttcctcaacctgggccagatcttcggggactattaccacttctggcatcgaggagtgacgaagcggtccctgtcgcctcaccgcccgcggcacagccggctgcagagggagcctcaagtacagtggctggaacagcaggtggcaaagcgacggactaaacgggacgtgtaccaggagcccacagaccccaagtttcctcagcagtggtacctgtctggtgtcactcagcgggacctgaatgtgaaggcggcctgggcgcagggctacacagggcacggcattgtggtctccattctggacgatggcatcgagaagaaccacccggacttggcaggcaattatgatcctggggccagttttgatgtcaatgaccaggaccctgacccccagcctcggtacacacagatgaatgacaacaggcacggcacacggtgtgcgggggaagtggctgcggtggccaacaacggtgtctgtggtgtaggtgtggcctacaacgcccgcattggaggggtgcgcatgctggatggcgaggtgacagatgcagtggaggcacgctcgctgggcctgaaccccaaccacatccacatctacagtgccagctggggccccgaggatgacggcaagacagtggatgggccagcccgcctcgccgaggaggccttcttccgtggggttagccagggccgaggggggctgggctccatctttgtctgggcctcggggaacgggggccgggaacatgacagctgcaactgcgacggctacaccaacagtatctacacgctgtccatcagcagcgccacgcagtttggcaacgtgccgtggtacagcgaggcctgctcgtccacactggccacgacctacagcagtggcaaccagaatgagaagcagatcgtgacgactgacttgcggcagaagtgcacggagtctcacacgggcacctcagcctctgcccccttagcagccggcatcattgctctcaccctggaggccaataagaacctcacatggcgggacatgcaacacctggtggtacagacctcgaagccagcccacctcaatgccaacgactgggccaccaatggtgtgggccggaaagtgagccactcatatggctacgggcttttggacgcaggcgccatggtggccctggcccagaattggaccacagtggccccccagcggaagtgcatcatcgacatcctcaccgagcccaaagacatcgggaaacggctcgaggtgcggaagaccgtgaccgcgtgcctgggcgagcccaaccacatcactcggctggagcacgctcaggcgcggctcaccctgtcctataatcgccgtggcgacctggccatccacctggtcagccccatgggcacccgctccaccctgctggcagccaggccacatgactactccgcagatgggtttaatgactgggccttcatgacaactcattcctgggatgaggatccctctggcgagtgggtcctagagattgaaaacaccagcgaagccaacaactatgggacgctgaccaagttcaccctcgtactctatggcaccgcccctgaggggctgcccgtacctccagaaagcagtggctgcaagaccctcacgtccagtcaggcctgtgtggtgtgcgaggaaggcttctccctgcaccagaagagctgtgtccagcactgccctccaggcttcgccccccaagtcctcgatacgcactatagcaccgagaatgacgtggagaccatccgggccagcgtctgcgccccctgccacgcctcatgtgccacatgccaggggccggccctgacagactgcctcagctgccccagccacgcctccttggaccctgtggagcagacttgctcccggcaaagccagagcagccgagagtccccgccacagcagcagccacctcggctgcccccggaggtggaggcggggcaacggctgcgggcagggctgctgccctcacacctgcctgaggtggtggccggcctcagctgcgccttcatcgtgctggtcttcgtcactgtcttcctggtcctgcagctgcgctctggctttagttttcggggggtgaaggtgtacaccatggaccgtggcctcatctcctacaaggggctgccccctgaagcctggcaggaggagtgcccgtctgactcagaagaggacgagggccggggcgagaggaccgcctttatcaaagaccagagcgccctctgatgagcccactgcccaccccctcaagccaatcccctccttgggcactttttaattcaccaaagtatttttttatcttgggactgggtttggaccccagctgggaggcaagaggggtggagactgtttcccatcctaccctcgggcccacctggccacctgaggtgggcccaggaccagctggggcgtggggagggccgtaccccaccctcagcaccccttccatgtggagaaaggagtgaaacctttagggcagcttgccccggccccggccccagccagagttcctgcggagtgaagaggggcagcccttgcttgttgggattcctgacccaggccgcagctcttgcccttccctgtccctctaaagcaataatggtcccatccaggcagtcgggggctggcctaggagatatctgagggaggaggccacctctccaagggcttctgcaccctccaccctgtcccccagctctggtgagtcttggcggcagcagccatcataggaagggaccaaggcaaggcaggtgcctccaggtgtgcacgtggcatgtggcctgtggcctgtgtcccatgacccacccctgtgctccgtgcctccaccaccactggccaccaggctggcgcagccaaggccgaagctctggctgaaccctgtgctggtgtcctgaccaccctcccctctcttgcacccgcctctcccgtcagggcccaagtccctgttttctgagcccgggctgcctgggctgttggcactcacagacctggagcccctgggtgggtggtggggaggggcgctggcccagccggcctctctggcctcccacccgatgctgctttcccctgtggggatctcaggggctgtttgaggatatattttcactttgtgattatttcactttagatgctgatgatttgtttttgtatttttaatgggggtagcagctggactacccacgttctcacacccaccgtccgccctgctcctccctggctgccctggccctgaggtgtgggggctgcagcatgttgctgaggagtgaggaatagttgagccccaagtcctgaagaggcgggccagccaggcgggctcaaggaaagggggtcccagtgggaggggcaggctgacatctgtgtttcaagtggggctcgccatgccgggggttcataggtcactggctctccaagtgccagaggtgggcaggtggtggcactgagcccccccaacactgtgccctggtggagaaagcactgacctgtcatgcccccctcaaacctcctcttctgacgtgccttttgcacccctcccattaggacaatcagtcccctcccatctgggagtccccttttcttttctaccctagccattcctggtacccagccatctgcccaggggtgccccctcctctcccatccccctgccctcgtggccagcccggctggttttgtaagatactgggttggtgcacagtgatttttttcttgtaatttaaacaggcccagcattgctggttctatttaatggacatgagataatgttagaggttttaaagtgattaaacgtgcagactatgcaaaccag

SEQ ID NO: 9612 - protein, 794 aa, Homo sapiens
  ref <308>: DATABASE ACCESSION NUMBER: SWISS-Prot / P09958
  ref <309>: DATABASE ENTRY DATE: 2002-06-15
MELRPWLLWVVAATGTLVLLAADAQGQKVFTNTWAVRIPGGPAVANSVARKHGFLNLGQIFGDYYHFWHRGVTKRSLSPHRPRHSRLQREPQVQWLEQQVAKRRTKRDVYQEPTDPKFPQQWYLSGVTQRDLNVKAAWAQGYTGHGIVVSILDDGIEKNHPDLAGNYDPGASFDVNDQDPDPQPRYTQMNDNRHGTRCAGEVAAVANNGVCGVGVAYNARIGGVRMLDGEVTDAVEARSLGLNPNHIHIYSASWGPEDDGKTVDGPARLAEEAFFRGVSQGRGGLGSIFVWASGNGGREHDSCNCDGYTNSIYTLSISSATQFGNVPWYSEACSSTLATTYSSGNQNEKQIVTTDLRQKCTESHTGTSASAPLAAGIIALTLEANKNLTWRDMQHLVVQTSKPAHLNANDWATNGVGRKVSHSYGYGLLDAGAMVALAQNWTTVAPQRKCIIDILTEPKDIGKRLEVRKTVTACLGEPNHITRLEHAQARLTLSYNRRGDLAIHLVSPMGTRSTLLAARPHDYSADGFNDWAFMTTHSWDEDPSGEWVLEIENTSEANNYGTLTKFTLVLYGTAPEGLPVPPESSGCKTLTSSQACVVCEEGFSLHQKSCVQHCPPGFAPQVLDTHYSTENDVETIRASVCAPCHASCATCQGPALTDCLSCPSHASLDPVEQTCSRQSQSSRESPPQQQPPRLPPEVEAGQRLRAGLLPSHLPEVVAGLSCAFIVLVFVTVFLVLQLRSGFSFRGVKVYTMDRGLISYKGLPPEAWQEECPSDSEEDEGRGERTAFIKDQSAL

SEQ ID NO: 9613 - DNA, 4259 bp, Rattus norvegicus; identical to SEQ ID NO: 9609
  ref <308>: DATABASE ACCESSION NUMBER: EMBL / X55660
  ref <309>: DATABASE ENTRY DATE: 1993-09-12

SEQ ID NO: 9614 - protein, 793 aa, Rattus norvegicus; identical to SEQ ID NO: 9610
  ref <308>: DATABASE ACCESSION NUMBER: SWISS-Prot / P23377
  ref <309>: DATABASE ENTRY DATE: 2001-10-16

SEQ ID NO: 9615 - DNA, 4180 bp, Homo sapiens; identical to SEQ ID NO: 9611
  ref <308>: DATABASE ACCESSION NUMBER: EMBL / X17094
  ref <309>: DATABASE ENTRY DATE: 1993-09-12

SEQ ID NO: 9616 - protein, 794 aa, Homo sapiens; identical to SEQ ID NO: 9612
  ref <308>: DATABASE ACCESSION NUMBER: SWISS-Prot / P09958
  ref <309>: DATABASE ENTRY DATE: 2002-06-15

SEQ ID NO: 9617 - DNA, 1066 bp, Rattus norvegicus
  ref <308>: DATABASE ACCESSION NUMBER: EMBL / X56133
  ref <309>: DATABASE ENTRY DATE: 1990-12-17
gtggctgaccgccagatgtctctgctgctccgccgacccccgggtcgagaggcctatcccggtgatgtgttttacctacactctcgcctgctggagagagcagccaagatgaacgattcctttggtggtggctctttgactgccttaccagtcattgaaacacaggctggtgatgtgtccgcctacattccaacaaacgttatttccatcaccgatggacagatcttcttggaaacagaattgttctataaaggcatccgccctgccattaatgtgggcttgtctgtgtcccgtgtcggatctgccgcccagaccagagccatgaagcaggtggcaggcaccatgaagctggagttggcccagtaccgggaggtcgctgcttttgcccagtttggttctgatctggatgctgccactcagcagctcttgagccgtggcgtgcgcctgaccgagctgctaaagcaaggacagtactctcccatggctattgaagaacaggtggctgtcatctatgcaggcgtccggggttatcttgataaactggagcccagtaagatcacaaagttcgagagtgctttcttgtctcatgttgtgagccagcaccagagcctcttgggcaatatcaggtctgatgggaaaatctcagaacagtcggatgcaaagctgaaggaaatcgtaacaaacttcttggctgggtttgaaccttaaagccctgccactgtcaccagacactgctttggttttgtcatttattgtggtaaaatcagcaccatttgtaaaggtttactcttgtactccctgatgtacagaaatcacatgaataaaagttccatattgagtgctagtttgtgtgggacgggctcagatgtatcctgggacttgtggaggtcagagagcagcctgtaggagtcagtgccctcctttccctgggaatttaactcaggttattatttaaagctcgacttcaggggttggggatttagctcagtggtagagcgcttgcctaggaagcgcaaggccctgggttcggtccccagctccggaaaaaaaagaaccaacccgaatt

SEQ ID NO: 9618 - protein, 543 aa, Rattus norvegicus
  ref <308>: DATABASE ACCESSION NUMBER: SWISS-Prot / P15999
  ref <309>: DATABASE ENTRY DATE: 2002-06-15
RRALPRRAGLVSKNALGSSFVGTRNLHASNTRLQKTGTAEMSSILEERILGADTSVDLEETGRVLSIGDGIARVHGLRNVQAEEMVEFSSGLKGMSLNLEPDNVGVVVFGNDKLIKEGDIVKRTGAIVDVPVGDELLGRVVDALGNAIDGKGPVGSKIRRRVGLKAPGIIPRISVREPMQTGIKAVDSLVPIGRGQRELIIGDRQTGKTSIAIDTIINQKRFNDGTDEKKKLYCIYVAIGQKRSTVAQLVKRLTDADAMKYTIVVSATASDAAPLQYLAPYSGCSMGEYFRDNGKHALIIYDDLSKQAVAYRQMSLLLRRPPGREAYPGDVFYLHSRLLERAAKMNDSFGGGSLTALPVIETQAGDVSAYIPTNVISITDGQIFLETELFYKGIRPAINVGLSVSRVGSAAQTRAMKQVAGTMKLELAQYREVAAFAQFGSDLDAATQQLLSRGVRLTELLKQGQYSPMAIEEQVAVIYAGVRGYLDKLEPSKITKFESAFLSHVVSQHQSLLGNIRSDGKISEQSDAKLKEIVTNFLAGFEP

SEQ ID NO: 9619 - DNA, 2725 bp, Homo sapiens
  ref <308>: DATABASE ACCESSION NUMBER: Refseq / NM_004046
  ref <309>: DATABASE ENTRY DATE: 2002-10-31
ggcacgaggagccttggcaagaggagtgtggcccttcctggaatccctctggacacaccctcctagcatcctctaggaaagatgcggcagctcaaagggaagcccaagaaggagacctccaaggacaagaaggagcggaagcaagccatgcaggaggcccggcagcagatcactacagtggtgctgcccacgctggccgtggtcgtgctcttgatcgtggtgtttgtgtacgtggccacgcgccccaccatcaccgagtgagccccgcagccggctgcggaccccatcggcagggagaggaggcgcgggagggggacgcaaacaaaaaatggctttcatattcagagatgttcatgttgctgagctgtaagcaggagcaccctgtcttctctggtctttgacttgattaaagtatctccgctttcttgggagggaataggggatgttttatcagtgaatgtgccatacaccttatggtccacttcatgtgcctttcagacttcaaagcgcgcgcgcatgtgtgtgtgtgtgtgtgtgtgtgtgtgtgtgtgtgtgtgtgcttctttttctctcctaaaaatcgataagtagctccacctgaagagggatggaacctctgggtcaggaaacagctggaatccacactcacctcattcccattgtttggatcatgcttctttccaacacgtgttcacaatctccaaagggactgtatttcttctctgtgcttaatgtgatttgaaatatgttgaatcaaagtgaaatatttattttttgaataaaggagataatagccttaaaaaaaaaaaaaaaaaaaactcgagactagttctctctctccctcgtgccgaattcggcacgaggccggaggctgcggctgcagaagtaccgcctgcggagtaactgcaaagatgctgtccgtgcgcgttgctgcggccgtggtccgcgcccttcctcggcgggccggactggtctccagaaatgctttgggttcatctttcattgctgcaaggaacttccatgcctctaacactcatcttcaaaagactgggactgctgagatgtcctctattcttgaagagcgtattcttggagctgatacctctgttgatcttgaagaaactgggcgtgtcttaagtattggtgatggtattgcccgcgtacatgggctgaggaatgttcaagcagaagaaatggtagagttttcttcaggcttaaagggtatgtccttgaacttggaacctgacaatgttggtgttgtcgtgtttggaaatgataaactaattaaggaaggagatatagtgaagaggacaggagccattgtggacgttccagttggtgaggagctgttgggtcgtgtagttgatgcccttggtaatgctattgatggaaagggtccaattggttccaagacgcgtaggcgagttggtctgaaagcccccggtatcattcctcgaatttcagtgcgggaaccaatgcagactggcattaaggctgtggatagcttggtgccaattggtcgtggtcagcgtgaactgattattggtgaccgacagactgggaaaacctcaattgctattgacacaatcattaaccagaaacgtttcaatgatggatctgatgaaaagaagaagctgtactgtatttatgttgctattggtcaaaagagatccactgttgcccagttggtgaagagacttacagatgcagatgccatgaagtacaccattgtggtgtcggctacggcctcggatgctgccccacttcagtacctggctccttactctggctgttccatgggagagtattttagagacaatggcaaacatgctttgatcatctatgacgacttatccaaacaggctgttgcttaccgtcagatgtctctgttgctccgccgaccccctggtcgtgaggcctatcctggtgatgtgttctacctacactcccggttgctggagagagcagccaaaatgaacgatgcttttggtggtggctccttgactgctttgccagtcatagaaacacaggctggtgatgtgtctgcttacattccaacaaatgtcatttccatcactgacggacagatcttcttggaaacagaattgttctacaaaggtatccgccctgcaattaacgttggtctgtctgtatctcgtgtcggatccgctgcccaaaccagggctatgaagcaggtagcaggtaccatgaagctggaattggctcagtatcgtgaggttgctgcttttgcccagttcggttctgacctcgatgctgccactcaacaacttttgagtcgtggcgtgcgtctaactgagttgctgaagcaaggacagtattctcccatggctattgaagaacaagtggctgttatctatgcgggtgtaaggggatatcttgataaactggagcccagcaagattacaaagtttgagaatgctttcttgtctcatgtcgtcagccagcaccaagccttgttgggcactatcagggctgatggaaagatctcagaacaatcagatgcaaagctgaaagagattgtaacaaatttcttggctggatttgaagcttaaactcctgtggattcacatcaaataccagttcagttttgtcattgttctagtaaattagttccatttgtaaaagggttactctcatactccttatgtacagaaatcacatgaaaaataaaggttccataatgcgtaaaaaaaaaaaaaaaaaa

SEQ ID NO: 9620 - protein, 553 aa, Homo sapiens
  ref <308>: DATABASE ACCESSION NUMBER: SWISS-Prot / P25705
  ref <309>: DATABASE ENTRY DATE: 2002-06-15
MLSVRVAAAVVRALPRRAGLVSRNALGSSFIAARNFHASNTHLQKTGTAEMSSILEERILGADTSVDLEETGRVLSIGDGIARVHGLRNVQAEEMVEFSSGLKGMSLNLEPDNVGVVVFGNDKLIKEGDIVKRTGAIVDVPVGEELLGRVVDALGNAIDGKGPIGSKTRRRVGLKAPGIIPRISVREPMQTGIKAVDSLVPIGRGQRELIIGDRQTGKTSIAIDTIINQKRFNDGSDEKKKLYCIYVAIGQKRSTVAQLVKRLTDADAMKYTIVVSATASDAAPLQYLAPYSGCSMGEYFRDNGKHALIIYDDLSKQAVAYRQMSLLLRRPPGREAYPGDVFYLHSRLLERAAKMNDAFGGGSLTALPVIETQAGDVSAYIPTNVISITDGQIFLETELFYKGIRPAINVGLSVSRVGSAAQTRAMKQVAGTMKLELAQYREVAAFAQFGSDLDAATQQLLSRGVRLTELLKQGQYSPMAIEEQVAVIYAGVRGYLDKLEPSKITKFENAFLSHVVSQHQALLGTIRADGKISEQSDAKLKEIVTNFLAGFEA

SEQ ID NO: 9621 - DNA, 999 bp, Rattus norvegicus
  ref <308>: DATABASE ACCESSION NUMBER: EMBL / X56228
  ref <309>: DATABASE ENTRY DATE: 1995-04-23
catcaggtgctctaccgagcgctggtctccaccaagtggctggcggaatccattcggtccggcaaggtggggccaagccttcgggtgctggacgcgtcatggtactcaccagggacccgccaggcacgcaaagagtaccaggagcgacacgtgcctggcgcgtccttctttgatatagaggagtgccgggacacgacttcgccttacgagatgatgctgcccagtgaggcccactttggggactacgtgggcaacctgggcataagcaacgacacacacgtcgtggtatacgatggagacgacctgggcagcttctatgcacccagagtatggtggatgtttcgtgtgtttggccaccgcacagtatcagtgctcaatggtggcttccggaactggctgaaggagggccacccggtgacatctgaaccctcgcggccagagccagccgttttcaaagccacactgaaccgctccctgctcaagacctatgagcaggtcctggagaacctccagtctaaaaggttccagctggtggattctcgggcccagggacggtacctgggcacacaaccggagcccgatgcagtaggactggactcaggccacatccgtggctctgtcaacgtgcccttcatgaacttcctgacagaagatggcttcgagaagagcccagaggagctgcgtgccatattccaggacaagaaggtggacctctcccagccccttatcgccacatgccgcaaaggggtcactgcttgccacattgccctggctgcctacctttgtggcaagcccgatgtggctgtttacgatggctcctggtcagagtggtttcgcagggcccccccggagacccgtgtgtcccaggggaagagtgggaaggcctgagtgtgtgcagcctcctcttccgcccaccagatccagccagttcccttcagtcaggcttgtatgacctgctgaaggttcgcctcttacgcaatggagattgacaggatttta

SEQ ID NO: 9622 - protein, 295 aa, Rattus norvegicus
  ref <308>: DATABASE ACCESSION NUMBER: SWISS-Prot / P24329
  ref <309>: DATABASE ENTRY DATE: 2002-06-15
HQVLYRALVSTKWLAESIRSGKVGPSLRVLDASWYSPGTRQARKEYQERHVPGASFFDIEECRDTTSPYEMMLPSEAHFGDYVGNLGISNDTHVVVYDGDDLGSFYAPRVWWMFRVFGHRTVSVLNGGFRNWLKEGHPVTSEPSRPEPAVFKATLNRSLLKTYEQVLENLQSKRFQLVDSRAQGRYLGTQPEPDAVGLDSGHIRGSVNVPFMNFLTEDGFEKSPEELRAIFQDKKVDLSQPLIATCRKGVTACHIALAAYLCGKPDVAVYDGSWSEWFRRAPPETRVSQGKSGKA

SEQ ID NO: 9623 - DNA, 999 bp, Rattus norvegicus; identical to SEQ ID NO: 9621
  ref <308>: DATABASE ACCESSION NUMBER: EMBL / X56228
  ref <309>: DATABASE ENTRY DATE: 1995-04-23

SEQ ID NO: 9624 - protein, 295 aa, Rattus norvegicus; identical to SEQ ID NO: 9622
  ref <308>: DATABASE ACCESSION NUMBER: SWISS-Prot / P24329
  ref <309>: DATABASE ENTRY DATE: 2002-06-15

SEQ ID NO: 9625 - DNA, 342 bp, Rattus norvegicus
  ref <308>: DATABASE ACCESSION NUMBER: EMBL / X56306
  ref <309>: DATABASE ENTRY DATE: 1991-02-08
caacatgaaaatcctcgtggcggtggcggtcttttttctcgtttccactcaactgtttgcagaggaaatcggtgccaacgatgatctaaattattggtccgactggtccgacagtgaccaaatcaaggaggcaatgccggagccctttgagcatcttcttcagagaatcgcccgaagacccaagcctcagcagttctttggattaatgggcaaacgggatgctgggcatggtcagatctctcacaaaatggcttatgaaagaagcgcaatgcagaactacgaaagaaggcgtaaataaaccctgtaacgcactatctattcatctccatctgtgtccgcgag

SEQ ID NO: 9626 - protein, 130 aa, Rattus norvegicus
  ref <308>: DATABASE ACCESSION NUMBER: SWISS-Prot / P06767
  ref <309>: DATABASE ENTRY DATE: 2001-10-16
MKILVAVAVFFLVSTQLFAEEIGANDDLNYWSDWSDSDQIKEAMPEPFEHLLQRIARRPKPQQFFGLMGKRDADSSIEKQVALLKALYGHGQISHKRHKTDSFVGLMGKRALNSVAYERSAMQNYERRRK

SEQ ID NO: 9627 - DNA, 1021 bp, Homo sapiens
  ref <308>: DATABASE ACCESSION NUMBER: EMBL / X54469
  ref <309>: DATABASE ENTRY DATE: 1991-01-09
gagagtgcggagcgaccacgtgcgctcggaggaaccagagaaactcagcaccccgcgggactgtccgtcgcaaaatccaacatgaaaatcctcgtggccttggcagtcttttttcttgtctccactcagctgtttgcagaagaaataggagccaatgatgatctgaattactggtccgactggtacgacagcgaccagatcaaggaggaactgccggagccctttgagcatcttctgcagagaatcgcccggagacccaagcctcagcagttctttggattaatgggcaaacgggatgctgattcctcaattgaaaaacaagtggccctgttaaaggctctttatggacatggccagatctctcacaaaagacataaaacagattcctttgttggactaatgggcaaaagagctttaaattctgtggcttatgaaaggagtgcaatgcagaattatgaaagaagacgttaataaactacctaacattatttattcagcttcatttgtgtcaatgggcaatgacaggtaaattaagacatgcactatgaggaataattatttatttaataacaattgtttagggttgaaaattcaaaaagtgtttatttttcatattgtgccaatatgtattgtaaacatgtgttttaattccaatatgatgactcccttaaaatagaaataagtggttatttctcaacaaagcacagtgttaaatgaaattgtaaaacctgtcaatgatacagtccctaaagaaaaaaaatcattgctttgaagcagttgtgtcagctactgcggaaaaggaaggaaactcctgacagtcttgtgcttttcctatttgttttcatggtgaaaatgtactgagattttggtattacactgtatttgtatctctgaagcatgtttcatgttttgtgactatatagagatgtttttaaaagtttcaatgtgattctaatgtcttcatttcattgtatgatgtgttgtgatagctaacattttaaataaaagaaaaaatatcttg

SEQ ID NO: 9628 - protein, 129 aa, Homo sapiens
  ref <308>: DATABASE ACCESSION NUMBER: SWISS-Prot / P20366
  ref <309>: DATABASE ENTRY DATE: 2002-06-15
MKILVALAVFFLVSTQLFAEEIGANDDLNYWSDWYDSDQIKEELPEPFEHLLQRIARRPKPQQFFGLMGKRDADSSIEKQVALLKALYGHGQISHKRHKTDSFVGLMGKRALNSVAYERSAMQNYERRR

SEQ ID NO: 9629 - DNA, 693 bp, Rattus norvegicus
  ref <308>: DATABASE ACCESSION NUMBER: EMBL / X56551
  ref <309>: DATABASE ENTRY DATE: 1992-10-28
caatctacaattcacagataggaggaggcccatgacctaggagtagcgatcaactcaaggtccagttctcattatgttattcatggacacccggggcactgctctataatgcgcaaatggatactgacacggatcctgccgactccgctctacagaccgtgcttccacctcgtctgtcttgtgggcaccatatctttagcttgcaatgacatgagtccagagcagacggccacgagcgtgaactgttctagccccgagcgacacacgagaagttatgactacatggaaggaggggatataagggtgaggagactgttctgtcgcacccagtggtacctgaggattgacaaacgaggcaaagtgaaagggacccaggagatgaggaacagctacaacatcatggaaatcatgactgtggcagttggaattgtggcaatcaaaggggtggaaagtgaatactatcttgccatgaacaaacaaggggaactctatgcaaagaaagaatgcaatgaggattgcaacttcaaagaactgattctggaaaaccattacaacacctctgcatcagctaaatggacacacagcggaggggaaatgttcgtggccttaaatcaaaaggggcttcctgtcaaagggaagaaaacgaagaaagaacaaaaaacggcccactttcttcctatggcaataacttaa

SEQ ID NO: 9630 - protein, 194 aa, Rattus norvegicus
  ref <308>: DATABASE ACCESSION NUMBER: SWISS-Prot / Q02195
  ref <309>: DATABASE ENTRY DATE: 2000-05-30
MRKWILTRILPTPLYRPCFHLVCLVGTISLACNDMSPEQTATSVNCSSPERHTRSYDYMEGGDIRVRRLFCRTQWYLRIDKRGKVKGTQEMRNSYNIMEIMTVAVGIVAIKGVESEYYLAMNKQGELYAKKECNEDCNFKELILENHYNTSASAKWTHSGGEMFVALNQKGLPVKGKKTKKEQKTAHFLPMAIT

SEQ ID NO: 9631 - protein, 194 aa, Homo sapiens
  ref <308>: DATABASE ACCESSION NUMBER: SWISS-Prot / P21781
  ref <309>: DATABASE ENTRY DATE: 2002-06-15
MHKWILTWILPTLLYRSCFHIICLVGTISLACNDMTPEQMATNVNCSSPERHTRSYDYMEGGDIRVRRLFCRTQWYLRIDKRGKVKGTQEMKNNYNIMEIRTVAVGIVAIKGVESEFYLAMNKEGKLYAKKECNEDCNFKELILENHYNTYASAKWTHNGGEMFVALNQKGIPVRGKKTKKEQKTAHFLPMAIT

SEQ ID NO: 9632 - DNA, 1374 bp, Rattus norvegicus
  ref <308>: DATABASE ACCESSION NUMBER: EMBL / X56596
  ref <309>: DATABASE ENTRY DATE: 1991-09-05
cttagagatggctctgcagacccccagcttcctcctcccagcagctgtggttgtgctgatggtgctgagcagcccagggactgagggcagagactccccaagggatttcgtgtaccagttcaagggcctgtgctactacaccaacgggacgcagcgcatacgggatgtgatcagatacatctacaaccaggaggagtacctgcgctacgacagcgacgtgggcgagtaccgcgcgctgaccgagctggggcggccctcagccgagtactttaacaagcagtacctggagcagacgcgggccgagctggacacggtctgcagacacaactacgaggggtcggaggtccgcacctccctgcggcggcttgagcagcccaatgtggccatctccctgtccaggacagaggccctcaaccaccacaacttgctggtctgctcagtgacagatttctacccagcccagatcaaagtgcgctggttccggaatggccaggaggagacggcgggggtcgtgtccacacagcttattaggaacggggactggaccttccagatcctggtcatgctggagatgacgcctcagcggggagaggtgtacatctgccatgttgaccaccccagccttgagagccccgtcacagtggagtggcgggcacagtccgagtctgcccagagcaagatgctgagcggcatcgggggctttgtgctgggggtgatcttcctcgggcttggccttttcatccgtcacaagcgtcagaaaggacctcgggggcctcctccagcagggctcctacagtgacacaggagagtgttttggttgtgtttgaagagacatgggaaacctgcccccatctctccgcatcaaatcctgcaattcttctgtccctacagagccagagcagttagcacccccccccccccgggccgacgctggccttgggaacagacaaaaggcagccttctccaacctcagcatcacgtcagaactcatactccctcccctggttagcaaccagcatttctctggtgcagatggctcctgcccttgaaggaggcgggagccaatatccttgaagtgatgaaagcccactctcggactatgagaaagaggcaattaagtgtcaagtgtgcccagacagctgcgaccagttgtgaaataccctagcttctgataacggaatgagttacttcttcccagtcaggaaggtaggccctttccagcactccccaccccatctgaacaggtttgtctcagggttggaaggatggcactcctttaccccctccccaatcacatactgccaaagctcgagaagcccacgttacgcatattcctatatatgtcacaagccccttgatgtgagcattgaattc

SEQ ID NO: 9633 - protein, 263 aa, Rattus norvegicus
  ref <308>: DATABASE ACCESSION NUMBER: SWISS-Prot / P29826
  ref <309>: DATABASE ENTRY DATE: 1999-07-15
MALQTPSFLLPAAVVVLMVLSSPGTEGRDSPRDFVYQFKGLCYYTNGTQRIRDVIRYIYNQEEYLRYDSDVGEYRALTELGRPSAEYFNKQYLEQTRAELDTVCRHNYEGSEVRTSLRRLEQPNVAISLSRTEALNHHNLLVCSVTDFYPAQIKVRWFRNGQEETAGVVSTQLIRNGDWTFQILVMLEMTPQRGEVYICHVDHPSLESPVTVEWRAQSESAQSKMLSGIGGFVLGVIFLGLGLFIRHKRQKGPRGPPPAGLLQ

SEQ ID NO: 9634 - DNA, 428 bp, Homo sapiens
  ref <308>: DATABASE ACCESSION NUMBER: EMBL / BM727355
  ref <309>: DATABASE ENTRY DATE: 2002-03-07
ttgaaggaggcgggagccaatatccttgaagtgatgaaagcccactctcgactatgagaaaaaggcaattaagtgtcaagtgtgcccacacagctgagaccagttgtgacataccctagcttctgataacggaatgagttacttcttcccaggtcaggaaggtaggtccctttccaacactccccaccccatctgaacaggtttgtctcagggttggaaggatggcactcctttaccccctccccaatcacatactgccaaagctcgagaagcccagcttacgcatattcctatatatgtcacaagccccttgatgtgagcattgaattcctaacctgtggaacagggaaggcttgtgatctgatttgggtcagacccgtataataaagattctctttgttcttgcaaaaaaaaaaaaaaaaaaagac

SEQ ID NO: 9635 - protein, 268 aa, Homo sapiens
  ref <308>: DATABASE ACCESSION NUMBER: SWISS-Prot / P05538
  ref <309>: DATABASE ENTRY DATE: 2001-10-16
MSWKMALQIPGGFWAAAVTVMLVMLSTPVAEARDFPKDFLVQFKGMCYFTNGTERVRGVARYIYNREEYGRFDSDVGEFQAVTELGRSIEDWNNYKDFLEQERAAVDKVCRHNYEAELRTTLQRQVEPTVTISPSRTEALNHHNLLVCSVTDFYPAQIKVRWFRNDQEETAGVVSTSLIRNGDWTFQILVMLEITPQRGDIYTCQVEHPSLQSPITVEWRAQSESAQSKMLSGIGGFVLGLIFLGLGLIIRHRGQKGPRGPPPAGLLH

SEQ ID NO: 9636 - DNA, 1931 bp, Rattus norvegicus
  ref <308>: DATABASE ACCESSION NUMBER: EMBL / X56729
  ref <309>: DATABASE ENTRY DATE: 1994-11-02
ctggcacatctcccagaatgagtaccacaggagctaagccacctgtgattcatgagaaaaagccaaaaggaaagccaaaggaagggtcagagacaaaatttcaagatgctccttctgctgatggagagagtgtggctggagatgtgactgtggccactgcctcagacgaggtggttgttaagaaaaaagagaagaaatcattaacacctactttacctatggagtccacactaaacaagctatctgacaagtcaggcgtgaatgctgctttggatgacctgatagacaccttaggtgaatgtgaagatactaacaaagatgatccaccatatactggaccagtagttctggacccaatggattctacctaccttgaggcactgggtataaaagaagggactattcctccagagtataggaaacttctggagaaaaatgaagctatcacaggacctcttccagattctcctaaacctatgggaatcgaccatgctatagatgccttgtcatctgatttcacctgtagctctccaactggaaagcaaactgagaaagagaagtctactggggaaagttcgaaagctcagtctgcaggagtgaccagaagtgctgttcctccccaggagaagaaaaggaaagtagaagaggaggtcatgaatgatcaagccctgcaggctctgtcagattcactgggcacccggcagccagaccctcagagccatcttaggcaagccaaacaagtcaaagaggcaaaagcaaaagaagaaaggcaggagaaatgtggtgaagatgaggacacagtacctgctgagtacaggttaaaaccagccaaggataaagatggaaaaccactattgccagaacctgaagaaacatctaagtgcctgagtgagtcagagctgattggggagctttcagcagattttgtccaacctacatatcaagaaaaaccatctatgccagctgcaaaaataaagaagggcgtagtgccagatgatgctgtagaaaccttggctagaagcctggggacaaggaaagaagatccagaagatgaaaaatctctggtggataaagtcaaggagaaagctaaagaagaagatcatgaaaaacttggtgaaaaagaagaaacaattcctcctgattatcgactagaaatagtcaaggataaggatggaaaaccgctcctgccaaaagaagccgaggaacaacttccacccttaagcgatgacttccttcttgatgcattgtctcaggacttctccagtcctgcaaacatattgtctcttggttttgaagatgccaaactttctgctgctgtttctgaaacagtttcccaggtgcctgctccaagcaaccacacagcagccccaccgcctggcactgagaggagagacaaagaactcgatgatgccttggatgaactttctgacagtcttggacaaagacagcctgatccagatgagaacaaaccactagatgataaagtaaaggaaaaaatcaaagcagagcatagcgagaaactgggagaaagagacgacaccatcccccctgaatataggcatctcctggataatgatgggaaggacaaaccagagaagccacttgacaaagaacacagagaagctggtcaggaccaggaccccattgatgccctctcagaagacttggatagctgccccccaactacagagacttcacagaatacaacaaaggagaagggtaagaagacttcaagttccaaagcatccaagaatgaagagaaaacaaaggattcctccaagaagacagaggaagtgcccaagccaaaggtggatgaagatgcaacataaagtttatgcattttggtatctgaataaaaattcttcagctggtggatggtgacttttgaagatcaaaggctttgatgacaatttttctgggtggcttctaga

SEQ ID NO: 9637 - protein, 654 aa, Rattus norvegicus
  ref <308>: DATABASE ACCESSION NUMBER: SWISS-Prot / CAA40053
  ref <309>: DATABASE ENTRY DATE: 2002-06-15
MSTTGAKAVKIESEKSQSSEPPVIHEKKPKGKPKEGSEPQTLPKHASDTGSKHAHKEKALSRSNEQIVSEKSSESKTKFQDAPSADGESVAGGVTVATASDKVVVKKKEKKSLTPTLPMESTLNKLSDKSGVNAALDDLIDTLGECEDTNKDDPPYTGPVVLDPMDSTYLEALGIKEGTIPPEYRKLLEKNEAITGPLPDSPKPMGIDHAIDALSSDFTCSSPTGKQTEKEKSTGESSKAQSAGVTRSAVPPQEKKRKVEEEVMNDQALQALSDSLGTRQPDPQSHLRQAKQVKEAKAKEERQEKCGEDEDTVPAEYRLKPAKDKDGKPLLPEPEETSKCLSESELIGELSADFVQPTYQEKPSMPAAKIKKGVVPDDAVETLARSLGTRKEDPEDEKSLVDKVKEKAKEEDHEKLGEKEETIPPDYRLEIVKDKDGKPLLPKEAEEQLPPLSDDFLLDALSQDFSSPANILSLGFEDAKLSAAVSETVSQVPAPSNHTAAPPPGTERRDKELDDALDELSDSLGQRQPDPDENKPLDDKVKEKIKAEHSEKLGERDDTIPPEYRHLLDNDGKDKPEKPLDKEHREAGQDQDPIDALSEDLDSCPPTTETSQNTTKEKGKKTSSSKASKNEEKTKDSSKKTEEVPKPKVDEDAT

SEQ ID NO: 9638 - DNA, 2493 bp, Homo sapiens
  ref <308>: DATABASE ACCESSION NUMBER: EMBL / D16217
  ref <309>: DATABASE ENTRY DATE: 2002-06-03
acattggtaaggtgttttcccccattgaaactaatattttctattttcaagaaaaaagcagcaagcctcggcagcagtcaatcctccagaacctatgctggtggaacagcctcggccaccaaggtgtcagcttcctctggtgcaaccagcaagtcttccagtatgaatcccacagaaaccaaggccattccagtcagccaacagatggaaggaccacatcttcctaacaagaaaaaacacaaaaaacaggctgtaaaaacagaacctgagaagaagtcacagtcaaccaagctgtctgtggttcatgagaaaaaatcccaagaaggaaagccaaaagaacacacagagccaaaaagcctacccaagcaggcatcagatacaggaagtaacgatgctcacaataaaaaagcagtttccagatcagctgaacagcagccatcagagaaatcaacagaaccaaagactaaaccacaagacatgatttctgctggtggagagagtgttgctggtatcactgcaatatctggcaagccgggtgacaagaaaaaagaaaagaaatcattaaccccagctgtgccagttgaatctaaaccggataaaccatcgggaaagtcaggcatggatgctgctttggatgacttaatagatactttaggaggacctgaagaaactgaagaagaaaatacaacgtatactggaccagaagtttcagatccaatgagttccacctacatagaggaattgggtaaaagagaagtcacaattcctccaaaatatagggaactattggctaaaaaggaagggatcacagggcctcctgcagactcttcaaaacccatagggccagatgatgctatagacgccttgtcatctgacttcacctgtgggtcgcctacagctgctggaaagaaaactgaaaaagaggaatctacagaagttttaaaagctcagtcagcagggacagtcagaagtgctgctccaccccaagagaagaaaagaaaggtggagaaggatacaatgagtgatcaagcactcgaggctctgtcggcttcactgggcacccggcaagcagaacctgagctcgacctccgctcaattaaggaagtcgatgaggcaaaagctaaagaagaaaaactagagaagtgtggtgaggatgatgaaacaatcccatctgagtacagattaaaaccagccacggataaagatggaaaaccactattgccagagcctgaagaaaaacccaagcctcggagtgaatcagaactcattgatgaactttcagaagattttgaccggtctgaatgtaaagagaaaccatctaagccaactgaaaagacagaagaatctaaggccgctgctccagctcctgtgtcggaggctgtgtctcggacctccatgtgtagtatacagtcagcaccccctgagccggctaccttgaagggcacagtgccagatgatgctgtagaagccttggctgatagcctggggaaaaaggaagcagatccagaagatggaaaacctgtgatggataaagtcaaggagaaggccaaagaagaagaccgtgaaaagcttggtgaaaaagaagaaacaattcctcctgattatagattagaagaggtcaaggataaagatggaaagccactcctgccaaaagagtctaaggaacagcttccacccatgagtgaagacttccttctggatgctttgtctgaggacttctctggtccacaaaatgcttcatctcttaaatttgaagatgctaaacttgctgctgccatctctgaagtggtttcccaaaccccagcttcaacgacccaagctggagccccaccccgtgatacctcgcagagtgacaaagacctcgatgatgccttggataaactctctgacagtctaggacaaaggcagcctgacccagatgagaacaaaccaatgggagataaagtaaaggaaaaagctaaagctgaacatagagacaagcttggagaaagagatgacactatcccacctgaatacagacatctcctggatgataatggacaggacaaaccagtgaagccacctacaaagaaatcagaggattcaaagaaacctgcagatgaccaagaccccattgatgctctctcaggagatctggacagctgtccctccactacagaaacctcacagaacacagcaaaggataagtgcaagaaggctgcttccagctccaaagcacctaagaatggaggtaaagcgaaggattcagcaaagacaacagaggaaacttccaagccaaaagatgactaaagaaatacaagttaaggtatctggtatctgcatgtaaaatcttcagctggtggatggtgacttttgaagaacaaaaggctttggcaacagaaaacaattgttctgggtgatttctagaatggtttttgttgagtctctgaacatcctaaatattggtttgttattctttccagaaagaaaatgaatttgactggttcggaattc

SEQ ID NO: 9639 - protein, 708 aa, Homo sapiens [sequence omitted]

SEQ ID NO: 9640 - DNA, 1931 bp, Rattus norvegicus; identical to SEQ ID NO: 9636
  ref <308>: DATABASE ACCESSION NUMBER: EMBL / X56729
  ref <309>: DATABASE ENTRY DATE: 1994-11-02

SEQ ID NO: 9641 - protein, 654 aa, Rattus norvegicus; identical to SEQ ID NO: 9637
  ref <308>: DATABASE ACCESSION NUMBER: SWISS-Prot / CAA40053
  ref <309>: DATABASE ENTRY DATE: 2002-06-15

SEQ ID NO: 9642 - DNA, 2493 bp, Homo sapiens; identical to SEQ ID NO: 9638
  ref <308>: DATABASE ACCESSION NUMBER: EMBL / D16217
  ref <309>: DATABASE ENTRY DATE: 2002-06-03

SEQ ID NO: 9643 - protein, 708 aa, Homo sapiens [sequence omitted]

SEQ ID NO: 9644 - DNA, 8221 bp, Rattus norvegicus
  ref <308>: DATABASE ACCESSION NUMBER: EMBL / X57405
  ref <309>: DATABASE ENTRY DATE: 1998-05-06
ggcgggtcagggagcgcaggggcgtggggcgcagggccgggtgcagcgcagtgaaggaacgagcctgggttgccctgtagtgccggggagaccctgagagcccagcccgcccacccgccaggaaagagggcagcagcgggtggaacgcccgcgggaccgcccgtggtgcgcgtgaacgtccgatcccggccggccaccgcaagaggccgccgcccggcagcgggcagctggcgagcaggcatgccgcggctcctggcgcccttgctctgcctaacgctgctgcccgcgctcgccgcaagaggcttgagatgctcccagccaagtgggacctgcctgaatggagggaggtgcgaagtggccaacggcactgaagcctgtgtctgcagcggagcgttcgtgggccagcgatgccaggaccccagcccttgcctcagcacaccatgtaagaatgctggaacgtgctatgttgtggaccatggcggcatcgtggactatgcctgcagttgccccctgggtttctctgggcccctctgcctgacacctctggccaatgcctgcctggccaacccctgccgcaacggggggacctgtgacctgctcactctcacagaatacaagtgccggtgcccgccagggtggtcaggaaagtcatgtcagcaagccgacccctgtgcctccaacccctgtgccaatggtggccagtgcctgccctttgagtcttcatacatctgtggctgcccgcccggcttccatggccccacctgcagacaagatgttaacgagtgcagccagaaccctgggttgtgccgtcatgggggcacgtgccacaatgagattggctcctatcgctgtgcctgccgtgccacccacactggtccccactgcgagctgccctacgtgccctgcagcccctcaccctgccagaacggaggcacctgccgccctacgggggacaccacccacgagtgtgcctgcctgccaggctttgctggacagaactgtgaagaaaatgtggatgactgcccaggaaacaactgcaagaacgggggtgcctgtgtggacggtgtgaatacctacaattgccgctgcccaccggagtggacaggtcagtactgcacagaggatgtggacgagtgtcagctcatgcccaacgcctgccagaatgcgggaacctgccacaactcccacggtggctacaactgcgtgtgtgtcaatggctggactggtgaggactgcagtgacaacattgatgactgtgccagtgccgcctgttttcagggtgccacctgccatgaccgtgtggcttccttctactgcgagtgtccacatgggcgcacaggcctgctgtgccacctgaacgatgcgtgtatcagcaacccctgcaacgagggctccaactgcgacaccaaccctgtcaacggcaaggccatctgcacttgccctcgggggtacacggggccagcctgcagccaggacgtggatgagtgcgctctaggtgccaacccgtgtgagcacgcgggcaagtgcctcaacacactgggctctttcgagtgtcagtgtctacagggctacactgggccccgctgtgagattgatgtcaacgagtgcatctccaacccatgtcagaatgatgccacgtgcctggaccagattggggagtttcagtgtatatgtatgccaggttatgagggtgtatactgtgagatcaacacggacgagtgtgccagcagcccctgtctacacaatggccgctgcgtggacaagatcaacgagttcctgtgtcagtgtcccaaaggcttcagcgggcacctgtgccagtatgacgtggatgagtgcgccagcacaccatgcaagaacggcgccaagtgcctggatgggcccaacacctacacctgcgtgtgcacagaaggttacacggggacccactgcgaggtggacattgacgagtgtgaccctgacccctgtcacattggtttgtgcaaggatggtgtggccacctttacctgcctctgccagccaggctacacaggccatcactgtgagaccaacattaatgagtgtcacagccagccgtgccgccatggcggcacctgccaggaccgtgacaactactacctctgcttatgcctcaaggggaccacaggacccaactgtgagatcaatctggatgactgtgcgagcaacccctgtgactctggcacgtgtctggacaagatcgatggctacgagtgtgcgtgcgagccaggctacacagggagcatgtgtaatgtcaacattgacgaatgtgcgggcagcccctgccacaacgggggcacctgtgaggatggcatcgccggcttcacttgccgctgccccgagggctaccacgaccctacgtgcctgtctgaggtcaacgagtgcaacagtaacccctgcatccatggagcttgccgggatggcctcaatggatacaaatgtgactgtgcccctgggtggagtgggacaaactgtgacatcaacaacaatgagtgtgagtccaacccttgtgtcaacggtggcacctgcaaagacatgaccagtggctacgtatgcacctgccgagaaggcttcagtggccctaactgccagaccaacattaacgaatgtgcttccaacccctgcctgaaccagggcacctgcattgatgatgtcgctgggtacaaatgcaactgccctctgccctatacaggagccacatgtgaggtggtgttggccccatgtgccaccagcccctgcaaaaacagtggggtatgcaaggagtctgaggactatgagagcttttcctgtgtctgtcccacaggctggcaaggtcaaacctgcgagatcgacatcaatgagtgtgtgaaaagcccgtgtcgccatggtgcctcttgccagaacaccaatggcagctaccgctgcctctgccaggctggctacacgggtcgcaactgcgagagtgacatcgatgactgccgacccaacccatgtcacaacgggggttcctgcactgacggggtcaacgcggccttctgcgactgcctgcccggcttccagggtgccttctgtgaggaggacatcaacgaatgcgccacgaatccatgccaaaatggcgccaactgcactgactgcgtggacagctacacgtgcacctgccccaccgggttcaatggcatccattgcgagaacaacacacctgactgtaccgagagctcctgtttcaatggtggcacctgtgtggatggtatcaactccttcacctgtctgtgcccacctggcttcacgggcagctactgccagtatgacgtcaatgagtgtgactcacggccctgtctgcatggtggcacctgccaagacagctatggtacctataagtgtacctgcccacagggctacactggtctcaactgccagaaccttgtgcgctggtgtgactcagctccctgcaagaatggcggcaagtgctggcagaccaacacacagtaccactgcgagtgccgcagcggctggactggcttcaactgcgacgtgctcagtgtgtcctgcgaggtggctgcacagaagcgaggcatcgatgtcactctcctatgccagcacggagggctctgtgtggatgaggaagacaagcattactgccactgccaggcaggatacacgggcagctactgtgaggacgaggtggacgagtgctcacctaatccctgccagaacggagccacctgcactgactatctcggtggcttttcctgcaagtgtgtggctgggtaccatggctctaactgctctgaggagatcaacgagtgcctatcccaaccctgccagaatgggggtacctgcattgatctgaccaacacctacaagtgctcctgccccaggggcacacagggtgtacactgtgagatcaacgtcgatgactgccatcctcccctagaccctgcttcccgaagccccaaatgcttcaataatggcacctgcgtggaccaggtgggtggctatacctgcacctgcccgccaggcttcgtcggggagcggtgcgagggcgatgtcaatgagtgtctctccaacccctgtgacccacgtggcacccagaactgcgtgcagcgtgttaatgacttccactgcgagtgccgggctggccacactggacgccgctgtgagtcggtcattaatggctgcaggggcaaaccatgcaggaatggaggtgtctgtgctgtggcctccaacaccgcccgtggattcatctgtaggtgccctgcccgcttcgagggtgccacttgtgaaaatgacgcccgcacttgtggcagtttgcgctgcctcaacggtggtacgtgcatctcaggcccacgcagtcccacctgcctatgcctgggctccttcactggccctgaatgccagttcccagccagcagcccctgtgtgggtagcaacccctgctacaatcagggcacctgtgagcccacatccgagagccctttctaccgctgtctatgccctgccaaattcaacgggctgctgtgccacatcctggactacagcttcacaggtgcggccgggcgcgacattcccccgccacagattgaggaggcctgcgaactgcctgagtgccaggaggatgcaggcaataaggtctgcaaccttcagtgtaataatcacgcgtgtggctgggacggcggcgactgctccctcaacttcaatgacccttggaagaactgcactcagtccctgcagtgctggaagtattttagtgacggccactgtgacagccagtgcaactcagctggctgcctttttgatggcttcgactgccagctcaccgagggacagtgcaaccccctgtatgaccagtactgcaaggaccacttcagtgatggccactgcgaccagggctgcaacagtgccgagtgtgagtgggatggactggactgtgcagagcatgtccccgagcgactggcagccggcacactggtgctggtggtgctgcttccgcccgatcagctacgcaacaactccttccacttcctgcgggacgtcagccacgtgctgcacaccaacgtggtcttcaagcgtgacgcgcagggccagcagatgatcttcccctactatggccgcgaggaagagctacgcaagcacccgatcaagcgttctgcagtgggctgggccacaacgtcactgcttcctggcaccaatggtgggcgccagcgcagggagctggaccccatggacatccatggctccatcgtctacctggagatcgacaaccggcagtgtgtacagtcatcctcgcaatgcttccagagcgccaccgatgtggctgccttcctaggtgctcttgcctccctcggcagcctcaatatcccctacaagatcgaagccgtaaagagtgagacggtggagcctccgctgccctcacagctgcacctcatgtacgtggcggcagctgccttcgtgctcctgttctttgtgggctgtggggtgctgctgtcccgcaagcgcaggcggcagcatggccagctctggttccctgagggtttcaaagtgtcagaggccagcaagaagaagcggagagaacccctcggcgaggactcagtcggcctcaagcccctgaagaacgcctcagatggtgccctgatggacgacaatcagaacgagtggggggacgaagacctggagaccaagaagttccggtttgaggaaccagtggttctccctgacctggatgatcagactgaccaccggcagtggacccagcagcacctggatgccgctgacctacgtgtgtctgccatggccccaacgccgcctcagggggaggtagatgctgactgcatggacgtcaatgttcgaggaccagatggcttcactcccctaatgattgcctcctgcagcggagggggcctggagacaggcaacagtgaggaagaagaagatgcacctgctgtcatctccgacttcatctatcagggtgccagcttgcacaaccagacggaccgcacaggggagactgccctgcacctggctgcccgatactctcgttcagatgctgccaagcgcttgctggaggccagcgcagatgccaacatccaagacaacatggggcgtaccccattacatgccgctgtttctgcagacgctcagggtgtcttccagatcctgctccggaacagagccacagatctggatgcccgaatgcatgatggcacaacccctctgatcctggcggcacgcctggccgtggaaggcatgctagaggacctcatcaactctcacgctgatgtcaatgctgtggatgacctaggcaagtcagctctgcactgggcagccgctgtgaacaatgtggacgctgctgttgtgctcctgaagaacggagccaacaaagacatgcagaacaacaaggaggagactcccctgttcctggccgcccgtgagggcagctatgagactgccaaagtgttgctggaccactttgccaaccgggacatcacggatcacatggaccgattgccacgggacattgcacaggagcgcatgcaccacgatatcgtgcggcttttggatgaatacaacctggtgcgcagcccacagctgcatggcactgccttgggtggcacacccactctgtctcccacactctgctcgcccaacggctacctgggcaacctcaagtctgccacacagggcaagaaggcccgaaagcccagcaccaaagggctggcttgcagtagcaaggaagctaaggacctcaaggcccggaggaagaagtcccaggatggcaagggctgcctgttggacagctcaagcatgctgtcacccgtggactccctcgagtcaccccatggctacttgtcagatgtggcctcaccacccctccttccctccccgttccagcagtctccatccatgcctctcagccacctgccaggtatgcctgacacccacctgggcatcagccacttgaatgtggcagccaagcccgagatggcagctctggccggaggcagccggttggcctttgagccacccccaccacgcctctcccacctgcctgtagcctccagtgccagcacagtgctgagtaccaatggcacaggggctatgaatttcaccgtgggtgcaccggcaagcttgaatggccagtgtgagtggcttccccggctccagaatggcatggtgcccagccagtacaacccgctaaggccaggtgtgactccgggcacactaagcacacaggcagctggcctccagcatggcatgatgggcccgatacacagcagcctctccaccaataccttgtccccgattatctaccagggcctgcccaacacaaggctggccacacagccccacctggtgcagacccagcaggtgcagccacagaacttacaaatccagcctcagaacctgcagccaccatcgcagccacacctcagtgtgagctcagcagccaatgggcacctgggtcggagcttcctgagcggggagcccagccaggcagacgtacagccgctgggccccagcagtctgcctgtgcacaccattctgccccaggaaagccaggctctgccgacatcactgccatcctccatggtcccacccatgaccactacccagttcctgacccctccttctcagcacagctactcatcctcacctgtggacaacacccccagccaccagctgcaggtgccagagcaccccttcctcaccccatcccctgagtcccctgaccagtggtccagctcctcccggcattccaacatctctgattggtccgagggcatctctagcccgcccacgagcatgccgtcccagatcacccacattccagaggcatttaagtaaacagagatgtgggatgaaggaccccagcttccgttcccaagctctgttgggagtcctttccagtgctccaggatgctggggcgaccaaaggagccttttaaaaaaaaatgtttttatacaaaataagaggacaagaatttccattttttttttagtatttatttatgtacttttattttccacagaaacactgcctttttatttatatgtattgttttctatggcactaggggaaaacatctgttccaagaaaataaactagttctgagagcctcgattttcctggtcagggtgaagttccctgtgtgtttgtaaaatacgaacaaggattcatgatttgtaaatgccgtttatttattgattgcttctttccaaaatcgtcgag

SEQ ID NO: 9645 - protein, 2531 aa, Rattus norvegicus
  ref <308>: DATABASE ACCESSION NUMBER: SWISS-Prot / CAA40667
  ref <309>: DATABASE ENTRY DATE: 2002-06-15
MPRLLAPLLCLTLLPALAARGLRCSQPSGTCLNGGRCEVANGTEACVCSGAFVGQRCQDPSPCLSTPCKNAGTCYVVDHGGIVDYACSCPLGFSGPLCLTPLANACLANPCRNGGTCDLLTLTEYKCRCPPGWSGKSCQQADPCASNPCANGGQCLPFESSYICGCPPGFHGPTCRQDVNECSQNPGLCRHGGTCHNEIGSYRCACRATHTGPHCELPYVPCSPSPCQNGGTCRPTGDTTHECACLPGFAGQNCEENVDDCPGNNCKNGGACVDGVNTYNCRCPPEWTGQYCTEDVDECQLMPNACQNAGTCHNSHGGYNCVCVNGWTGEDCSDNIDDCASAACFQGATCHDRVASFYCECPHGRTGLLCHLNDACISNPCNEGSNCDTNPVNGKAICTCPRGYTGPACSQDVDECALGANPCEHAGKCLNTLGSFECQCLQGYTGPRCEIDVNECISNPCQNDATCLDQIGEFQCICMPGYEGVYCEINTDECASSPCLHNGRCVDKINEFLCQCPKGFSGHLCQYDVDECASTPCKNGAKCLDGPNTYTCVCTEGYTGTHCEVDIDECDPDPCHIGLCKDGVATFTCLCQPGYTGHHCETNINECHSQPCRHGGTCQDRDNYYLCLCLKGTTGPNCEINLDDCASNPCDSGTCLDKIDGYECACEPGYTGSMCNVNIDECAGSPCHNGGTCEDGIAGFTCRCPEGYHDPTCLSEVNECNSNPCIHGACRDGLNGYKCDCAPGWSGTNCDINNNECESNPCVNGGTCKDMTSGYVCTCREGFSGPNCQTNINECASNPCLNQGTCIDDVAGYKCNCPLPYTGATCEVVLAPCATSPCKNSGVCKESEDYESFSCVCPTGWQGQTCEIDINECVKSPCRHGASCQNTNGSYRCLCQAGYTGRNCESDIDDCRPNPCHNGGSCTDGVNAAFCDCLPGFQGAFCEEDINECATNPCQNGANCTDCVDSYTCTCPTGFNGIHCENNTPDCTESSCFNGGTCVDGINSFTCLCPPGFTGSYCQYDVNECDSRPCLHGGTCQDSYGTYKCTCPQGYTGLNCQNLVRWCDSAPCKNGGKCWQTNTQYHCECRSGWTGFNCDVLSVSCEVAAQKRGIDVTLLCQHGGLCVDEEDKHYCHCQAGYTGSYCEDEVDECSPNPCQNGATCTDYLGGFSCKCVAGYHGSNCSEEINECLSQPCQNGGTCIDLTNTYKCSCPRGTQGVHCEINVDDCHPPLDPASRSPKCFNNGTCVDQVGGYTCTCPPGFVGERCEGDVNECLSNPCDPRGTQNCVQRVNDFHCECRAGHTGRRCESVINGCRGKPCRNGGVCAVASNTARGFICRCPARFEGATCENDARTCGSLRCLNGGTCISGPRSPTCLCLGSFTGPECQFPASSPCVGSNPCYNQGTCEPTSESPFYRCLCPAKFNGLLCHILDYSFTGAAGRDIPPPQIEEACELPECQEDAGNKVCNLQCNNHACGWDGGDCSLNFNDPWKNCTQSLQCWKYFSDGHCDSQCNSAGCLFDGFDCQLTEGQCNPLYDQYCKDHFSDGHCDQGCNSAECEWDGLDCAEHVPERLAAGTLVLVVLLPPDQLRNNSFHFLRDVSHVLHTNVVFKRDAQGQQMIFPYYGREEELRKHPIKRSAVGWATTSLLPGTNGGRQRRELDPMDIHGSIVYLEIDNRQCVQSSSQCFQSATDVAAFLGALASLGSLNIPYKIEAVKSETVEPPLPSQLHLMYVAAAAFVLLFFVGCGVLLSRKRRRQHGQLWFPEGFKVSEASKKKRREPLGEDSVGLKPLKNASDGALMDDNQNEWGDEDLETKKFRFEEPVVLPDLDDQTDHRQWTQQHLDAADLRVSAMAPTPPQGEVDADCMDVNVRGPDGFTPLMIASCSGGGLETGNSEEEEDAPAVISDFIYQGASLHNQTDRTGETALHLAARYSRSDAAKRLLEASADANIQDNMGRTPLHAAVSADAQGVFQILLRNRATDLDARMHDGTTPLILAARLAVEGMLEDLINSHADVNAVDDLGKSALHWAAAVNNVDAAVVLLKNGANKDMQNNKEETPLFLAAREGSYETAKVLLDHFANRDITDHMDRLPRDIAQERMHHDIVRLLDEYNLVRSPQLHGTALGGTPTLSPTLCSPNGYLGNLKSATQGKKARKPSTKGLACSSKEAKDLKARRKKSQDGKGCLLDSSSMLSPVDSLESPHGYLSDVASPPLLPSPFQQSPSMPLSHLPGMPDTHLGISHLNVAAKPEMAALAGGSRLAFEPPPPRLSHLPVASSASTVLSTNGTGAMNFTVGAPASLNGQCEWLPRLQNGMVPSQYNPLRPGVTPGTLSTQAAGLQHGMMGPIHSSLSTNTLSPIIYQGLPNTRLATQPHLVQTQQVQPQNLQIQPQNLQPPSQPHLSVSSAANGHLGRSFLSGEPSQADVQPLGPSSLPVHTILPQESQALPTSLPSSMVPPMTTTQFLTPPSQHSYSSSPVDNTPSHQLQVPEHPFLTPSPESPDQWSSSSRHSNISDWSEGISSPPTSMPSQITHIPEAFK

SEQ ID NO: 9646 - DNA, 11395 bp, Homo sapiens
tttcagccaaacttcgggcggcggctgaggcggcggccgaggagcggcggactcggggcgcggggagtcgaggcatttgcgcctgggcttcggagcgtagcgccagggcctgagcctttgaagcaggaggaggggaggagagagtggggctcctctatcgggaccccctccccatgtggatctgcccaggcggcggcggcggcggcggaggaggaggcgaccgagaagatgcccgccctgcgccccgctctgctgtgggcgctgctggcgctctggctgtgctgcgcggcccccgcgcatgcattgcagtgtcgagatggctatgaaccctgtgtaaatgaaggaatgtgtgttacctaccacaatggcacaggatactgcaaatgtccagaaggcttcttgggggaatattgtcaacatcgagacccctgtgagaagaaccgctgccagaatggtgggacttgtgtggcccaggccatgctggggaaagccacgtgccgatgtgcctcagggtttacaggagaggactgccagtactcaacatctcatccatgctttgtgtctcgaccctgcctgaatggcggcacatgccatatgctcagccgggatacctatgagtgcacctgtcaagtcgggtttacaggtaaggagtgccaatggacggatgcctgcctgtctcatccctgtgcaaatggaagtacctgtaccactgtggccaaccagttctcctgcaaatgcctcacaggcttcacagggcagaaatgtgagactgatgtcaatgagtgtgacattccaggacactgccagcatggtggcacctgcctcaacctgcctggttcctaccagtgccagtgccctcagggcttcacaggccagtactgtgacagcctgtatgtgccctgtgcaccctcaccttgtgtcaatggaggcacctgtcggcagactggtgacttcacttttgagtgcaactgccttccaggttttgaagggagcacctgtgagaggaatattgatgactgccctaaccacaggtgtcagaatggaggggtttgtgtggatggggtcaacacttacaactgccgctgtcccccacaatggacaggacagttctgcacagaggatgtggatgaatgcctgctgcagcccaatgcctgtcaaaatgggggcacctgtgccaaccgcaatggaggctatggctgtgtatgtgtcaacggctggagtggagatgactgcagtgagaacattgatgattgtgccttcgcctcctgtactccaggctccacctgcatcgaccgtgtggcctccttctcttgcatgtgcccagaggggaaggcaggtctcctgtgtcatctggatgatgcatgcatcagcaatccttgccacaagggggcactgtgtgacaccaaccccctaaatgggcaatatatttgcacctgcccacaaggctacaaaggggctgactgcacagaagatgtggatgaatgtgccatggccaatagcaatccttgtgagcatgcaggaaaatgtgtgaacacggatggcgccttccactgtgagtgtctgaagggttatgcaggacctcgttgtgagatggacatcaatgagtgccattcagacccctgccagaatgatgctacctgtctggataagattggaggcttcacatgtctgtgcatgccaggtttcaaaggtgtgcattgtgaattagaaataaatgaatgtcagagcaacccttgtgtgaacaatgggcagtgtgtggataaagtcaatcgtttccagtgcctgtgtcctcctggtttcactgggccagtttgccagattgatattgatgactgttccagtactccgtgtctgaatggggcaaagtgtatcgatcacccgaatggctatgaatgccagtgtgccacaggtttcactggtgtgttgtgtgaggagaacattgacaactgtgaccccgatccttgccaccatggtcagtgtcaggatggtattgattcctacacctgcatctgcaatcccgggtacatgggcgccatctgcagtgaccagattgatgaatgttacagcagcccttgcctgaacgatggtcgctgcattgacctggtcaatggctaccagtgcaactgccagccaggcacgtcaggggttaattgtgaaattaattttgatgactgtgcaagtaacccttgtatccatggaatctgtatggatggcattaatcgctacagttgtgtctgctcaccaggattcacagggcagagatgtaacattgacattgatgagtgtgcctccaatccctgtcgcaagggtgcaacatgtatcaacggtgtgaatggtttccgctgtatatgccccgagggaccccatcaccccagctgctactcacaggtgaacgaatgcctgagcaatccctgcatccatggaaactgtactggaggtctcagtggatataagtgtctctgtgatgcaggctgggttggcatcaactgtgaagtggacaaaaatgaatgcctttcgaatccatgccagaatggaggaacttgtgacaatctggtgaatggatacaggtgtacttgcaagaagggctttaaaggctataactgccaggtgaatattgatgaatgtgcctcaaatccatgcctgaaccaaggaacctgctttgatgacataagtggctacacttgccactgtgtgctgccatacacaggcaagaattgtcagacagtattggctccctgttccccaaacccttgtgagaatgctgctgtttgcaaagagtcaccaaattttgagagttatacttgcttgtgtgctcctggctggcaaggtcagcggtgtaccattgacattgacgagtgtatctccaagccctgcatgaaccatggtctctgccataacacccagggcagctacatgtgtgaatgtccaccaggcttcagtggtatggactgtgaggaggacattgatgactgccttgccaatccttgccagaatggaggttcctgtatggatggagtgaatactttctcctgcctctgccttccgggtttcactggggataagtgccagacagacatgaatgagtgtctgagtgaaccctgtaagaatggagggacctgctctgactacgtcaacagttacacttgcaagtgccaggcaggatttgatggagtccattgtgagaacaacatcaatgagtgcactgagagctcctgtttcaatggtggcacatgtgttgatgggattaactccttctcttgcttgtgccctgtgggtttcactggatccttctgcctccatgagatcaatgaatgcagctctcatccatgcctgaatgagggaacgtgtgttgatggcctgggtacctaccgctgcagctgccccctgggctacactgggaaaaactgtcagaccctggtgaatctctgcagtcggtctccatgtaaaaacaaaggtacttgcgttcagaaaaaagcagagtcccagtgcctatgtccatctggatgggctggtgcctattgtgacgtgcccaatgtctcttgtgacatagcagcctccaggagaggtgtgcttgttgaacacttgtgccagcactcaggtgtctgcatcaatgctggcaacacgcattactgtcagtgccccctgggctatactgggagctactgtgaggagcaactcgatgagtgtgcgtccaacccctgccagcacggggcaacatgcagtgacttcattggtggatacagatgcgagtgtgtcccaggctatcagggtgtcaactgtgagtatgaagtggatgagtgccagaatcagccctgccagaatggaggcacctgtattgaccttgtgaaccatttcaagtgctcttgcccaccaggcactcggggcctactctgtgaagagaacattgatgactgtgcccggggtccccattgccttaatggtggtcagtgcatggataggattggaggctacagttgtcgctgcttgcctggctttgctggggagcgttgtgagggagacatcaacgagtgcctctccaacccctgcagctctgagggcagcctggactgtatacagctcaccaatgactacctgtgtgtttgccgtagtgcctttactggccggcactgtgaaaccttcgtcgatgtgtgtccccagatgccctgcctgaatggagggacttgtgctgtggccagtaacatgcctgatggtttcatttgccgttgtcccccgggattttccggggcaaggtgccagagcagctgtggacaagtgaaatgtaggaagggggagcagtgtgtgcacaccgcctctggaccccgctgcttctgccccagtccccgggactgcgagtcaggctgtgccagtagcccctgccagcacgggggcagctgccaccctcagcgccagcctccttattactcctgccagtgtgccccaccattctcgggtagccgctgtgaactctacacggcaccccccagcacccctcctgccacctgtctgagccagtattgtgccgacaaagctcgggatggcgtctgtgatgaggcctgcaacagccatgcctgccagtgggatgggggtgactgttctctcaccatggagaacccctgggccaactgctcctccccacttccctgctgggattatatcaacaaccagtgtgatgagctgtgcaacacggtcgagtgcctgtttgacaactttgaatgccaggggaacagcaagacatgcaagtatgacaaatactgtgcagaccacttcaaagacaaccactgtgaccaggggtgcaacagtgaggagtgtggttgggatgggctggactgtgctgctgaccaacctgagaacctggcagaaggtaccctggttattgtggtattgatgccacctgaacaactgctccaggatgctcgcagcttcttgcgggcactgggtaccctgctccacaccaacctgcgcattaagcgggactcccagggggaactcatggtgtacccctattatggtgagaagtcagctgctatgaagaaacagaggatgacacgcagatcccttcctggtgaacaagaacaggaggtggctggctctaaagtctttctggaaattgacaaccgccagtgtgttcaagactcagaccactgcttcaagaacacggatgcagcagcagctctcctggcctctcacgccatacaggggaccctgtcataccctcttgtgtctgtcgtcagtgaatccctgactccagaacgcactcagctcctctatctccttgctgttgctgttgtcatcattctgtttattattctgctgggggtaatcatggcaaaacgaaagcgtaagcatggctctctctggctgcctgaaggtttcactcttcgccgagatgcaagcaatcacaagcgtcgtgagccagtgggacaggatgctgtggggctgaaaaatctctcagtgcaagtctcagaagctaacctaattggtactggaacaagtgaacactgggtcgatgatgaagggccccagccaaagaaagtaaaggctgaagatgaggccttactctcagaagaagatgaccccattgatcgacggccatggacacagcagcaccttgaagctgcagacatccgtaggacaccatcgctggctctcacccctcctcaggcagagcaggaggtggatgtgttagatgtgaatgtccgtggcccagatggctgcaccccattgatgttggcttctctccgaggaggcagctcagatttgagtgatgaagatgaagatgcagaggactcttctgctaacatcatcacagacttggtctaccagggtgccagcctccaggcccagacagaccggactggtgagatggccctgcaccttgcagcccgctactcacgggctgatgctgccaagcgtctcctggatgcaggtgcagatgccaatgcccaggacaacatgggccgctgtccactccatgctgcagtggcagctgatgcccaaggtgtcttccagattctgattcgcaaccgagtaactgatctagatgccaggatgaatgatggtactacacccctgatcctggctgcccgcctggctgtggagggaatggtggcagaactgatcaactgccaagcggatgtgaatgcagtggatgaccatggaaaatctgctcttcactgggcagctgctgtcaataatgtggaggcaactcttttgttgttgaaaaatggggccaaccgagacatgcaggacaacaaggaagagacacctctgtttcttgctgcccgggaggggagctatgaagcagccaagatcctgttagaccattttgccaatcgagacatcacagaccatatggatcgtcttccccgggatgtggctcgggatcgcatgcaccatgacattgtgcgccttctggatgaatacaatgtgaccccaagccctccaggcaccgtgttgacttctgctctctcacctgtcatctgtgggcccaacagatctttcctcagcctgaagcacaccccaatgggcaagaagtctagacggcccagtgccaagagtaccatgcctactagcctccctaaccttgccaaggaggcaaaggatgccaagggtagtaggaggaagaagtctctgagtgagaaggtccaactgtctgagagttcagtaactttatcccctgttgattccctagaatctcctcacacgtatgtttccgacaccacatcctctccaatgattacatcccctgggatcttacaggcctcacccaaccctatgttggccactgccgcccctcctgccccagtccatgcccagcatgcactatctttttctaaccttcatgaaatgcagcctttggcacatggggccagcactgtgcttccctcagtgagccagttgctatcccaccaccacattgtgtctccaggcagtggcagtgctggaagcttgagtaggctccatccagtcccagtcccagcagattggatgaaccgcatggaggtgaatgagacccagtacaatgagatgtttggtatggtcctggctccagctgagggcacccatcctggcatagctccccagagcaggccacctgaagggaagcacataaccacccctcgggagcccttgccccccattgtgactttccagctcatccctaaaggcagtattgcccaaccagcgggggctccccagcctcagtccacctgccctccagctgttgcgggccccctgcccaccatgtaccagattccagaaatggcccgtttgcccagtgtggctttccccactgccatgatgccccagcaggacgggcaggtagctcagaccattctcccagcctatcatcctttcccagcctctgtgggcaagtaccccacacccccttcacagcacagttatgcttcctcaaatgctgctgagcgaacacccagtcacagtggtcacctccagggtgagcatccctacctgacaccatccccagagtctcctgaccagtggtcaagttcatcaccccactctgcttctgactggtcagatgtgaccaccagccctacccctgggggtgctggaggaggtcagcggggacctgggacacacatgtctgagccaccacacaacaacatgcaggtttatgcgtgagagagtccacctccagtgtagagacataactgacttttgtaaatgctgctgaggaacaaatgaaggtcatccgggagagaaatgaagaaatctctggagccagcttctagaggtaggaaagagaagatgttcttattcagataatgcaagagaagcaattcgtcagtttcactgggtatctgcaaggcttattgattattctaatctaataagacaagtttgtggaaatgcaagatgaatacaagccttgggtccatgtttactctcttctatttggagaataagatggatgcttattgaagcccagacattcttgcagcttggactgcattttaagccctgcaggcttctgccatatccatgagaagattctacactagcgtcctgttgggaattatgccctggaattctgcctgaattgacctacgcatctcctcctccttggacattcttttgtcttcatttggtgcttttggttttgcacctctccgtgattgtagccctaccagcatgttatagggcaagacctttgtgcttttgatcattctggcccatgaaagcaactttggtctcctttcccctcctgtcttcccggtatcccttggagtctcacaaggtttactttggtatggttctcagcacaaacctttcaagtatgttgtttctttggaaaatggacatactgtattgtgttctcctgcatatatcattcctggagagagaaggggagaagaatacttttcttcaacaaattttgggggcaggagatcccttcaagaggctgcaccttaatttttcttgtctgtgtgcaggtcttcatataaactttaccaggaagaagggtgtgagtttgttgtttttctgtgtatgggcctggtcagtgtaaagttttatccttgatagtctagttactatgaccctccccacttttttaaaaccagaaaaaggtttggaatgttggaatgaccaagagacaagttaactcgtgcaagagccagttacccacccacaggtccccctacttcctgccaagcattccattgactgcctgtatggaacacatttgtcccagatctgagcattctaggcctgtttcactcactcacccagcatatgaaactagtcttaactgttgagcctttcctttcatatccacagaagacactgtctcaaatgttgtacccttgccatttaggactgaactttccttagcccaagggacccagtgacagttgtcttccgtttgtcagatgatcagtctctactgattatcttgctgcttaaaggcctgctcaccaatctttctttcacaccgtgtggtccgtgttactggtatacccagtatgttctcactgaagacatggactttatatgttcaagtgcaggaattggaaagttggacttgttttctatgatccaaaacagccctataagaaggttggaaaaggaggaactatatagcagcctttgctattttctgctaccatttcttttcctctgaagcggccatgacattccctttggcaactaacgtagaaactcaacagaacattttcctttcctagagtcaccttttagatgataatggacaactatagacttgctcattgttcagactgattgcccctcacctgaatccactctctgtattcatgctcttggcaatttctttgactttcttttaagggcagaagcattttagttaattgtagataaagaatagttttcttcctcttctccttgggccagttaataattggtccatggctacactgcaacttccgtccagtgctgtgatgcccatgacacctgcaaaataagttctgcctgggcattttgtagatattaacaggtgaattcccgactcttttggtttgaatgacagttctcattccttctatggctgcaagtatgcatcagtgcttcccacttacctgatttgtctgtcggtggccccatatggaaaccctgcgtgtctgttggcataatagtttacaaatggttttttcagtcctatccaaatttattgaaccaacaaaaataattacttctgccctgagataagcagattaagtttgttcattctctgctttattctctccatgtggcaacattctgtcagcctctttcatagtgtgcaaacattttatcattctaaatggtgactctctgcccttggacccatttattattcacagatggggagaacctatctgcatggacctctgtggaccacagcgtacctgcccctttctgccctcctgctccagccccacttctgaaagtatcagctactgatccagccactggatattttatatcctcccttttccttaagcacaatgtcagaccaaattgcttgtttctttttcttggactactttaatttggatcctttgggtttggagaaagggaatgtgaaagctgtcattacagacaacaggtttcagtgatgaggaggacaacactgcctttcaaactttttactgatctcttagattttaagaactcttgaattgtgtggtatctaataaaagggaaggtaagatggataatcactttctcatttgggttctgaattggagactcagtttttatgagacacatcttttatgccatgtatagatcctcccctgctatttttggtttatttttattgttataaatgctttctttctttgactcctcttctgcctgcctttggggataggtttttttgtttgtttatttgcttcctctgttttgttttaagcatcattttcttatgtgaggtggggaagggaaaggtatgagggaaagagagtctgagaattaaaatattttagtataagcaattggctgtgatgctcaaatccattgcatcctcttattgaatttgccaatttgtaatttttgcataataaagaaccaaaggtgtaatgttttgttgagaggtggtttagggattttggccctaaccaatacattgaatgtatgatgactatttgggaggacacatttatgtacccagaggcccccactaataagtggtactatggttacttccttgtgtacatttctcttaaaagtgatattatatctgtttgtatgagaaacccagtaaccaataaaatgaccgcatattcctgactaaacgtagtaaggaaaatgcacactttgtttttacttttccgtttcattctaaaggtagttaagatgaaatttatatgaaagcatttttatcacaaaataaaaaaggtttgccaagctcagtggtgttgtattttttattttccaatactgcatccatggcctggcagtgttacctcatgatgtcataatttgctgagagagcaaattttcttttctttctgaatcccacaaagcctagcaccaaacttctttttttcttcctttaattagatcataaataaatgatcctggggaaaaagcatctgtcaaataggaaacatcacaaaactgagcactcttctgtgcactagccatagctggtgacaaacagatggttgctcagggacaaggtgccttccaatggaaatgcgaagtagttgctatagcaagaattgggaactgggatataagtcataatattaattatgctgttatgtaaatgattggtttgtaacattccttaagtgaaatttgtgtagaacttaatatacaggattataaaataatattttgtgtataaatttgttataagttcacattcatacatttatttataaagtcagtgagatatttgaacatg

SEQ ID NO: 9647 - protein, 2471 aa, Homo sapiens
MPALRPALLWALLALWLCCAAPAHALQCRDGYEPCVNEGMCVTYHNGTGYCKCPEGFLGEYCQHRDPCEKNRCQNGGTCVAQAMLGKATCRCASGFTGEDCQYSTSHPCFVSRPCLNGGTCHMLSRDTYECTCQVGFTGKECQWTDACLSHPCANGSTCTTVANQFSCKCLTGFTGQKCETDVNECDIPGHCQHGGTCLNLPGSYQCQCPQGFTGQYCDSLYVPCAPSPCVNGGTCRQTGDFTFECNCLPGFEGSTCERNIDDCPNHRCQNGGVCVDGVNTYNCRCPPQWTGQFCTEDVDECLLQPNACQNGGTCANRNGGYGCVCVNGWSGDDCSENIDDCAFASCTPGSTCIDRVASFSCMCPEGKAGLLCHLDDACISNPCHKGALCDTNPLNGQYICTCPQGYKGADCTEDVDECAMANSNPCEHAGKCVNTDGAFHCECLKGYAGPRCEMDINECHSDPCQNDATCLDKIGGFTCLCMPGFKGVHCELEINECQSNPCVNNGQCVDKVNRFQCLCPPGFTGPVCQIDIDDCSSTPCLNGAKCIDHPNGYECQCATGFTGVLCEENIDNCDPDPCHHGQCQDGIDSYTCICNPGYMGAICSDQIDECYSSPCLNDGRCIDLVNGYQCNCQPGTSGVNCEINFDDCASNPCIHGICMDGINRYSCVCSPGFTGQRCNIDIDECASNPCRKGATCINGVNGFRCICPEGPHHPSCYSQVNECLSNPCIHGNCTGGLSGYKCLCDAGWVGINCEVDKNECLSNPCQNGGTCDNLVNGYRCTCKKGFKGYNCQVNIDECASNPCLNQGTCFDDISGYTCHCVLPYTGKNCQTVLAPCSPNPCENAAVCKESPNFESYTCLCAPGWQGQRCTIDIDECISKPCMNHGLCHNTQGSYMCECPPGFSGMDCEEDIDDCLANPCQNGGSCMDGVNTFSCLCLPGFTGDKCQTDMNECLSEPCKNGGTCSDYVNSYTCKCQAGFDGVHCENNINECTESSCFNGGTCVDGINSFSCLCPVGFTGSFCLHEINECSSHPCLNEGTCVDGLGTYRCSCPLGYTGKNCQTLVNLCSRSPCKNKGTCVQKKAESQCLCPSGWAGAYCDVPNVSCDIAASRRGVLVEHLCQHSGVCINAGNTHYCQCPLGYTGSYCEEQLDECASNPCQHGATCSDFIGGYRCECVPGYQGVNCEYEVDECQNQPCQNGGTCIDLVNHFKCSCPPGTRGLLCEENIDDCARGPHCLNGGQCMDRIGGYSCRCLPGFAGERCEGDINECLSNPCSSEGSLDCIQLTNDYLCVCRSAFTGRHCETFVDVCPQMPCLNGGTCAVASNMPDGFICRCPPGFSGARCQSSCGQVKCRKGEQCVHTASGPRCFCPSPRDCESGCASSPCQHGGSCHPQRQPPYYSCQCAPPFSGSRCELYTAPPSTPPATCLSQYCADKARDGVCDEACNSHACQWDGGDCSLTMENPWANCSSPLPCWDYINNQCDELCNTVECLFDNFECQGNSKTCKYDKYCADHFKDNHCDQGCNSEECGWDGLDCAADQPENLAEGTLVIVVLMPPEQLLQDARSFLRALGTLLHTNLRIKRDSQGELMVYPYYGEKSAAMKKQRMTRRSLPGEQEQEVAGSKVFLEIDNRQCVQDSDHCFKNTDAAAALLASHAIQGTLSYPLVSVVSESLTPERTQLLYLLAVAVVIILFIILLGVIMAKRKRKHGSLWLPEGFTLRRDASNHKRREPVGQDAVGLKNLSVQVSEANLIGTGTSEHWVDDEGPQPKKVKAEDEALLSEEDDPIDRRPWTQQHLEAADIRRTPSLALTPPQAEQEVDVLDVNVRGPDGCTPLMLASLRGGSSDLSDEDEDAEDSSANIITDLVYQGASLQAQTDRTGEMALHLAARYSRADAAKRLLDAGADANAQDNMGRCPLHAAVAADAQGVFQILIRNRVTDLDARMNDGTTPLILAARLAVEGMVAELINCQADVNAVDDHGKSALHWAAAVNNVEATLLLLKNGANRDMQDNKEETPLFLAAREGSYEAAKILLDHFANRDITDHMDRLPRDVARDRMHHDIVRLLDEYNVTPSPPGTVLTSALSPVICGPNRSFLSLKHTPMGKKSRRPSAKSTMPTSLPNLAKEAKDAKGSRRKKSLSEKVQLSESSVTLSPVDSLESPHTYVSDTTSSPMITSPGILQASPNPMLATAAPPAPVHAQHALSFSNLHEMQPLAHGASTVLPSVSQLLSHHHIVSPGSGSAGSLSRLHPVPVPADWMNRMEVNETQYNEMFGMVLAPAEGTHPGIAPQSRPPEGKHITTPREPLPPIVTFQLIPKGSIAQPAGAPQPQSTCPPAVAGPLPTMYQIPEMARLPSVAFPTAMMPQQDGQVAQTILPAYHPFPASVGKYPTPPSQHSYASSNAAERTPSHSGHLQGEHPYLTPSPESPDQWSSSSPHSASDWSDVTTSPTPGGAGGGQRGPGTHMSEPPHNNMQVYA

SEQ ID NO: 9648 - DNA, 8221 bp, Rattus norvegicus; identical to SEQ ID NO: 9644
  ref <308>: DATABASE ACCESSION NUMBER: EMBL / X57405
  ref <309>: DATABASE ENTRY DATE: 1998-05-06

SEQ ID NO: 9649 - protein, 2531 aa, Rattus norvegicus; identical to SEQ ID NO: 9645
  ref <308>: DATABASE ACCESSION NUMBER: SWISS-Prot / CAA40667
  ref <309>: DATABASE ENTRY DATE: 2002-06-15

SEQ ID NO: 9650 - DNA, 11395 bp, Homo sapiens; identical to SEQ ID NO: 9646

SEQ ID NO: 9651 - protein, 2471 aa, Homo sapiens; identical to SEQ ID NO: 9647

SEQ ID NO: 9652 - DNA, 8221 bp, Rattus norvegicus; identical to SEQ ID NO: 9644
  ref <308>: DATABASE ACCESSION NUMBER: EMBL / X57405
  ref <309>: DATABASE ENTRY DATE: 1998-05-06

SEQ ID NO: 9653 - protein, 2531 aa, Rattus norvegicus; identical to SEQ ID NO: 9645
  ref <308>: DATABASE ACCESSION NUMBER: SWISS-Prot / CAA40667
  ref <309>: DATABASE ENTRY DATE: 2002-06-15

SEQ ID NO: 9654 - DNA, 11395 bp, Homo sapiens; identical to SEQ ID NO: 9646

SEQ ID NO: 9655 - protein, 2471 aa, Homo sapiens; identical to SEQ ID NO: 9647

SEQ ID NO: 9656 - DNA, 8221 bp, Rattus norvegicus; identical to SEQ ID NO: 9644
  ref <308>: DATABASE ACCESSION NUMBER: EMBL / X57405
  ref <309>: DATABASE ENTRY DATE: 1998-05-06

SEQ ID NO: 9657 - protein, 2531 aa, Rattus norvegicus; identical to SEQ ID NO: 9645
  ref <308>: DATABASE ACCESSION NUMBER: SWISS-Prot / CAA40667
  ref <309>: DATABASE ENTRY DATE: 2002-06-15

SEQ ID NO: 9658 - DNA, 11395 bp, Homo sapiens; identical to SEQ ID NO: 9646

SEQ ID NO: 9659 - protein, 2471 aa, Homo sapiens; identical to SEQ ID NO: 9647

SEQ ID NO: 9660 - DNA, 2674 bp, Rattus norvegicus
  misc_feature (1)..(2674): n=a, c, g or t
  ref <308>: DATABASE ACCESSION NUMBER: EMBL / X57523
  ref <309>: DATABASE ENTRY DATE: 1992-06-25
cgcggagagttccaggctgggaccggactctggacagcgcacgctcgatggctgcgcacgcctggccgacggccgccttgctgctgctgctggtggactggctgctgctgcggcccgtgctcccgggaatcttctccctgttggttcccgaggtgccactgctccgggtctgggccgtgggcctgagtcgctgggctatcctgggactaggggtccgcggggtcctcggggtcaccgcgggagcccgtggctggctggctgctttgcagccgctggtggcggcgctgggtttggccctgcctggacttgcctcgttccgaaagctgtccgcctggggagcactccgggagggtgacaacgctggactgctccactggaacagtcgcttagatgccttcgttctcagttatgtggccgcattgcccgcagctgccctgtggcacaagttggggggcttctgggcgcccagtggccacaagggcgctggagacatgctgtgtcggatgctaggcttcctggactccaagaaggggcgtctccacctggttctggttctcttgatcctctcctgccttggggaaatggccattcccttcttcacaggccgcatcactgactggatccttcaggataagacagcccccagcttcgcccgcaacatgtggctcatgtgtattcttaccatagccagtacagtgctggagtttgcaggagatggaatctacaacatcaccatgggccacatgcacagccgcgtgcatggagaggtgtttcgggccgtccttcaccaggagacaggatttttcctgaagaacccaacaggttccatcacatctcgggtgactgaggacacctccaacgtgtgcgagtccattagtgacaagctgaacctgttcctgtggtacctggggcgaggcctgtgtctcctggcgttcatgatttgggggtcattctacctcactgtggtcaccctgctcagcctgcctctgcttttccttctgcccaggaggctggggaaagtgtaccagtcactggcagtgaaggtgcaggagtctctagcaaagtccacgcaggtggccctcgaggccctgtcggcgatgcctaccgtacggagctttgccaacgaggagggagaggcccagaagtttaggcagaagttggaagaaatgaagccgctaaacaagaaagaggccttggcttacgtcactgaagtctggaccatgagtgtctcgggaatgctgctgaaggtgggaattctgtacctcggtgggcagctggtggtcagaggggctgtcagcagcggcaacctcgtctcctttgttctctaccagcttcagttcaccagggccgtggaggtcctgctctccatctatccctccatgcagaagtccgtgggcgcttcggagaaaatattcgaatacctggaccggactccctgctctccgctcagtggctcactggcacctttaaacatgaaaggcctcgtcaagttccaagatgtctcctttgcctacccaaaccatcccaacgtccaggtgcttcaggggctgacttttacgctgtatcccgggaaggtgaccgccttggtgggacccaatgggtcagggaagagcaccgtggccgccctgctgcagaacctgtaccagcccaccgggggcaaggtgctcctggatggcgagcccctggtccagtatgatcaccactacctgcacacgcaggtggccgcagtgggacaagagccactgctatttggaagaagttttcgggaaaatattgcctatggcctgacgcggactccaaccatggaggaaatcacagctgtggccatggagtccggagcccacgatttcatctctggattccctcagggctatgacacagaggtaggtgaaactgggaaccagctgtcaggaggtcagcgacaggcggtggccttggctcgagccttgatccggaagccacgcctgcttatcttggacgatgccaccagtgccctggatgctggcaaccagctacgggtccagcggctcctgtatgagagccccgagtgggcctctcggacggttcttctgatcacccagcagctcagcctggcagagcgggcccaccacatcctcttcctcaaagaaggctctgtctgcgagcagggcacccacctgcagctcatggagagaggagggtgttaccggtccatggtggaggctcttgcggctccttcagactgacgggcttctggactgcaagctgcgcgagtccctccccctgctgtcctctgctctgtgtggcggagaacctgggagcaaagattttaccacatccacggagatagttgaggagcgatggtgtttgttacatgaggaaaatgtaacctctaggagatgcccggaatttaccacnaatgttttcccgccccgccccctgttagacgggggatgggggtaggtaccccaggctaacactgagctgctgagtctcctgtctcccgtggagtttgcatcacggcatgcgcccacaaacctggcttatgtggcgttgggacagaatgagaagaaacgctcaaaatgtacagagaaggggcaaatagcttgcaattaaccaaaggcataggctggcctatgggtgttccgcgggttcttgatatttataataaaactggtgttttgtaaaaaaaaaa

SEQ ID NO: 9661 - protein, 725 aa, Rattus norvegicus
  ref <308>: DATABASE ACCESSION NUMBER: SWISS-Prot / P36370
  ref <309>: DATABASE ENTRY DATE: 2002-06-15
MAAHAWPTAALLLLLVDWLLLRPVLPGIFSLLVPEVPLLRVWAVGLSRWAILGLGVRGVLGVTAGARGWLAALQPLVAALGLALPGLASFRKLSAWGALREGDNAGLLHWNSRLDAFVLSYVAALPAAALWHKLGGFWAPSGHKGAGDMLCRMLGFLDSKKGRLHLVLVLLILSCLGEMAIPFFTGRITDWILQDKTAPSFARNMWLMCILTIASTVLEFAGDGIYNITMGHMHSRVHGEVFRAVLHQETGFFLKNPTGSITSRVTEDTSNVCESISDKLNLFLWYLGRGLCLLAFMIWGSFYLTVVTLLSLPLLFLLPRRLGKVYQSLAVKVQESLAKSTQVALEALSAMPTVRSFANEEGEAQKFRQKLEEMKPLNKKEALAYVTEVWTMSVSGMLLKVGILYLGGQLVVRGAVSSGNLVSFVLYQLQFTRAVEVLLSIYPSMQKSVGASEKIFEYLDRTPCSPLSGSLAPLNMKGLVKFQDVSFAYPNHPNVQVLQGLTFTLYPGKVTALVGPNGSGKSTVAALLQNLYQPTGGKVLLDGEPLVQYDHHYLHTQVAAVGQEPLLFGRSFRENIAYGLTRTPTMEEITAVAMESGAHDFISGFPQGYDTEVGETGNQLSGGQRQAVALARALIRKPRLLILDDATSALDAGNQLRVQRLLYESPEWASRTVLLITQQLSLAERAHHILFLKEGSVCEQGTHLQLMERGGCYRSMVEALAAPSD

SEQ ID NO: 9662 - DNA, 2474 bp, Homo sapiens
  ref <308>: DATABASE ACCESSION NUMBER: EMBL / M84748
  ref <309>: DATABASE ENTRY DATE: 2000-03-04
gctgcggtctccccgccgcggctgagccatgcggctccctgacctgagaccctggacctccctgctgctggtggacgcggctttactgtggctgcttcagggccctctggggactttgcttcctcaagggctgccaggactatggctggaggggaccctgcggctgggagggctgtgggggctgctaaagctaagagggctgctgggatttgtggggacactgctgctcccgctctgtctggccacccccctgactgtctccctgagagccctggtcgcgggggcctcacgtgctcccccagccagagtcgcttcagccccttggagctggctgctggtggggtacggggctgcggggctcagctggtcactgtgggctgttctgagccctcctggagcccaggagaaggagcaggaccaggtgaacaacaaagtcttgatgtggaggctgctgaagctctccaggccggacctgcctctcctcgttgccgccttcttcttccttgtccttgctgtcttgggtgagacattaatccctcactattctggtcgtgtgattgacatcctgggaggtgattttgacccccatgcctttgccagtgccatcttcttcatgtgcctcttctcctttggcagctcactgtctgcaggctgccgaggaggctgcttcacctacaccatgtctcgaatcaacttgcggatccgggagcagcttttctcctccctgctgcgccaggacctcggtttcttccaggagactaagacaggggagctgaactcacggctgagctcggataccaccctgatgagtaactggcttcctttaaatgccaatgtgctcttgcgaagcctggtgaaagtggtggggctgtatggcttcatgctcagcatatcgcctcgactcaccctcctttctctgctgcacatgcccttcacaatagcagcggagaaggtgtacaacacccgccatcaggaagtgcttcgggagatccaggatgcagtggccagggcggggcaggtggtgcgggaagccgttggagggctgcagaccgttcgcagttttggggccgaggagcatgaagtctgtcgctataaagaggcccttgaacaatgtcggcagctgtattggcggagagacctggaacgcgccttgtacctgctcgtaaggagggtgctgcacttgggggtgcagatgctgatgctgagctgtgggctgcagcagatgcaggatggggagctcacccagggcagcctgctttcctttatgatctaccaggagagcgtggggagctatgtgcagaccctggtatacatatatggggatatgctcagcaacgtgggagctgcagagaaggttttctcctacatggaccgacagccaaatctgccttcacctggcacgcttgcccccaccactctgcagggggttgtgaaattccaagacgtctcctttgcatatcccaatcgccctgacaggcctgtgctcaaggggctgacgtttaccctacgtcctggtgaggtgacggcgctggtgggacccaatgggtctgggaagagcacagtggctgccctgctgcagaatctgtaccagcccacagggggacaggtgctgctggatgaaaagcccatctcacagtatgaacactgctacctgcacagccaggtggtttcagttgggcaggagcctgtgctgttctccggttctgtgaggaacaacattgcttatgggctgcagagctgcgaagatgataaggtgatggcggctgcccaggctgcccacgcagatgacttcatccaggaaatggagcatggaatatacacagatgtaggggagaagggaagccagctggctgcgggacagaaacaacgtctggccattgcccgggcccttgtacgagacccgcgggtcctcatcctggatgaggctactagtgccctagatgtgcagtgcgagcaggccctgcaggactggaattcccgtggggatcgcacagtgctggtgattgctcacaggctgcagacagttcagcgcgcccaccagatcctggtgctccaggagggcaagctgcagaagcttgcccagctctaggagggacaggacctctattcccgcctggtgcagcagcggctgatggactgaggccccagggatactgggccctcttctcaggggcgtctccaggacccagagctgttcctgctttgagtttccctagagctgtgcggccagatagctgttcctgagttgcaggcacgatggagatttggacactgtgtgcttttggtggggtagagaggtggggtggggtggggtgggggctgtctgtgtccaggaaacttaattccctggtgactagagctttgcctggtgatgaggagtattttgtggcataatacatatattttaaaatattttccttcttacatgaactgtatacattcatatagaaaatttagacaatataaaaaagtac

SEQ ID NO: 9663 - protein, 686 aa, Homo sapiens
  ref <308>: DATABASE ACCESSION NUMBER: SWISS-Prot / Q03519
  ref <309>: DATABASE ENTRY DATE: 2002-06-15
MRLPDLRPWTSLLLVDAALLWLLQGPLGTLLPQGLPGLWLEGTLRLGGLWGLLKLRGLLGFVGTLLLPLCLATPLTVSLRALVAGASRAPPARVASAPWSWLLVGYGAAGLSWSLWAVLSPPGAQEKEQDQVNNKVLMWRLLKLSRPDLPLLVAAFFFLVLAVLGETLIPHYSGRVIDILGGDFDPHAFASAIFFMCLFSFGSSLSAGCRGGCFTYTMSRINLRIREQLFSSLLRQDLGFFQETKTGELNSRLSSDTTLMSNWLPLNANVLLRSLVKVVGLYGFMLSISPRLTLLSLLHMPFTIAAEKVYNTRHQEVLREIQDAVARAGQVVREAVGGLQTVRSFGAEEHEVCRYKEALEQCRQLYWRRDLERALYLLVRRVLHLGVQMLMLSCGLQQMQDGELTQGSLLSFMIYQESVGSYVQTLVYIYGDMLSNVGAAEKVFSYMDRQPNLPSPGTLAPTTLQGVVKFQDVSFAYPNRPDRPVLKGLTFTLRPGEVTALVGPNGSGKSTVAALLQNLYQPTGGQVLLDEKPISQYEHCYLHSQVVSVGQEPVLFSGSVRNNIAYGLQSCEDDKVMAAAQAAHADDFIQEMEHGIYTDVGEKGSQLAAGQKQRLAIARALVRDPRVLILDEATSALDVQCEQALQDWNSRGDRTVLVIAHRLQTVQRAHQILVLQEGKLQKLAQL

SEQ ID NO: 9664 - DNA, 2674 bp, Rattus norvegicus; identical to SEQ ID NO: 9660
  misc_feature (1)..(2674): n=a, c, g or t
  ref <308>: DATABASE ACCESSION NUMBER: EMBL / X57523
  ref <309>: DATABASE ENTRY DATE: 1992-06-25

SEQ ID NO: 9665 - protein, 725 aa, Rattus norvegicus; identical to SEQ ID NO: 9661
  ref <308>: DATABASE ACCESSION NUMBER: SWISS-Prot / P36370
  ref <309>: DATABASE ENTRY DATE: 2002-06-15

SEQ ID NO: 9666 - DNA, 2474 bp, Homo sapiens; identical to SEQ ID NO: 9662
  ref <308>: DATABASE ACCESSION NUMBER: EMBL / M84748
  ref <309>: DATABASE ENTRY DATE: 2000-03-04

SEQ ID NO: 9667 - protein, 686 aa, Homo sapiens; identical to SEQ ID NO: 9663
  ref <308>: DATABASE ACCESSION NUMBER: SWISS-Prot / Q03519
  ref <309>: DATABASE ENTRY DATE: 2002-06-15

SEQ ID NO: 9668 - DNA, 499 bp, Rattus norvegicus
  ref <308>: DATABASE ACCESSION NUMBER: EMBL / X58200
  ref <309>: DATABASE ENTRY DATE: 1991-09-20
ctctttccggacgctcaagatgtcgaagcgaggacgtggtgggtcctccggagcgaaattccggatttccctgggtcttccggtaggagctgtgatcaactgtgctgacaacacaggagccaaaaacctgtatatcatctctgtgaagggaatcaagggacggctgaacagacttcctgctgctggtgtgggcgacatggtgatggccacagttaagaaaggcaaaccagaactaaggaaaaaggtacatcctgcagtggtgattcgacaacgaaagtcatatcgaagaaaagacggggtgttcctttattttgaagataatgcaggggtcatagtaaacaataaaggcgagatgaaaggttctgctatcacaggtccagttgcaaaggagtgtgcagacttgtggcccaggattgcatccaatgcaggaagcattgcctgattctccagtgtgtttgtaaaatatattcattaaagtcttctctctgaaaaaaaaaaa

SEQ ID NO: 9669 - protein, 140 aa, Rattus norvegicus [sequence omitted]

SEQ ID NO: 9670 - DNA, 493 bp, Homo sapiens
  ref <308>: DATABASE ACCESSION NUMBER: Refseq / NM_000978
  ref <309>: DATABASE ENTRY DATE: 2002-11-05
cttttttcttttttccggcgttcaagatgtcgaagcgaggacgtggtgggtcctctggtgcgaaattccggatttccttgggtcttccggtaggagctgtaatcaattgtgctgacaacacaggagccaaaaacctgtatatcatctccgtgaaggggatcaagggacggctgaacagacttcccgctgctggtgtgggtgacatggtgatggccacagtcaagaaaggcaaaccagagctcagaaaaaaggtacatccagcagtggtcattcgacaacgaaagtcataccgtagaaaagatggcgtgtttctttattttgaagataatgcaggagtcatagtgaacaataaaggcgagatgaaaggttctgccattacaggaccagtagcaaaggagtgtgcagacttgtggccccggattgcatccaatgctggcagcattgcatgattctccagtatatttgtaaaaaataaaaaaaaactaaacccatt

SEQ ID NO: 9671 - protein, 140 aa, Homo sapiens [sequence omitted]

SEQ ID NO: 9672 - DNA, 499 bp, Rattus norvegicus; identical to SEQ ID NO: 9668
  ref <308>: DATABASE ACCESSION NUMBER: EMBL / X58200
  ref <309>: DATABASE ENTRY DATE: 1991-09-20

SEQ ID NO: 9673 - protein, 140 aa, Rattus norvegicus [sequence omitted]

SEQ ID NO: 9674 - DNA, 493 bp, Homo sapiens; identical to SEQ ID NO: 9670
  ref <308>: DATABASE ACCESSION NUMBER: Refseq / NM_000978
  ref <309>: DATABASE ENTRY DATE: 2002-11-05

SEQ ID NO: 9675 - protein, 140 aa, Homo sapiens [sequence omitted]

SEQ ID NO: 9676 - DNA, 1459 bp, Rattus norvegicus
  ref <308>: DATABASE ACCESSION NUMBER: EMBL / X58294
  ref <309>: DATABASE ENTRY DATE: 1992-08-11
gcgtgactatgtcccaccactggggatacagcaagagcaacggaccagagaactggcacaaggagttccccattgccaatggagaccgacagtcccctgtggacattgacaccgggactgcccagcatgacccttccctacagcctctgctcatatgttacgataaggttgcttccaagagcattgtcaacaatggccattccttcaacgttgagtttgatgactcccaggactttgcagtgctgaaagagggacccctcagtggctcctacagattgatccagtttcactttcactggggctcatctgatggccagggctctgagcacaccgtgaacaaaaaaaaatatgctgcagagcttcacttggttcactggaacaccaaatatggggattttggaaaagctgtgcagcacccagatggactggctgttttgggtatttttttgaagattggacctgcctcacaaggccttcagaaaatcactgaagcactgcattccattaaaacaaaggggaaacgtgcagcctttgctaactttgatccttgctcccttcttcctggaaacttggactactggacatatcctggctctctgaccactccgcccctgctggaatgtgtgacctggatagtgctcaaggaacccattactgtcagcagtgagcagatgtctcatttccgtaaactgaacttcaattcggagggggaggctgaagaactgatggtggacaactggcgtccagctcagccgctgaagaacagaaagatcaaggcgtcctttaaataaaatgaccctgcagctggggtccaaaaagcacaagtgtggctgcctctctgtagctaagcacagttccgccttggtgattcagatcccgactttgcatctgatattgtaggcctttttacctctcacccattgtgcttactaataaaatgtgaaaaggaagacccaggtgtctcatgtggtggtagcatggtggcaggctggtggttgacttagggcatcctttctcagccacaacaatgcaatgcaaagaacagatatggcctcttgcttctccacagccatagaataatgagtactcaggcctgtttattaaaatgctatttttaaaaccatataaggtagaatgattgtttacaaatccacatcatgagacaaactgaggcaatttaggcaaatcaggtaaaacagtcatagttttatggttattaattagatgaatgttcactattccaagatcttatattaaagaaaaacttttaaaaagcttatatatttgtagcaaagttattcttaaatatgaattatgttgtaacttagtgacttttgatttctagaggtgtaaatgaagatgtaaaaattgatatagttgtgatacagagtatatttcccttcagataacttaccataacctaatggataatgtattttagatatattctctaataaaa

SEQ ID NO: 9677 - protein, 259 aa, Rattus norvegicus; identical to SEQ ID NO: 8731
  ref <308>: DATABASE ACCESSION NUMBER: SWISS-Prot / P27139
  ref <309>: DATABASE ENTRY DATE: 2001-10-16

SEQ ID NO: 9678 - DNA, 1551 bp, Homo sapiens; identical to SEQ ID NO: 8732
  ref <308>: DATABASE ACCESSION NUMBER: EMBL / J03037
  ref <309>: DATABASE ENTRY DATE: 1999-07-02

SEQ ID NO: 9679 - protein, 259 aa, Homo sapiens; identical to SEQ ID NO: 8733
  ref <308>: DATABASE ACCESSION NUMBER: SWISS-Prot / P00918
  ref <309>: DATABASE ENTRY DATE: 2002-06-15

SEQ ID NO: 9680 - DNA, 2125 bp, Rattus norvegicus
  ref <308>: DATABASE ACCESSION NUMBER: EMBL / X58631
  ref <309>: DATABASE ENTRY DATE: 1992-02-19
cccgcagtgcccccagagagctctaatggtaccaagtaacagaccggccttcctgtagcacggggacgccagatctcagaagatgtcggctatacaggcctcctggccatccggtacagaatgtattgccaagtacaacttccatggcactgccgagcaagaccttcccttctgcaaaggagatgtgctcaccattgtggctgtcaccaaggaccccaactggtacaaagccaaaaacaaagtgggccgtgagggcatcatcccagccaactatgtccagaagcgtgagggtgtgaaggcaggcaccaagctcagccttatgccctggttccacggcaagatcacacgggagcaggcggagcggcttctctacccaccagagacaggcctgttcctggtgcgggaaagcaccaactaccctggggactacacactgtgtgtgagctgtgaaggcaaggtggagcactaccgcatcatgtatcacgcgagcaagctgagcattgatgaggaggtgtacttcgagaacctcatgcagctggtggagcactacaccacagatgccgacggactctgcactcgcctcatcaaaccaaaggtcatggagggcacagtggcggcccaagatgaattctaccgcagtggctgggccctgaacatgaaggaactgaagctgctacagacaataggaaagggggagtttggagatgtgatgctgggggattaccgaggcaacaaagttgcagtcaagtgcattaagaatgatgctacagcccaggccttcctggctgaagcctctgtcatgacgcagcttcggcacagcaacctagtccagctactgggtgtgattgtggaggagaagggtgggctctacatcgtcacagagtacatggccaaggggagtttggtggactatcttcgatcacgtggtcgttcggtgctaggcggagactgtctcctcaaattctcactagacgtctgtgaagccatggagtacctggagggtaacaattttgtgcaccgggacttggctgcccggaatgtgctggtgtctgaggacaacgtggccaaagtcagtgactttggcctcactaaggaagcttccagcactcaggacacaggcaaactgccagtcaagtggacagctcctgaagccttgagagagaagaaattttccaccaagtctgatgtgtggagtttcggaatccttctctgggaaatctattccttcgggcgagtgccttacccaagaattcccctgaaggacgtcgtccctcgggtggaaaagggctataagatggacgctccggatggctgcccacccgcagtctatgatgttatgaagaactgctggcacctggatgctgccacgcggcccacctttctgcagcttcgagagcagctcgagcacatcagaacccatgagctgcacctgtgacctctgcctccacctaggccatggccttgcagggatggggcctagaagatacagatttggtgccctgctgcttgctgggcctgaacttgaactgagccccagcgggctggtaggcttcttgcctctgacctgcctgtcccttctggccccccagagaccccacctaggcctggcatcttctctcatggacccacctatagggcttagggcgcccactgaaggggctgagaagagaggaggccgaggagcgggaggcagtgctcctgtggtcggccttctctcggccccatcattcgccttcttagagttttattcctttccttttttgagatttttttccgtgtgtttattttttattatttttcaacataaggagaaagaaagtacccagcaaatgggcattttacaagaagtacgaatcttatttttcctgtcctgcccctgggggtggggaggaatcagcctctctctagggacccatcaccccagcctgtcccccatcctgtgttccatgtccagtgttgcctcggtcgcctatgtttgcgcttgaccatgtgcgctgtttgcatgtgcccaaggcaggcatctgtcaggggcttggatttcatgtgctgtggccgctcacccacactgccttgtgagatggaatcgtaataaaccactccatgaggacaccgccaaaaaaaaaaa

SEQ ID NO: 9681 - protein, 450 aa, Rattus norvegicus
  ref <308>: DATABASE ACCESSION NUMBER: SWISS-Prot / CAA41484
  ref <309>: DATABASE ENTRY DATE: 2002-06-15
MSAIQASWPSGTECIAKYNFHGTAEQDLPFCKGDVLTIVAVTKDPNWYKAKNKVGREGIIPANYVQKREGVKAGTKLSLMPWFHGKITREQAERLLYPPETGLFLVRESTNYPGDYTLCVSCEGKVEHYRIMYHASKLSIDEEVYFENLMQLVEHYTTDADGLCTRLIKPKVMEGTVAAQDEFYRSGWALNMKELKLLQTIGKGEFGDVMLGDYRGNKVAVKCIKNDATAQAFLAEASVMTQLRHSNLVQLLGVIVEEKGGLYIVTEYMAKGSLVDYLRSRGRSVLGGDCLLKFSLDVCEAMEYLEGNNFVHRDLAARNVLVSEDNVAKVSDFGLTKEASSTQDTGKLPVKWTAPEALREKKFSTKSDVWSFGILLWEIYSFGRVPYPRIPLKDVVPRVEKGYKMDAPDGCPPAVYDVMKNCWHLDAATRPTFLQLREQLEHIRTHELHL

SEQ ID NO: 9682 - DNA, 2420 bp, Homo sapiens
  ref <308>: DATABASE ACCESSION NUMBER: Refseq / NM_004383
  ref <309>: DATABASE ENTRY DATE: 2000-11-01
tccggggcggcccccggcagccagcgcgacgttccaaaatcgaacctcagtggcggcgctcggaagcggaactctgccggggccgcgccggctacattgtttcctccccccgactccctcccgcccccttcccccgcctttcttccctccgcgacccgggccgtgcgtccgtccccctgcctctgcctggcggtccctcctcccctctccttgcacccatacctctttgtaccgcaccccctggggacccctgcgcccctcccctcccccctgaccgcatggaccgtcccgcaggccgctgatgccgcccgcggcgaggtggcccggaccgcagtgccccaagagagctctaatggtaccaagtgacaggttggctttactgtgactcggggacgccagagctcctgagaagatgtcagcaatacaggccgcctggccatccggtacagaatgtattgccaagtacaacttccacggcactgccgagcaggacctgcccttctgcaaaggagacgtgctcaccattgtggccgtcaccaaggaccccaactggtacaaagccaaaaacaaggtgggccgtgagggcatcatcccagccaactacgtccagaagcgggagggcgtgaaggcgggtaccaaactcagcctcatgccttggttccacggcaagatcacacgggagcaggctgagcggcttctgtacccgccggagacaggcctgttcctggtgcgggagagcaccaactaccccggagactacacgctgtgcgtgagctgcgacggcaaggtggagcactaccgcatcatgtaccatgccagcaagctcagcatcgacgaggaggtgtactttgagaacctcatgcagctggtggagcactacacctcagacgcagatggactctgtacgcgcctcattaaaccaaaggtcatggagggcacagtggcggcccaggatgagttctaccgcagcggctgggccctgaacatgaaggagctgaagctgctgcagaccatcgggaagggggagttcggagacgtgatgctgggcgattaccgagggaacaaagtcgccgtcaagtgcattaagaacgacgccactgcccaggccttcctggctgaagcctcagtcatgacgcaactgcggcatagcaacctggtgcagctcctgggcgtgatcgtggaggagaagggcgggctctacatcgtcactgagtacatggccaaggggagccttgtggactacctgcggtctaggggtcggtcagtgctgggcggagactgtctcctcaagttctcgctagatgtctgcgaggccatggaatacctggagggcaacaatttcgtgcatcgagacctggctgcccgcaatgtgctggtgtctgaggacaacgtggccaaggtcagcgactttggtctcaccaaggaggcgtccagcacccaggacacgggcaagctgccagtcaagtggacagcccctgaggccctgagagagaagaaattctccactaagtctgacgtgtggagtttcggaatccttctctgggaaatctactcctttgggcgagtgccttatccaagaattcccctgaaggacgtcgtccctcgggtggagaagggctacaagatggatgcccccgacggctgcccgcccgcagtctatgaagtcatgaagaactgctggcacctggacgccgccatgcggccctccttcctacagctccgagagcagcttgagcacatcaaaacccacgagctgcacctgtgacggctggcctccgcctgggtcatgggcctgtggggactgaacctggaagatcatggacctggtgcccctgctcactgggcccgagcctgaactgagccccagcgggctggcgggcctttttcctgcgtcccagcctgcacccctccggccccgtctctcttggacccacctgtggggcctggggagcccactgaggggccagggaggaaggaggccacggagcgggcggcagcgccccaccacgtcgggcttccctggcctcccgccactcgccttcttagagttttattcctttccttttttgagattttttttccgtgtgtttattttttattatttttcaagataaggagaaagaaagtacccagcaaatgggcattttacaagaagtacgaatcttatttttcctgtcctgcccgtgaggtgggggggaccgggcccctctctagggacccctcgccccagcctcattccccattctgtgtcccatgtcccgtgtctcctcggtcgccccgtgtttgcgcttgaccatgttgcactgtttgcatgcgcccgaggcagacgtctgtcaggggcttggatttcgtgtgccgctgccacccgcccacccgccttgtgagatggaatcgtaataaaccacgccatgaggaaaaaa

SEQ ID NO: 9683 - protein, 450 aa, Homo sapiens
  ref <308>: DATABASE ACCESSION NUMBER: SWISS-Prot / P41240
  ref <309>: DATABASE ENTRY DATE: 2002-06-15
MSAIQAAWPSGTECIAKYNFHGTAEQDLPFCKGDVLTIVAVTKDPNWYKAKNKVGREGIIPANYVQKREGVKAGTKLSLMPWFHGKITREQAERLLYPPETGLFLVRESTNYPGDYTLCVSCDGKVEHYRIMYHASKLSIDEEVYFENLMQLVEHYTSDADGLCTRLIKPKVMEGTVAAQDEFYRSGWALNMKELKLLQTIGKGEFGDVMLGDYRGNKVAVKCIKNDATAQAFLAEASVMTQLRHSNLVQLLGVIVEEKGGLYIVTEYMAKGSLVDYLRSRGRSVLGGDCLLKFSLDVCEAMEYLEGNNFVHRDLAARNVLVSEDNVAKVSDFGLTKEASSTQDTGKLPVKWTAPEALREKKFSTKSDVWSFGILLWEIYSFGRVPYPRIPLKDVVPRVEKGYKMDAPDGCPPAVYEVMKNCWHLDAAMRPSFLQLREQLEHIKTHELHL

SEQ ID NO: 9684 - DNA, 1241 bp, Rattus norvegicus
  ref <308>: DATABASE ACCESSION NUMBER: EMBL / X58830
  ref <309>: DATABASE ENTRY DATE: 1995-07-20
gaattcgacatcacagcaactagcaatctgtgggtggtgacaccgcagcacaacatgggactccagctgagtgtggtgactcgggacggactccacatcaacccccgtgcggcgggcctggtgggcagagacggcccttacgacaagcagcccttcatggtggccttcttcaaggtgagcgaggtccacgtgcgcaccaccaggtcagcctccagtcggcgtcgacagcagagtcgcaatcggtccacccagtcgcaggacgtgtcccggggctccagtgcttcagactacaacagcagtgagttaaaaacagcttgcaagaagcatgagctttacgtgagcttccaggacctgggatggcaggactggatcatcgctcccaaaggctacgctgccaactattgtgacggagagtgttccttccctctcaatgcacacatgaatgccaccaaccacgccattgtacagaccttggtccaccttatgaatcccgagtacgtccccaaaccatgctgcgcaccaaccaaactgaatgccatctcggttctttacttcgacgacaactccaatgtcatcttgaaaaaatacaggaacatggttgtgagagcttgtggatgtcattgagtggaagccagttgcaggggctgtgattctgcctcggattcctaacatctgccttaaaacacgggaagcagcacagtgcagcgggagcatgacactcaaagcatctcctgctggtgccttagcccaaggaggattttacgaggaccttgtcgatggctttcccagttgagcagttgctggtctgtaggaagctgtaatgcttgtagcacaggcctggaaactacagaaacatagtgttctcctcccccagtcccacccagactagtcttagcttttagatctagctgtttgtggtgtaagtaggagataaacttgaaggaatattaaatatccctggttgaaagacagatctagtggttctacagcacccatcccagggagattttgcagatagccgaatggaggagaggagaacactctattagattccattcccagcaaagggcagctcccacagaacctgcagcctggccatcacagggctttgtggaggtgccttctgtctactgttagttacccgttttatgttgactcttggtggtgtgaaaatgtactaatttcggtcaaaacaaactatagcattcccacgccatactcctcccttactcacagaattc

SEQ ID NO: 9685 - protein, 207 aa, Rattus norvegicus
  ref <308>: DATABASE ACCESSION NUMBER: SWISS-Prot / Q04906
  ref <309>: DATABASE ENTRY DATE: 1995-11-01
EFDITATSNLWVVTPQHNMGLQLSVVTRDGLHINPRAAGLVGRDGPYDKQPFMVAFFKVSEVHVRTTRSASSRRRQQSRNRSTQSQDVSRGSSASDYNSSELKTACKKHELYVSFQDLGWQDWIIAPKGYAANYCDGECSFPLNAHMNATNHAIVQTLVHLMNPEYVPKPCCAPTKLNAISVLYFDDNSNVILKKYRNMVVRACGCH

SEQ ID NO: 9686 - DNA, 509 bp, Homo sapiens
  ref <308>: DATABASE ACCESSION NUMBER: EMBL / AI367148
  ref <309>: DATABASE ENTRY DATE: 2000-03-03
actgtctgtctgaggcagaagataacagcagcatctcgaccagcctctgccttaaaggaaatctttattaatcacgtatggttcacagataattctttttttaaaaaaacccaacctcctagagaagcacaactgtcaagagtcttgtacacacaacttcagctttgcatcacgagtcttgtattccaagaaaatcaaagtggtacaatttgtttgtttacactatgatactttctaaataaactttttttttaaaagtctggtctttccttcaatgttacagcaaaacagatataaaatagacaataaattatagtttatatttacaaaaaaagctgtaagtgcaaacagttgtagattataaatgtattatttaatcagtttagtatgaaattgccttcccagtacatgattgtgaaaaagacatttagaaaatattctaaaatttaatctgagcctcactttctacaagggaaatcatgatttccgttcataaacagcatgctcat

SEQ ID NO: 9687 - protein, 513 aa, Homo sapiens
  ref <308>: DATABASE ACCESSION NUMBER: SWISS-Prot / P22004
  ref <309>: DATABASE ENTRY DATE: 2001-10-16
MPGLGRRAQWLCWWWGLLCSCCGPPPLRPPLPAAAAAAAGGQLLGDGGSPGRTEQPPPSPQSSSGFLYRRLKTQEKREMQKEILSVLGLPHRPRPLHGLQQPQPPALRQQEEQQQQQQLPRGEPPPGRLKSAPLFMLDLYNALSADNDEDGASEGERQQSWPHEAASSSQRRQPPPGAAHPLNRKSLLAPGSGSGGASPLTSAQDSAFLNDADMVMSFVNLVEYDKEFSPRQRHHKEFKFNLSQIPEGEVVTAAEFRIYKDCVMGSFKNQTFLISIYQVLQEHQHRDSDLFLLDTRVVWASEEGWLEFDITATSNLWVVTPQHNMGLQLSVVTRDGVHVHPRAAGLVGRDGPYDKQPFMVAFFKVSEVHVRTTRSASSRRRQQSRNRSTQSQDVARVSSASDYNSSELKTACRKHELYVSFQDLGWQDWIIAPKGYAANYCDGECSFPLNAHMNATNHAIVQTLVHLMNPEYVPKPCCAPTKLNAISVLYFDDNSNVILKKYRNMVVRACGCH

SEQ ID NO: 9688 - DNA, 2770 bp, Rattus norvegicus
  ref <308>: DATABASE ACCESSION NUMBER: EMBL / X58865
  ref <309>: DATABASE ENTRY DATE: 1991-12-16
ggcgacagccgcgcggaacgcagagcggcgggagaggagctcgggctcctggtctctgctgccgtcatggctaccgtggacctggagaagttgcggatgtcgggggctggcaaggccatcggagtgctgacaagcggcggtgacgcgcaaggtatgaatgctgctgtcagggctgtgactcgtatgggcatatatgtgggggccaaagtcttcctcatctacgagggctacgagggcctcgtggaaggaggcgagaacatcaagccagccaactggctcagtgtctccaacatcatccagctgggcggcaccatcattggcagtgcccgctgtaaggccttcactacgagggaagggcgcctggcagcggcctacaatctgctccaacacggcatcaccaacctgtgtgtcatcggtggggatggcagcctcacgggggccaacatcttccgcaacgagtggggcagcttgctggaggaactggtgaaggaaggcaagatctcagagtccacagctcagaactacgcacacttgagcatcgccggtctggtgggctccatcgacaacgacttctgcggcaccgacatgaccatcggcacggactcggccctgcaccggatcatggaggtcatcgacgccatcaccaccactgcccagagccaccagaggacctttgtgttggaggtgatgggacggcactgcgggtacctggcgctggtgtctgcgctggcctccggggctgattggctgttcatccctgaagcgcccccggaggatggctgggagaacttcatgtgtgagaggctgggggagactcggagccgggggtctcgactgaacatcatcatcatcgcggagggtgccatcgaccggcatggaaagcctatctcatccagctacgtgaaagacctggtggttcagaggctgggcttcgatacacgagtgaccgtgctgggccacgtacagcgaggagggacaccctcggcctttgaccgagtcctgagtagcaagatgggtatggaggccgtgatggcgctgctggaggccacgccggacacgccggcctgcgtggtcagcctctccgggaatcagtctgtgcggctgcctctcatggagtgtgtgcaagtgacgaaggatgtgcagaaggccatggatgagaagaggtttgacgaggccatccagctccgtggcaggagcttcgagaacaactggaaaatttacaagctcctcgcccaccagaaggtgtctaaggagaagtccaacttctccctggccatcctgaatgtgggagctccagcggccggcatgaacgcagccgtgcgctccgcggtacgcactggcatctccgagggacacacagtgtacgttgtgcatgatggctttgagggcctggccaagggtcaggtgcaagaagtgggctggcatgatgtggcaggttggctaggacgtggtggctcaatgctggggaccaagaggaccctgcccaagccccacctggaggccattgtagaaaatctccgtacctacaacattcatgccctgttggtgatcggtggctttgaggcctacgagggtgtgctgcagctggtggaggctagggggcgctacgaggaactctgtatcgtcatgtgcgtcatcccagccaccatcagcaacaatgtccctggcactgacttcagcctgggctcggacacggccgtcaacgctgcaatggagagttgtgaccgcatcaaacaatcggcctcggggacaaagcggcgtgtgttcattgtagagaccatggggggctactgtggctacctggccactgtgacaggcattgctgtgggcgccgatgccgcctacgtctttgaggaccctttcaacatccacgacttgaaggccaatgtggagcatatgacagagaagatgaagacagacatccagaggggcctggtgctccggaacgagaagtgtcacgaacactacaccacggaattcctatacaacctatactcctcggaaggcagaggtgtgttcgactgcaggaccaacgtgctgggccacctgcagcagggtggcgctccaacccccttcgaccggaactatgggaccaaactgggggtgaaggccatgttgtggatgtcggagaagctgcgtgatgtctaccgcaaagggcgggtgtttgccaatgctccggactcagcctgtgtgatcggcctgaggaagaaggtggtggccttcagttcggtcacagaactcaagaaagagacagattttgagcaccgtatgccgcgggagcagtggtggctgaatctgcggctgatgctgaagatgttggcacactaccgcatcagcatggccgactacgtgtctggggagctggagcacgtcacacgccgcaccttgagcatagacaagggtttctgagcttaccgatcaccctcgttcctgctctcccggactctctctccctcccagtgctagccacagatcccagcactaaggggaactcacatggaactcggagcctgtggttggttgaaggatttgggggtctactgtgctgctctgggactcctcccttagccacccccacccccccaccccctcagaacagagcacctgtggggcccttacattccagttctggctgggcagacccacatcaccactccctcactggtcagctggctgcctcaccacacggccgaaaagagcctcatggtttttttttttagaaataaagtcacctgtttagaaaaaaaaaaaaaaaaaaaaaaaaaaaaaa

SEQ ID NO: 9689 - protein, 780 aa, Rattus norvegicus
  ref <308>: DATABASE ACCESSION NUMBER: SWISS-Prot / P30835
  ref <309>: DATABASE ENTRY DATE: 2001-10-16
MATVDLEKLRMSGAGKAIGVLTSGGDAQGMNAAVRAVTRMGIYVGAKVFLIYEGYEGLVEGGENIKPANWLSVSNIIQLGGTIIGSARCKAFTTREGRLAAAYNLLQHGITNLCVIGGDGSLTGANIFRNEWGSLLEELVKEGKISESTAQNYAHLSIAGLVGSIDNDFCGTDMTIGTDSALHRIMEVIDAITTTAQSHQRTFVLEVMGRHCGYLALVSALASGADWLFIPEAPPEDGWENFMCERLGETRSRGSRLNIIIIAEGAIDRHGKPISSSYVKDLVVQRLGFDTRVTVLGHVQRGGTPSAFDRVLSSKMGMEAVMALLEATPDTPACVVSLSGNQSVRLPLMECVQVTKDVQKAMDEKRFDEAIQLRGRSFENNWKIYKLLAHQKVSKEKSNFSLAILNVGAPAAGMNAAVRSAVRTGISEGHTVYVVHDGFEGLAKGQVQEVGWHDVAGWLGRGGSMLGTKRTLPKPHLEAIVENLRTYNIHALLVIGGFEAYEGVLQLVEARGRYEELCIVMCVIPATISNNVPGTDFSLGSDTAVNAAMESCDRIKQSASGTKRRVFIVETMGGYCGYLATVTGIAVGADAAYVFEDPFNIHDLKANVEHMTEKMKTDIQRGLVLRNEKCHEHYTTEFLYNLYSSEGRGVFDCRTNVLGHLQQGGAPTPFDRNYGTKLGVKAMLWMSEKLRDVYRKGRVFANAPDSACVIGLRKKVVAFSSVTELKKETDFEHRMPREQWWLNLRLMLKMLAHYRISMADYVSGELEHVTRRTLSIDKGF

SEQ ID NO: 9690 - DNA, 2591 bp, Homo sapiens; identical to SEQ ID NO: 3066
  ref <308>: DATABASE ACCESSION NUMBER: EMBL / D25328
  ref <309>: DATABASE ENTRY DATE: 2002-06-03

SEQ ID NO: 9691 - protein, 784 aa, Homo sapiens; identical to SEQ ID NO: 3067
  ref <308>: DATABASE ACCESSION NUMBER: SWISS-Prot / Q01813
  ref <309>: DATABASE ENTRY DATE: 2002-06-15

SEQ ID NO: 9692 - DNA, 1796 bp, Rattus norvegicus
  ref <308>: DATABASE ACCESSION NUMBER: EMBL / X59132
  ref <309>: DATABASE ENTRY DATE: 1991-06-27
tttgttaacagtcttgccacctccttcagggagcagcagcctcaagcctggctgtggatctgatcggactgggtaggtccagccatggtctctctgggcttggaggtcgcccagggtcctggaccacgtgcaggtcgctgagctggacgcagaaccggccaccaagctcctgaaggggccagaacgcaaaggggagcaacagtgggcggagcatgctcagcaccatgagaccccggctgtccctgcttctgctgaggctgttgctgctcaccaaagcagcgcacaccgttggagttccgccccgactgtgtgacgtgcggcgtgtgctgcttgaggaacgggcccactgcctacagcaactctccaaagagaagaaaggagcactgggcccggagacagcatcaggctgtgaggggctttgggacaacatgagctgctggccctcctctgcaccagcacggacagtggaagtgcagtgtccgaagttcctcctgatgctctcaaacaaaaatgggtctctgttccggaactgcacacaagatggatggtcagaaaccttccccaggcctgacctggcctgtggggtcaacataaacaactcctttaatgagagacggcatgcgtacctgctgaaactcaaggtcatgtacactgtaggctacagttcctccttggccatgctcctggtcgccctcagcatcctgtgctctttccggaggctgcactgcactcgcaactacatccacatgcacctgttcgtgtccttcatcctgcgcgccctgtccaacttcatcaaggacgccgtactcttctcctcggacgacgtcacctactgtgatgcccataaggtgggctgcaagctggtcatgatcttcttccagtactgcatcatggccaactacgcatggctgctggtggagggcctctaccttcacacactccttgccatctccttcttctcagaaaggaagtacctgcaggcctttgtgctcctcggatggggttctccagccatttttgttgctttgtgggctatcaccaggcactttctagaaaatactggatgctgggacatcaacgccaatgcttccgtctggtgggtcattcgagggcctgtgattctgtccatcctgatcaatttcatcttcttcataaacattctaagaatcctgatgaggaaacttagaacacaagaaacaagaggaagtgaaacaaaccattataagcgcctggccaagtccaccctcctgctgatcccgctctttggcatccactacattgtcttcgccttctccccagaggacgccatggaggtccagctgttcttcgaactggccctgggctccttccagggtctggtggtagctgtcctttactgcttcctcaatggtgaggtgcagttggaagttcagaaaaaatggcgccagtggcaccttcaagagttcccgctgcgccctgtggccttcaataactccttcagcaacgccaccaacggccccacccacagcaccaaggctagcactgagcaaagccggagcatccccagggccagtatcatctgaggctgcagcaaggcgccagcggacgaagggttggatattcggtaggacggacatctgtctgatagccatctcgtgctcgactggctgaacaggcttgtctctcgggtccgagcttcctcggagatcaagcaagaggagactactaggtcatcgcggagcaggaaacggacccatgacttggtttttcttgttcttctaagaagagcaattcagcaactccagaaggggcagggg

SEQ ID NO: 9693 - protein, 449 aa, Rattus norvegicus
  ref <308>: DATABASE ACCESSION NUMBER: SWISS-Prot / P23811
  ref <309>: DATABASE ENTRY DATE: 2001-10-16
MLSTMRPRLSLLLLRLLLLTKAAHTVGVPPRLCDVRRVLLEERAHCLQQLSKEKKGALGPETASGCEGLWDNMSCWPSSAPARTVEVQCPKFLLMLSNKNGSLFRNCTQDGWSETFPRPDLACGVNINNSFNERRHAYLLKLKVMYTVGYSSSLAMLLVALSILCSFRRLHCTRNYIHMHLFVSFILRALSNFIKDAVLFSSDDVTYCDAHKVGCKLVMIFFQYCIMANYAWLLVEGLYLHTLLAISFFSERKYLQAFVLLGWGSPAIFVALWAITRHFLENTGCWDINANASVWWVIRGPVILSILINFIFFINILRILMRKLRTQETRGSETNHYKRLAKSTLLLIPLFGIHYIVFAFSPEDAMEVQLFFELALGSFQGLVVAVLYCFLNGEVQLEVQKKWRQWHLQEFPLRPVAFNNSFSNATNGPTHSTKASTEQSRSIPRASII

SEQ ID NO: 9694 - DNA, 371 bp, Homo sapiens
  ref <308>: DATABASE ACCESSION NUMBER: EMBL / AI220044
  ref <309>: DATABASE ENTRY DATE: 1998-12-01
tttctcactgcagcatgtagcaaattagactggccacctggagacccaggtcctcattcaggttatgctcacagaatgtgttacccggaaagagctgaagtctagggcctcagtttccccagtgcactggtggcaggtgggcctggctgagtcccagcccctcaggctctggcctctatgtccctacattctctccctgcaggaggctccactgcactcgcaactacatccacatgcacctgttcgtgtccttcatccttcgtgccctgtccaacttcatcaaggacgccgtgctcttctcctcagatgatgtcacctactgcgatgcccacagggtaatatgtctgggtgccccaggatgtcgccaggcc

SEQ ID NO: 9695 - protein, 440 aa, Homo sapiens
  ref <308>: DATABASE ACCESSION NUMBER: SWISS-Prot / P47872
  ref <309>: DATABASE ENTRY DATE: 2001-10-16
MRPHLSPPLQQLLLPVLLACAAHSTGALPRLCDVLQVLWEEQDQCLQELSREQTGDLGTEQPVPGCEGMWDNISCWPSSVPGRMVEVECPRFLRMLTSRNGSLFRNCTQDGWSETFPRPNLACGVNVNDSSNEKRHSYLLKLKVMYTVGYSSSLVMLLVALGILCAFRRLHCTRNYIHMHLFVSFILRALSNFIKDAVLFSSDDVTYCDAHRAGCKLVMVLFQYCIMANYSWLLVEGLYLHTLLAISFFSERKYLQGFVAFGWGSPAIFVALWAIARHFLEDVGCWDINANASIWWIIRGPVILSILINFILFINILRILMRKLRTQETRGNEVSHYKRLARSTLLLIPLFGIHYIVFAFSPEDAMEIQLFFELALGSFQGLVVAVLYCFLNGEVQLEVQKKWQQWHLREFPLHPVASFSNSTKASHLEQSQGTCRTSII

SEQ ID NO: 9696 - DNA, 471 bp, Rattus norvegicus
  ref <308>: DATABASE ACCESSION NUMBER: EMBL / X59677
  ref <309>: DATABASE ENTRY DATE: 1995-08-06
gctagtgacacgaccactcttgagatcaccaccactcctgatgtgaacaccactgctgatgtcaccaccactcctgatgtgaccaccattgctgatgtcaccaccactgctagtatcaccaccactcctgatgtgaccaccacccctgatgtgaccaccactgctgatgtcaccaccactgctggtatcaccaccactcctgatctgaccaccactacgctatttctacccatcctggcctccatggcacaagccatctgtcttcacccgctctacgtcatgctcccctgcaccctggctgcctccctggctttcatgctacctgtggccactccacccaacgccattgtattctcctttggaggcctcaaggtgtctgatatggcccgcgctggattcctgctcaatatcatcggagtgctggctatcacattatccatcaacagctggagtatccccatcttcaagctg

SEQ ID NO: 9697 - protein, 157 aa, Rattus norvegicus
  ref <308>: DATABASE ACCESSION NUMBER: SWISS-Prot / CAA42203
  ref <309>: DATABASE ENTRY DATE: 2003-02-01
ASDTTTLEITTTPDVNTTADVTTTPDVTTIADVTTTASITTTPDVTTTPDVTTTADVTTTAGITTTPDLTTTTLFLPILASMAQAICLHPLYVMLPCTLAASLAFMLPVATPPNAIVFSFGGLKVSDMARAGFLLNIIGVLAITLSINSWSIPIFKL

SEQ ID NO: 9698 - DNA, 1953 bp, Homo sapiens
  ref <308>: DATABASE ACCESSION NUMBER: Refseq / NM_003984
  ref <309>: DATABASE ENTRY DATE: 2000-11-01
gatctttggtccttctgttacccagctcctggaggcagtggctgtagcagcccttgctgctccacaccatggccacctgctggcaggccctgtgggcctatcgctcctacctgatcgtgttcttcgtgcccattctcctgctgcctctgcccatcctcgtccccagtaaggaggcctactgcgcgtatgccatcatcctcatggcgctcttctggtgcactgaggccctgcccctggccgtcactgccctcttccccttaatcctgttccctatgatgggcatcgtggatgcctctgaggttgccgtcgagtatcttaaggactccaacctcctgttcttcggggggctgctggtggccatcgcggtggaacactggaacctgcataaacgcatcgccctccgtgtcctcctcatcgttggggtgcggcctgccccgctaatcctgggcttcatgctggtcacggccttcctgtccatgtggatcagcaacacggccacctcagccatgatggtgcccatcgcacatgccgtcctggaccagctgcacagctcgcaagccagcagcaacgtcgaggagggcagcaacaaccccaccttcgagctccaggaaccaagtccccagaaggaggtgaccaagcttgataatgggcaggccctccctgtcacgtctgcctcttcggaggggagggcacatctcagccagaagcatctccacctcacccagtgcatgagcctgtgcgtgtgctactccgccagcatcgggggcatcgccacgctgactggcaccgcacccaacctggtgctgcaaggccagatcaactcgctcttcccccaaaacggcaacgtggtgaacttcgcctcctggttcagcttcgccttccccaccatggtcatcttgctgctgctggcctggttgtggctgcagatcctcttcctgggcttcaacttccggaagaactttggcattggggaaaagatgcaggagcaacagcaggcagcctactgcgtcatccagaccgagcacaggctgctgggccccatgacctttgcagaaaaggccatcagcatcctattcgtcatcctggtgctgctctggttcacccgggagccgggcttttttcttggctggggcaatttggcttttcccaatgccaagggggagagcatggtgtccgatgggacagtggccatcttcatcggcataattatgttcatcataccctccaagttcccagggctgacccaggacccagaaaacccagggaagctgaaggcccctcttggcctcctcgactggaagacggtgaaccagaagatgccgtggaatatcgtgttattgctgggtggtggctatgccctggccaagggcagtgagcgatcgggcctgtcagagtggctgggaaacaagctgaccccactgcagagtgtgccagctccagccattgccatcatcctctccctcctggtggccaccttcaccgagtgcactagcaacgtggccaccactacgatcttcctgcccatcctagcctccatggcccaggccatctgcctccaccctctctacgtcatgctcccctgcactctggccacctccctggccttcatgttgcctgtggccaccccgcccaatgccatcgtcttctctttcggggacctcaaagtgttggatatggcccgggcaggattcctcctcaacatcattggagtcctgatcatcgcactggccatcaacagctggggcatccccctcttcagcctgcactctttcccctcctgggcacagtccaacaccacagcccagtgcctgccaagcctggccaacaccaccacaccaagcccctaggctggggcacagcctggccatgcccaggaagacccaccccattcccactcctctgagcccggaggggacaccccaagctccaagctccaagctccaggccggaatt

SEQ ID NO: 9699 - protein, 592 aa, Homo sapiens
  ref <308>: DATABASE ACCESSION NUMBER: SWISS-Prot / Q13183
  ref <309>: DATABASE ENTRY DATE: 2002-06-15
MATCWQALWAYRSYLIVFFVPILLLPLPILVPSKEAYCAYAIILMALFWCTEALPLAVTALFPLILFPMMGIVDASEVAVEYLKDSNLLFFGGLLVAIAVEHWNLHKRIALRVLLIVGVRPAPLILGFMLVTAFLSMWISNTATSAMMVPIAHAVLDQLHSSQASSNVEEGSNNPTFELQEPSPQKEVTKLDNGQALPVTSASSEGRAHLSQKHLHLTQCMSLCVCYSASIGGIATLTGTAPNLVLQGQINSLFPQNGNVVNFASWFSFAFPTMVILLLLAWLWLQILFLGFNFRKNFGIGEKMQEQQQAAYCVIQTEHRLLGPMTFAEKAISILFVILVLLWFTREPGFFLGWGNLAFPNAKGESMVSDGTVAIFIGIIMFIIPSKFPGLTQDPENPGKLKAPLGLLDWKTVNQKMPWNIVLLLGGGYALAKGSERSGLSEWLGNKLTPLQSVPAPAIAIILSLLVATFTECTSNVATTTIFLPILASMAQAICLHPLYVMLPCTLATSLAFMLPVATPPNAIVFSFGDLKVLDMARAGFLLNIIGVLIIALAINSWGIPLFSLHSFPSWAQSNTTAQCLPSLANTTTPSP

SEQ ID NO: 9700 - DNA, 1543 bp, Rattus norvegicus
  ref <308>: DATABASE ACCESSION NUMBER: EMBL / X59737
  ref <309>: DATABASE ENTRY DATE: 1991-10-21
cgtagaaactcaccattccctgcccaaccccagccccacacccagagcaatcaacagttccagatttgcgccagatcctgctccaaatccggtagccgcatcccaagccatggctggtcccttctcccgtctgctgtctgcccgccccggactcaagctcctggctttggctggagctgggtctctcgccgccgggattctgctccgtccggaatctgtacgagcggccaccggtgaacggaggagactgtatcccccgagcgctgagtacccagacctccgaaagcacaacaactgcatggccagtcacctgaccccagcagtctatgcacggctctgcgacaagaccacacccactggctggacactagatcagtgcatccagactggagtggacaaccctggccaccccttcatcaagactgtgggcatggtggctggagatgaggagacctatgaggtatttgccgaactgtttgaccctgtgatccaagagcggcataatggatatgaccctagaacaatgaagcacaccactgaccttgatgccagcaaaatccgttctggctactttgatgagaggtacgtattgtcctcaagagtcagaactggccgaagtatcaggggactcagtctccctccagcctgcactcgggcagagcgacgagaggtggagcgtgttgtggtggacgcgctgagtggcctgaagggcgacctggctggacggtactacaggctcagtgagatgacagaggctgagcagcagcagcttattgacgaccatttcctgtttgataaacctgtgtccccattgctgacagcagcaggcatggctcgagactggccagatgcccgaggaatctggcacaacaatgagaagagtttcttgatctgggtgaatgaggaggaccacacacgggtcatctctatggagaaaggcggcaacatgaagagagtgtttgaaagattctgccggggcctcaaaaaggtggagaagctgatccaggaacgaggctgggagttcatgtggaatgagcgtttaggatacatcttgacctgtccatctaacctgggcactggacttcgggcaggagtacacgtcaaactgccactgctaagcaaagatagccgcttcccaaagatcctggagaacctaaggctgcaaaagcgtgggactggaggagtggacacgcctgccacagcggatgtctttgacatctctaatctggatcgacttggcaagtcagaggtggagctggtgcagctggtcatcgatggggtgaactatttgattgactgtgaacggcgtctggagaaaggacaggatattcgaatccctccacctcttgtccacggcaaacattaactccccgtccccagcagctgaatcaagattccccaggacttctgcatatttaacagtggcccattctacttgccaaggacctgcctctcaatccctgtcctagtaaagactccacgttctgttgcaaaaaaaaaaaaaaataaagttcctatttctctgcaaaaaaaaaaaaaaaaa

SEQ ID NO: 9701 - protein, 418 aa, Rattus norvegicus
  ref <308>: DATABASE ACCESSION NUMBER: SWISS-Prot / CAA42415
  ref <309>: DATABASE ENTRY DATE: 1999-07-15
MAGPFSRLLSARPGLKLLALAGAGSLAAGILLRPESVRAATGERRRLYPPSAEYPDLRKHNNCMASHLTPAVYARLCDKTTPTGWTLDQCIQTGVDNPGHPFIKTVGMVAGDEETYEVFAELFDPVIQERHNGYDPRTMKHTTDLDASKIRSGYFDERYVLSSRVRTGRSIRGLSLPPACTRAERREVERVVVDALSGLKGDLAGRYYRLSEMTEAEQQQLIDDHFLFDKPVSPLLTAAGMARDWPDARGIWHNNEKSFLIWVNEEDHTRVISMEKGGNMKRVFERFCRGLKKVEKLIQERGWEFMWNERLGYILTCPSNLGTGLRAGVHVKLPLLSKDSRFPKILENLRLQKRGTGGVDTPATADVFDISNLDRLGKSEVELVQLVIDGVNYLIDCERRLEKGQDIRIPPPLVHGKH

SEQ ID NO: 9702 - DNA, 1528 bp, Homo sapiens
  ref <308>: DATABASE ACCESSION NUMBER: Refseq / NM_020990
  ref <309>: DATABASE ENTRY DATE: 2002-11-05
ccggctcccattccggctccagcctccaatccgacccccatttcggctgcagcctcggacctagctccggccctcggtctatccggttgcatcctccctccctgttccggatcttatcttgcgccagcgcctactccaggatcccgtagccagacctcaagccatggctggtcccttctcccgtctgctgtccgcccgcccgggactcaggctcctggctttggccggagcggggtctctagccgctgggtttctgctccgaccggaacctgtacgagctgccagtgaacgacggaggctgtatcccccgagcgctgagtacccagacctccgaaagcacaacaactgcatggccagtcacctgaccccagcagtctatgcacggctctgcgacaagaccacacccactggttggacgctagatcagtgtatccagactggcgtggacaaccctggccaccccttcatcaagactgtgggcatggtggctggagatgaggagacctatgaggtatttgctgacctgtttgaccctgtgatccaagagcgacacaatggatatgacccccggacaatgaagcacaccacggatctagatgccagtaaaatccgttctggctactttgatgagaggtatgtattgtcctctagagtcagaactggccgaagcatccgaggactcagtctgcctccagcttgcactcgagcagagcgacgagaggtggaacgtgttgtggtggatgcactgagtggcctgaagggtgacctggctggacgttactataggctcagtgagatgacagaggctgaacagcagcagcttattgatgaccactttctgtttgataagcctgtgtccccgttgctgactgcagcaggaatggctcgagactggccagatgctcgtggaatttggcacaacaatgagaagagcttcctgatctgggtgaatgaggaggatcatacacgggtgatctccatggagaagggtggtaacatgaagagagtgtttgaaagattctgccgaggcctcaaagaggtggagagacttatccaagaacgtggctgggagttcatgtggaatgagcgtttgggatacatcttgacctgtccatctaacctgggcactggacttcgggcaggagtgcacatcaaactgcccctgctaagcaaagatagccgcttcccaaagatcctggagaacctaagactccaaaaacgtggtactggaggagtggacactgctgctacaggcggtgtctttgatatttctaatttggaccgactaggcaaatcagaggtggagctggtgcaactggtcatcgatggagtaaactatttgattgattgtgaacggcgtctggagagaggccaggatatccgcatccccacacctgtcatccacaccaagcattaactccccatcgccagctgatgactcaagattcccaggagttttgctcattctaatgatggcccattctacttgctctggacctgcccccgcatcccctgcctccatcctagt

SEQ ID NO: 9703 - protein, 417 aa, Homo sapiens
  ref <308>: DATABASE ACCESSION NUMBER: Refseq / NP_066270
  ref <309>: DATABASE ENTRY DATE: 2002-11-05
MAGPFSRLLSARPGLRLLALAGAGSLAAGFLLRPEPVRAASERRRLYPPSAEYPDLRKHNNCMASHLTPAVYARLCDKTTPTGWTLDQCIQTGVDNPGHPFIKTVGMVAGDEETYEVFADLFDPVIQERHNGYDPRTMKHTTDLDASKIRSGYFDERYVLSSRVRTGRSIRGLSLPPACTRAERREVERVVVDALSGLKGDLAGRYYRLSEMTEAEQQQLIDDHFLFDKPVSPLLTAAGMARDWPDARGIWHNNEKSFLIWVNEEDHTRVISMEKGGNMKRVFERFCRGLKEVERLIQERGWEFMWNERLGYILTCPSNLGTGLRAGVHIKLPLLSKDSRFPKILENLRLQKRGTGGVDTAATGGVFDISNLDRLGKSEVELVQLVIDGVNYLIDCERRLERGQDIRIPTPVIHTKH

SEQ ID NO: 9704 - DNA, 1543 bp, Rattus norvegicus; identical to SEQ ID NO: 9700
  ref <308>: DATABASE ACCESSION NUMBER: EMBL / X59737
  ref <309>: DATABASE ENTRY DATE: 1991-10-21

SEQ ID NO: 9705 - protein, 418 aa, Rattus norvegicus; identical to SEQ ID NO: 9701
  ref <308>: DATABASE ACCESSION NUMBER: SWISS-Prot / CAA42415
  ref <309>: DATABASE ENTRY DATE: 1999-07-15

SEQ ID NO: 9706 - DNA, 1528 bp, Homo sapiens; identical to SEQ ID NO: 9702
  ref <308>: DATABASE ACCESSION NUMBER: Refseq / NM_020990
  ref <309>: DATABASE ENTRY DATE: 2002-11-05

SEQ ID NO: 9707 - protein, 417 aa, Homo sapiens; identical to SEQ ID NO: 9703
  ref <308>: DATABASE ACCESSION NUMBER: Refseq / NP_066270
  ref <309>: DATABASE ENTRY DATE: 2002-11-05

SEQ ID NO: 9708 - DNA, 1543 bp, Rattus norvegicus; identical to SEQ ID NO: 9700
  ref <308>: DATABASE ACCESSION NUMBER: EMBL / X59737
  ref <309>: DATABASE ENTRY DATE: 1991-10-21

SEQ ID NO: 9709 - protein, 418 aa, Rattus norvegicus; identical to SEQ ID NO: 9701
  ref <308>: DATABASE ACCESSION NUMBER: SWISS-Prot / CAA42415
  ref <309>: DATABASE ENTRY DATE: 1999-07-15

SEQ ID NO: 9710 - DNA, 1528 bp, Homo sapiens; identical to SEQ ID NO: 9702
  ref <308>: DATABASE ACCESSION NUMBER: Refseq / NM_020990
  ref <309>: DATABASE ENTRY DATE: 2002-11-05

SEQ ID NO: 9711 - protein, 417 aa, Homo sapiens; identical to SEQ ID NO: 9703
  ref <308>: DATABASE ACCESSION NUMBER: Refseq / NP_066270
  ref <309>: DATABASE ENTRY DATE: 2002-11-05

SEQ ID NO: 9712 - DNA, 1543 bp, Rattus norvegicus; identical to SEQ ID NO: 9700
  ref <308>: DATABASE ACCESSION NUMBER: EMBL / X59737
  ref <309>: DATABASE ENTRY DATE: 1991-10-21

SEQ ID NO: 9713 - protein, 418 aa, Rattus norvegicus; identical to SEQ ID NO: 9701
  ref <308>: DATABASE ACCESSION NUMBER: SWISS-Prot / CAA42415
  ref <309>: DATABASE ENTRY DATE: 1999-07-15

SEQ ID NO: 9714 - DNA, 1528 bp, Homo sapiens; identical to SEQ ID NO: 9702
  ref <308>: DATABASE ACCESSION NUMBER: Refseq / NM_020990
  ref <309>: DATABASE ENTRY DATE: 2002-11-05

SEQ ID NO: 9715 - protein, 417 aa, Homo sapiens; identical to SEQ ID NO: 9703
  ref <308>: DATABASE ACCESSION NUMBER: Refseq / NP_066270
  ref <309>: DATABASE ENTRY DATE: 2002-11-05

SEQ ID NO: 9716 - DNA, 1547 bp, Rattus norvegicus
  ref <308>: DATABASE ACCESSION NUMBER: EMBL / X59859
  ref <309>: DATABASE ENTRY DATE: 1993-06-30
gcacaagtttcctgggctggaccatttgagcagagaggattatttgacttcatgctagaagatgaggcctctggcataatcccttacgaccctgacaatcccctgatatctatgtgcccctaccgatgccaatgccatctccgagtggtgcagtgttctgatctgggtctggacaaagtaccctgggaatttccacctgacacaacattgctagacctgcaaaacaacaaaataacagagatcaaagagggggcctttaagaacctgaaggacttgcataccttgatccttgtcaacaacaagatcagcaagatcagcccagaggcatttaaacctctagtgaagttggaaaggctttatctgtctaagaaccacctaaaggagctgcccgaaaaattgcccaaaacactccaggagcttcgactccacgacaatgagatcaccaaactgaagaaatctgtgttcaatggactgaaccgtatgattgtcatagaactgggcggcaacccactgaaaaactctgggattgaaaatggagccttgcagggaatgaagggtctcggatacatccgcatctcagacaccaacataactgctattcctcaaggtctgcccacttctatcagtgaactgcatctggatggcaacaagatagccaaagttgatgcagccagcctgaaaggaatgtctaatttgtctaagctgggtttgagcttcaatagcatcaccgttgtggaaaatggcagtctggctaatgttcctcatctgagggagctccacttggacaacaacaaactcctcagagtgcctgctgggctggcacagcataaatatgtccaggtcgtctaccttcataacaacaacatctccgaagttgggcagcatgacttctgcctcccttcataccagactaggaagacttcctacactgccgtgagtctttatagcaaccctgtccggtattggcaaattcacccacacaccttcagatgtgtcttcgggcgctctaccattcaacttgggaactacaagtaactcccaaacagcctcatttttataatcgggaacaaaaaaaccaatctgtcaatattattgctaaaaagaaaaaaatattttgaaaaagaaagaatgctagattctggaaattcaagtatagcgcggatgcctttcccgtatgacttatcatgcatcaagccaaatatacagattgaataattacctacaataaaaatattttatctgtagtattcagaatcacttttaaaattttctgtagatgtgaactgaggtatcgaagtctgatgtaatcatagatgtcaacatttaataaagctaaaaggaacagaatacaaagtcttctgtaattcatagagctaaattgactcttttgacataaagtcaaatgtagaactctagcaatgtattaatctcctttattattggtaaagtcttatttgaatatctaagttcaacatgggctatgtaaaattttcactgtcatactgaaaaacaataaaatttaaaaaatgcattcaaaaaaaaaaaaa

SEQ ID NO: 9717 - protein, 354 aa, Rattus norvegicus
  ref <308>: DATABASE ACCESSION NUMBER: SWISS-Prot / Q01129
  ref <309>: DATABASE ENTRY DATE: 2002-06-15
MKATLVLFLLAQVSWAGPFEQRGLFDFMLEDEASGIIPYDPDNPLISMCPYRCQCHLRVVQCSDLGLDKVPWEFPPDTTLLDLQNNKITEIKEGAFKNLKDLHTLILVNNKISKISPEAFKPLVKLERLYLSKNHLKELPEKLPKTLQELRLHDNEITKLKKSVFNGLNRMIVIELGGNPLKNSGIENGALQGMKGLGYIRISDTNITAIPQGLPTSISELHLDGNKIAKVDAASLKGMSNLSKLGLSFNSITVVENGSLANVPHLRELHLDNNKLLRVPAGLAQHKYVQVVYLHNNNISEVGQHDFCLPSYQTRKTSYTAVSLYSNPVRYWQIHPHTFRCVFGRSTIQLGNYK

SEQ ID NO: 9718 - DNA, 1751 bp, Homo sapiens
  ref <308>: DATABASE ACCESSION NUMBER: Refseq / NM_001920
  ref <309>: DATABASE ENTRY DATE: 2002-11-05
tttaactgtgctatggagtagaagcaggaggttttcaacctagtcacagagcagcacctaccccctcctcctttccacacctgcaaactcttttacttgggctgaatatttagtgtaattacatctcagctttgagggctcctgtggcaaattcccggattaaaaggttccctggttgtgaaaatacatgagataaatcatgaaggccactatcatcctccttctgcttgcacaagtttcctgggctggaccgtttcaacagagaggcttatttgactttatgctagaagatgaggcttctgggataggcccagaagttcctgatgaccgcgacttcgagccctccctaggcccagtgtgccccttccgctgtcaatgccatcttcgagtggtccagtgttctgatttgggtctggacaaagtgccaaaggatcttccccctgacacaactctgctagacctgcaaaacaacaaaataaccgaaatcaaagatggagactttaagaacctgaagaaccttcacgcattgattcttgtcaacaataaaattagcaaagttagtcctggagcatttacacctttggtgaagttggaacgactttatctgtccaagaatcagctgaaggaattgccagaaaaaatgcccaaaactcttcaggagctgcgtgcccatgagaatgagatcaccaaagtgcgaaaagttactttcaatggactgaaccagatgattgtcatagaactgggcaccaatccgctgaagagctcaggaattgaaaatggggctttccagggaatgaagaagctctcctacatccgcattgctgataccaatatcaccagcattcctcaaggtcttcctccttcccttacggaattacatcttgatggcaacaaaatcagcagagttgatgcagctagcctgaaaggactgaataatttggctaagttgggattgagtttcaacagcatctctgctgttgacaatggctctctggccaacacgcctcatctgagggagcttcacttggacaacaacaagcttaccagagtacctggtgggctggcagagcataagtacatccaggttgtctaccttcataacaacaatatctctgtagttggatcaagtgacttctgcccacctggacacaacaccaaaaaggcttcttattcgggtgtgagtcttttcagcaacccggtccagtactgggagatacagccatccaccttcagatgtgtctacgtgcgctctgccattcaactcggaaactataagtaattctcaagaaagccctcatttttataacctggcaaaatcttgttaatgtcattgctaaaaaataaataaaagctagatactggaaacctaactgcaatgtggatgttttacccacatgacttattatgcataaagccaaatttccagtttaagtaattgcctacaataaaaagaaattttgcctgccattttcagaatcatcttttgaagctttctgttgatgttaactgagctactagagatattcttatttcactaaatgtaaaatttggagtaaatatatatgtcaatatttagtaaagcttttcttttttaatttccaggaaaaaataaaaagagtatgagtcttctgtaattcattgagcagttagctcatttgagataaagtcaaatgccaaacactagctctgtattaatccccatcattactggtaaagcctcatttgaatgtgtgaattcaatacaggctatg

SEQ ID NO: 9719 - protein, 359 aa, Homo sapiens
  ref <308>: DATABASE ACCESSION NUMBER: SWISS-Prot / P07585
  ref <309>: DATABASE ENTRY DATE: 2002-06-15
MKATIILLLLAQVSWAGPFQQRGLFDFMLEDEASGIGPEVPDDRDFEPSLGPVCPFRCQCHLRVVQCSDLGLDKVPKDLPPDTTLLDLQNNKITEIKDGDFKNLKNLHALILVNNKISKVSPGAFTPLVKLERLYLSKNQLKELPEKMPKTLQELRAHENEITKVRKVTFNGLNQMIVIELGTNPLKSSGIENGAFQGMKKLSYIRIADTNITSIPQGLPPSLTELHLDGNKISRVDAASLKGLNNLAKLGLSFNSISAVDNGSLANTPHLRELHLDNNKLTRVPGGLAEHKYIQVVYLHNNNISVVGSSDFCPPGHNTKKASYSGVSLFSNPVQYWEIQPSTFRCVYVRSAIQLGNYK

SEQ ID NO: 9720 - DNA, 1547 bp, Rattus norvegicus; identical to SEQ ID NO: 9716
  ref <308>: DATABASE ACCESSION NUMBER: EMBL / X59859
  ref <309>: DATABASE ENTRY DATE: 1993-06-30

SEQ ID NO: 9721 - protein, 354 aa, Rattus norvegicus; identical to SEQ ID NO: 9717
  ref <308>: DATABASE ACCESSION NUMBER: SWISS-Prot / Q01129
  ref <309>: DATABASE ENTRY DATE: 2002-06-15

SEQ ID NO: 9722 - DNA, 1751 bp, Homo sapiens; identical to SEQ ID NO: 9718
  ref <308>: DATABASE ACCESSION NUMBER: Refseq / NM_001920
  ref <309>: DATABASE ENTRY DATE: 2002-11-05

SEQ ID NO: 9723 - protein, 359 aa, Homo sapiens; identical to SEQ ID NO: 9719
  ref <308>: DATABASE ACCESSION NUMBER: SWISS-Prot / P07585
  ref <309>: DATABASE ENTRY DATE: 2002-06-15

SEQ ID NO: 9724 - DNA, 1547 bp, Rattus norvegicus; identical to SEQ ID NO: 9716
  ref <308>: DATABASE ACCESSION NUMBER: EMBL / X59859
  ref <309>: DATABASE ENTRY DATE: 1993-06-30

SEQ ID NO: 9725 - protein, 354 aa, Rattus norvegicus; identical to SEQ ID NO: 9717
  ref <308>: DATABASE ACCESSION NUMBER: SWISS-Prot / Q01129
  ref <309>: DATABASE ENTRY DATE: 2002-06-15

SEQ ID NO: 9726 - DNA, 1751 bp, Homo sapiens; identical to SEQ ID NO: 9718
  ref <308>: DATABASE ACCESSION NUMBER: Refseq / NM_001920
  ref <309>: DATABASE ENTRY DATE: 2002-11-05

SEQ ID NO: 9727 - protein, 359 aa, Homo sapiens; identical to SEQ ID NO: 9719
  ref <308>: DATABASE ACCESSION NUMBER: SWISS-Prot / P07585
  ref <309>: DATABASE ENTRY DATE: 2002-06-15

SEQ ID NO: 9728 - DNA, 1547 bp, Rattus norvegicus; identical to SEQ ID NO: 9716
  ref <308>: DATABASE ACCESSION NUMBER: EMBL / X59859
  ref <309>: DATABASE ENTRY DATE: 1993-06-30

SEQ ID NO: 9729 - protein, 354 aa, Rattus norvegicus; identical to SEQ ID NO: 9717
  ref <308>: DATABASE ACCESSION NUMBER: SWISS-Prot / Q01129
  ref <309>: DATABASE ENTRY DATE: 2002-06-15

SEQ ID NO: 9730 - DNA, 1751 bp, Homo sapiens; identical to SEQ ID NO: 9718
  ref <308>: DATABASE ACCESSION NUMBER: Refseq / NM_001920
  ref <309>: DATABASE ENTRY DATE: 2002-11-05

SEQ ID NO: 9731 - protein, 359 aa, Homo sapiens; identical to SEQ ID NO: 9719
  ref <308>: DATABASE ACCESSION NUMBER: SWISS-Prot / P07585
  ref <309>: DATABASE ENTRY DATE: 2002-06-15

SEQ ID NO: 9732 - DNA, 1547 bp, Rattus norvegicus; identical to SEQ ID NO: 9716
  ref <308>: DATABASE ACCESSION NUMBER: EMBL / X59859
  ref <309>: DATABASE ENTRY DATE: 1993-06-30

SEQ ID NO: 9733 - protein, 354 aa, Rattus norvegicus; identical to SEQ ID NO: 9717
  ref <308>: DATABASE ACCESSION NUMBER: SWISS-Prot / Q01129
  ref <309>: DATABASE ENTRY DATE: 2002-06-15

SEQ ID NO: 9734 - DNA, 1751 bp, Homo sapiens; identical to SEQ ID NO: 9718
  ref <308>: DATABASE ACCESSION NUMBER: Refseq / NM_001920
  ref <309>: DATABASE ENTRY DATE: 2002-11-05

SEQ ID NO: 9735 - protein, 359 aa, Homo sapiens; identical to SEQ ID NO: 9719
  ref <308>: DATABASE ACCESSION NUMBER: SWISS-Prot / P07585
  ref <309>: DATABASE ENTRY DATE: 2002-06-15

SEQ ID NO: 9736 - DNA, 1547 bp, Rattus norvegicus; identical to SEQ ID NO: 9716
  ref <308>: DATABASE ACCESSION NUMBER: EMBL / X59859
  ref <309>: DATABASE ENTRY DATE: 1993-06-30

SEQ ID NO: 9737 - protein, 354 aa, Rattus norvegicus; identical to SEQ ID NO: 9717
  ref <308>: DATABASE ACCESSION NUMBER: SWISS-Prot / Q01129
  ref <309>: DATABASE ENTRY DATE: 2002-06-15

SEQ ID NO: 9738 - DNA, 1751 bp, Homo sapiens; identical to SEQ ID NO: 9718
  ref <308>: DATABASE ACCESSION NUMBER: Refseq / NM_001920
  ref <309>: DATABASE ENTRY DATE: 2002-11-05

SEQ ID NO: 9739 - protein, 359 aa, Homo sapiens; identical to SEQ ID NO: 9719
  ref <308>: DATABASE ACCESSION NUMBER: SWISS-Prot / P07585
  ref <309>: DATABASE ENTRY DATE: 2002-06-15

SEQ ID NO: 9740 - DNA, 3996 bp, Rattus norvegicus
  misc_feature (1)..(3996): n=a, c, g or t
  ref <308>: DATABASE ACCESSION NUMBER: EMBL / X59864
  ref <309>: DATABASE ENTRY DATE: 1996-09-03
aacggatcaaggccagactgtgaggtaacaaataaaactcaccgcagagagtactgatgaatgtgatggccagaaaagtgacagtgaggagcacccaaattagccacctcgttgaaaccactgtggccagacaaggtcagtcaagcagactgggacaaaggctgagggttgaccactgataagctgttgatactgcctgggacagtatgagacccctgcccccaaattcctgttggggtcattacacaagctgagtagtaggcagcttcaatgtggcagggtgctggccactgttccatgaaggactccagtaggctaggctacggggctatatgttctctcgacctcaagggagatatttttgggacaacgccaggccctgtctaagggattccaaagtgggagttgtggtgaggctgtctttggagaatttcaggacgagtgcgggtgcggggtgaggcgaacgtgcgctggaaagatccagggtggaggtggctgcgggggctggcgggtccttgtactgttggttgacagagtaggggcgggaattcgggcggccaacgtccagttagaaaaagcccgggctagagggcccgaagcaccgggtgtgggaggggggtggggggtgggggtggggggtaatggggaaacnggggaagatgggagtgctggaggagagttgtggggtccgaggagcacctcgcatctggagtctggcaggagtgttgaaggactgaggggctagctcgggcagggcaaaggcagcaggacctgggaggaaggagcatggtgtggttcccaggcattgcagaggctggaaaacatcggtgtggggttgaagggcctgagctagggttggagaggaacggggagccagacattcatcccggtcacttttggttacaggacgtggcggctggtcggatacaggggagctgctgggaagggttcgaccccagacctgggcagtgaaggtgtagctggcagcggtgggcaggtgaggaccgccgtctgctgggcaggtgagtctccttcttctctcttggcctcgctgactgaccttctaaaaggtttagagagcgaggccgctgagaagaagcagctgacctcccaacagaatggcacatagaaaggcaggacagttagcaaaggagacatcgtctcggggggagccgagacagaacaaggctgggggaccattgggcaccccggagtggaaagagcttttagagagaagatagaagaggtgcagggctgccagtcaagactgaggctgctgcctccaggcaagtgataggaggccttggagacagtggcagagactatgggatccagcaagagcagaagcattctaggctggggtcaaacagggcaagatgggggtcacaggacacagatgggtccccagccgccaccacatcccacccaccgtaattcatttagaagcaggttcaagagtggctctggcagggcttctgaggctttgccagagcttcgatggccggagaacgggaaagaagggcagtgcagggtgtcaacaggaagggaacgggggctgcaggtatcggactccagagggattttacagcaaggaggctgcagtgggtccagcctgcagacacaccattcccatgaggcactgcggcccagggactggtgcggaaagggcccacagtggacttggtgcactgtatgccctaaccgctcagtccctgggtctggcatgacagacagaacatttccaggggagtcaagggcacaggatgaagccagacaaggcgaggcaggtggggcagaatgaatgagctttctagggagggaggttgggtgcaggtagagcgaggtaaagcagctggggtggtgagccagcgaggcactggcctccagagtccgtggccaaggagggcttgcgggcggcgacggagcagtgatcggtgtctcggagagctcggactggagactagggtaagtgtctgtcccactagtggccacccagtttcctcccactcaagtccacttaactcatgtcttcttttctccccacagccaggtctctagcagaagtggatgtgcctgccagtcactgaaggcgaggatgacaggtgtggtcaacgtgatagaaagacatgacatggtccggtgtgatggagaggacagaaggacagtcatccagccttcctggtgagcatactccctgccacagggctagcccgctcaaccacctaatttgtcacccactcactccagattctgtcctttgcagaacaccgtgggctggtgccgtgggacactgccgtagaagccgtctgttctttcctttgcccaaagagctaacacatctctgctgctctctggatcctcttccccctaccttgaaccctcaagatgaaaggtgaggatctcctgccccacatgggctaggtggcaggctgcaagtgcaggggtctcattctctcccacccacagaaatggtgctacccagctcatgtctgggcctttgaatccggggacttctttaagtccgtctagttctgaatcaagaatatgctgcactcagaaccactacactacctgcctcaggaatcggctcgaaggtgagtcagggcgccctttggcagctcggcaagcctactccaagcctactctccctccccacatcccctcaggccccctccccctgcccagcccccctcatttgtcttttttctctttgcaggtaaagctgaaggaacagacggtgacaacatcttgaaagagcagacccacacagcacccacccacccctgagactccatcttcatggccaactaactctgcctggcccgggagaccaccacccacatcatcctggagccaagcctctagcccgggatgacttcatcatctccctcctgtcttttttcttcttcctcctttcctgtaactctatatttctttccttttgttccttctctgcttgagagactcaaagcatccgtgactctgctcccccactcaccccttttgaatttgcactaagtcgattgcactggtttggagtcccggagatagcctgagtctctccgtatggatgtatacagcgagtgtgtaggcccctttggctatgttgccccagtgcccgcccgtcatccacttctgtctgagggcaactgggtgtggccgtgcgcttgaggcctcaccttccccttgcctagtctggaagcagttccatcataaagtgttcaacgcaccttccttcatcctttgtccctcctcaccagggcctcaccagaggtcctgggtccaccaataaatacagttacagtcattggtctcgtgcacttgaatataatgcgactcacttggggggctggggggcaggggaaagaaatgagggaaggggaataaaagggatggggtacagcacccataatgaaggggattatgaagtagggggcatctaggatggaatgaagaataggagatgggaggggcttatgaaaaggacggtggcattgggatgggaggccatgggagggggctcatgagataccaagaagctacagtatggaaggggcctatgaatatgaaatggtgcctaaggaatgagcagcgcagtagacatcacagtggagagtggcagagtgccatgaggagacagaggcaaggctgtgaggagggtccctcaagactggggaggtgaaggacagacatccttagcaatgagagagtggtggcctgaccagaaacctggattctacactgctgccagtcctgtctggatgactccccgagtcctcacacttatcccaactcctgaagcctactgtcaactgcaaagtgaacctgactcccgactcctcgcagaggctgctaatgaggtagacagctatatgtgaggctgggtagaccacagccacataaaggagcccatggtggcccctgggcttccctctcctgctctgagcatgctcagctctggactggagcccacggtagatgcctgcagtggtacca

SEQ ID NO: 9741 - protein, 158 aa, Rattus norvegicus
  ref <308>: DATABASE ACCESSION NUMBER: SWISS-Prot / CAA42524
  ref <309>: DATABASE ENTRY DATE: 2001-12-01
MGSSKSRSILGWGQTGQDGGHRTQMGPQPPPHPTHRNSFRSRFKSGSGRASEALPELRWPENGKEGQCRVSTGRERGLQVSDSRGILQQGGCSGSSLQTHHSHEALRPRDWCGKGPQWTWCTVCPNRSVPGSGMTDRTFPGESRAQDEARQGEAGGAE

SEQ ID NO: 9742 - DNA, 3996 bp, Rattus norvegicus; identical to SEQ ID NO: 9740
  misc_feature (1)..(3996): n=a, c, g or t
  ref <308>: DATABASE ACCESSION NUMBER: EMBL / X59864
  ref <309>: DATABASE ENTRY DATE: 1996-09-03

SEQ ID NO: 9743 - protein, 158 aa, Rattus norvegicus; identical to SEQ ID NO: 9741
  ref <308>: DATABASE ACCESSION NUMBER: SWISS-Prot / CAA42524
  ref <309>: DATABASE ENTRY DATE: 2001-12-01

SEQ ID NO: 9744 - DNA, 3996 bp, Rattus norvegicus; identical to SEQ ID NO: 9740
  misc_feature (1)..(3996): n=a, c, g or t
  ref <308>: DATABASE ACCESSION NUMBER: EMBL / X59864
  ref <309>: DATABASE ENTRY DATE: 1996-09-03

SEQ ID NO: 9745 - protein, 158 aa, Rattus norvegicus; identical to SEQ ID NO: 9741
  ref <308>: DATABASE ACCESSION NUMBER: SWISS-Prot / CAA42524
  ref <309>: DATABASE ENTRY DATE: 2001-12-01

SEQ ID NO: 9746 - DNA, 3996 bp, Rattus norvegicus; identical to SEQ ID NO: 9740
  misc_feature (1)..(3996): n=a, c, g or t
  ref <308>: DATABASE ACCESSION NUMBER: EMBL / X59864
  ref <309>: DATABASE ENTRY DATE: 1996-09-03

SEQ ID NO: 9747 - protein, 158 aa, Rattus norvegicus; identical to SEQ ID NO: 9741
  ref <308>: DATABASE ACCESSION NUMBER: SWISS-Prot / CAA42524
  ref <309>: DATABASE ENTRY DATE: 2001-12-01

SEQ ID NO: 9748 - DNA, 1635 bp, Rattus norvegicus
  ref <308>: DATABASE ACCESSION NUMBER: EMBL / X59961
  ref <309>: DATABASE ENTRY DATE: 1993-04-20
agaattcaaccattaaatagcccacgcagaaacatctggtgatgggatattgtgtattccatacgctagtaaatgaatattaaaatagtcctacaccttgtgagggcttatttgccagtagttactaaggcagtagtaaagctctaattttgaaatcttagtggctctgaaaagagcctttggatctgttgtgagctctgtgggctcacttggagctggtgtacttggtgactgccttggtgccctcggacaccgcgtgcttggccagctccccgggcagcagcaggcgcacggccgtctggatctcccgggacgtgatggtcgagcgcttgttgtaatgcgccaggcgacgctctcccgcgatgcgctcgaagatgtcgttcacgaacgagttcatgatgcccatggccttggaagagattccggtatccgggtgcacttgcttcagcaccttgtacacgtacaccgagtagctctccttgcggctgcgcttgcgttccttgccgtccttcttctgggccttggtcacagccttcttggagcccttcttcggggcgggacgggacttggcgggctcaggcattcgtcaacagagtgtgaacaccaagaaagaacagaaagagttgttgggagttctcgggttcttcctgctatttaaacaaagctgtagctgttcttgttcggagatttctgagacgttcattgcacgaactgtccaatcaaaatatgtatctttcaaatccacgatactattggcttaggttaaaaaagctgtatgagtagccattaaaatcactccgtttttcgcgccaggagttgagtataagtttagtgctgtggctgcttcactttacaccttaatatttcttttaaagaggtgaaatgtctggtcgcggcaagcagggaggcaaggctcgcgccaaggccaagacccgctcctcccgggccggcctgcagttccccgtgggccgcgtgcaccgtctgttgcgcaagggaaactactcggagcgcgtgggcgcgggcgccccggtgtacctggcggccgtactggagtacctgacggccgaaatcctggagcttgcggctaatgcggcgagggacaacaagaagacgcggatcatcccgcgccacctgcagctggccatccgcaacgatgaggagctcaacaagctgctgggccgcgtgaccatcgcgcagggcggcgttctgcccaacatccaggctgtgctgctgcccaagaagaccgagagccaccacaagcctaagggaaagtaaaccagtgagcgaacgttttatcttttgaaagaccaaaggctcttttcagagccatcacttgttcatgtaagagttggtaaccaaaccctggttttacctactttgttgcaagcccatatcaatcttaaaagcatcaaactaattatatttgctggttgggctaaatctttaatctttaacaggtttgtggttcccgcagagagattattgggatcgtagaaacaggctggtttttatttttatagtcagctcttgcagtactttacctagtattatttctcagtagcagcagacttaacgctgggattgggagaagtacatagcgtttacaggatagctggtagcttacatgcacagcgt

SEQ ID NO: 9749 - protein, 124 aa, Rattus norvegicus
  ref <308>: DATABASE ACCESSION NUMBER: SWISS-Prot / CAA42585
  ref <309>: DATABASE ENTRY DATE: 2000-05-30
PEPAKSRPAPKKGSKKAVTKAQKKDGKERKRSRKESYSVYVYKVLKQVHPDTGISSKAMGIMNSFVNDIFERIAGERRLAHYNKRSTITSREIQTAVRLLLPGELAKHAVSEGTKAVTKYTSSK

SEQ ID NO: 9750 - DNA, 425 bp, Homo sapiens
  ref <308>: DATABASE ACCESSION NUMBER: Refseq / NM_003524
  ref <309>: DATABASE ENTRY DATE: 2002-05-24
atgcctgatccagctaagtccgctcccgccccgaagaagggctccaagaaggcggtgaccaaggcgcagaagaaggatggcaagaagcgtaaacgcagccgcaaggagagctactccgtatacgtttacaaggtgctgaagcaagtccaccccgacaccggcatctcctccaaagccatggggatcatgaattcctttgtcaacgatatcttcgagcgcatcgccggcgaggcttcccgcctggctcattacaacaagcgttcgaccatcacctccagggagatccagacagccgtgcgcctgctgctgcctggggaactggccaagcacgccgtgtccgagggcactaaggccgtcaccaagtacaccagctccaaataaatggacgcatgttcaaacccaaaggctcttttcagagccactta

SEQ ID NO: 9751 - protein, 126 aa, Homo sapiens
  ref <308>: DATABASE ACCESSION NUMBER: Refseq / NP_003515
  ref <309>: DATABASE ENTRY DATE: 2002-05-24
MPDPAKSAPAPKKGSKKAVTKAQKKDGKKRKRSRKESYSVYVYKVLKQVHPDTGISSKAMGIMNSFVNDIFERIAGEASRLAHYNKRSTITSREIQTAVRLLLPGELAKHAVSEGTKAVTKYTSSK

SEQ ID NO: 9752 - DNA, 631 bp, Rattus norvegicus
  ref <308>: DATABASE ACCESSION NUMBER: EMBL / X60212
  ref <309>: DATABASE ENTRY DATE: 1992-11-11
ctgttagcggccagaggtgacctgtgaagatggttcgctactcccttgacccagaaaaccccacgaaatcatgcaagtcaagaggctcaaaccttcgtgttcactttaagaacacccgggaaactgcccaggccatcaagggtatgcatatccgcaaagccaccaagtatctgaaggatgtcactttaaagaagcagtgtgtgccattccggcggtataacggtggagttggtaggtgcgcccaggccaaacagtggggctggacacagggacggtggccaaaaaagagtgctgaatttttgctgcacatgcttaaaaatgcagagagtaatgctgaacttaagggtttggatgtagactctctggtcattgaacacatccaggtgaacaaggctcctaagatgcgcagacggacctacagagctcacggccggattaacccatacatgagctccccctgccacatcgaaatgatcctcactgagaaggaacagattgttccaaagccagaagaggaggttgcacagaagaaaaagatatcccagaagaaattgaagaaacaaaagctcatggcacgggaataaattcagcataaataaatgcggataaagtaaaaaaaaaaaaaaaaaaa

SEQ ID NO: 9753 - protein, 184 aa, Rattus norvegicus [sequence omitted]

SEQ ID NO: 9754 - DNA, 898 bp, Homo sapiens
  ref <308>: DATABASE ACCESSION NUMBER: Refseq / NM_000985
  ref <309>: DATABASE ENTRY DATE: 2002-11-05
tcctctttccctaagcagcctgagggttgactggattggtgaggcccgtgtggctacttctgtggaagcagtgctgtagttactggaagataaaagggaaagcaagcccttggtgggggaaagtatggctgcgatgatggcatttcttaggacacctttggattaataatgaaaacaactactctctgagcagctgttcgaatcatctgatatttatactgaatgagttactgtaagtacgtattgacagaattacactgtactttcctctaggtgatctgtgaaaatggttcgctattcacttgacccggagaaccccacgaaatcatgcaaatcaagaggttccaatcttcgtgttcactttaagaacactcgtgaaactgctcaggccatcaagggtatgcatatacgaaaagccacgaagtatctgaaagatgtcactttacagaaacagtgtgtaccattccgacgttacaatggtggagttggcaggtgtgcgcaggccaagcaatggggctggacacaaggtcggtggcccaaaaagagtgctgaatttttgctgcacatgcttaaaaacgcagagagtaatgctgaacttaagggtttagatgtagattctctggtcattgagcatatccaagtgaacaaagcacctaagatgcgccgccggacctacagagctcatggtcggattaacccatacatgagctctccctgccacattgagatgatccttacggaaaaggaacagattgttcctaaaccagaagaggaggttgcccagaagaaaaagatatcccagaagaaactgaagaaacaaaaacttatggcacgggagtaaattcagcattaaaataaatgtaattaaaaggaaaaaaaaaaaaaaaaaaaaaaaaaa

SEQ ID NO: 9755 - protein, 184 aa, Homo sapiens [sequence omitted]

SEQ ID NO: 9756 - DNA, 2464 bp, Rattus norvegicus
  misc_feature (1)..(2464): n=a, c, g or t
  ref <308>: DATABASE ACCESSION NUMBER: EMBL / X60468
  ref <309>: DATABASE ENTRY DATE: 1996-02-01
ttcttctcgaccttgggtcttggaaggggactggccctctactggatgattattgggtaggctgacccctcactgagcctcctacctggcagattccttctggaaccccaacgctttcgagacggattccgatctaccggctggatggatgagggtccaagacacctcagggacctactactggcacatcccaacagggaccacccagtgggaacccccaggccgggcctccccatcacaggggaacagtccccaagaagagtcccaggtaaggctcaatggcttgttgcacaccaggggtggaagggtctgtgcttctagaacagggtgaaactaccaccctacacccattcttcctccagctcacctggactggctttgctcaccaagaaggctttgaggaaggagagttttggaaggtaaataaagaaaccacgttcactctgggggctactggagagggggacttcattttgggcttgattctttaatttgttttcaaaggatgaacctagtgaagaggccccaatggagttgggactgaaggaccctgaggaggggacattgcccttctcagctcagagcctcaggtgagtcagatgcagcagactagggtgagactggatctatgtttcttaaactaagagtgctgtgtcaagtgttcccatctgcctccagcccagagccagtgccccaggaggaggagaatctgccccaacggaacgccaatccagggatcaaggtttgttcaagaccaacacccatttagtaagcaggcctctatgtggaggacagacctcatgctgtgctttgaggacatctgtggtcttagcatatctcccaagcaagttcttaccagtttcaggcaaggccgtgtgtatgctgaactgtcttctgacagcttctgtgtttaactcagttgcgaagggcctcttagggactcttaaggcttagatcagcaggccatctcttctgaccatgtcttgtttggggaccttccatctaagttcagaatgtctcacatgttttatgtgccaggtcnngagctcctctgtgctgtgcccaaggcacctccaattccatctcagatctctaccccggacccttttctgtgtctggcagtgtttcgctgtgcgctccctaggctgggtagagatgactgaggaggagctggccccaggacgcagcagtgtggcagtcaacaattgtatccgccagctctcctaccacaaaaacaatctacatgatccgatgtctggaggctggggagaggtagggctggactgtgagtgtgtactgggcccactagggtaccactgagtcccacctcctgggtttgcagggaaaggatctgctgctccagctggaggatgagacgctaaagttggtggagccacagaaccagacactgctgcatgcccagcccatcgtcagcattcgcgtgtggggcgttgggcgggacagtggaaggtgggcacaggaatcgccggggtgggggaggctcatccatccagcagttagtcctttttctaatcatgctctttggctctcttgtgctgccggacccagagagaggtattaacgtccatctgctttgactgtgccccttcctactcctggaccggatgcttcgaagcacctaggctcccttactgtgtgccctgccccttcctcacctgctgtcctgggccttatcccccacctcagcatgcttgcctctgcgctccccagctcctgaaggcagacctacggaacaccagggcaaaccctgtacactgtcatggacagggaggttgagggtggaatggtggccaggcatgcgatttggtggttctaggagacactgaggtgaccctccccccaaacagggactttgcctacgtagctcgagataagctgacccagatgctcaagtgccacgtgtttcgctgtgaggcacctgccaagaacatcgccaccagcctgcatgagatctgctccaaggcacggccccctccatccctgaactagctgtcatctttgctctagaaggtgtggtaggttgcgttgtggatgtaggtgggcttcgggcaatgtagctctaacagagcacacacaccccccccattcattcctcagatcatgtctgaacggcgcaatgctcgctgcttggtaaatggactctccctggaccactctaaacttgtggatgtccctttccaaggtgagtaccacacgcagcctcataaggcacagctcagctttgttagttaaggtgaggtgacccaagaagaggcacaggatcctgggcaggcatgagcacatggagatgggtgcttgacagtacataagtggataagcttgtagagggaggcaggggagaagtgggcgtgagggttggactaggaaaatgcatagttcatgctttagtgtcaggacctagaacagtgagcctctttttctttttcttctcacagtggaattc

SEQ ID NO: 9757 - protein, 598 aa, Rattus norvegicus
  misc_feature (1)..(598): Xaa=Unknown amino acid
  ref <308>: DATABASE ACCESSION NUMBER: SWISS-Prot / CAA42998
  ref <309>: DATABASE ENTRY DATE: 2001-10-16
ELSAHNXANRGLHGSAKIINTQGLGPDEGGRRQRGEVEEEDEDEEEEDEEEEEEDEEEEDLSSPQGLPEPLENVEVPSGPQVLTDGPREHSKSASLLFGMRNSAASDEDSSWATLSQGSPSYGSPEDTDSFWNPNAFETDSDLPAGWMRVQDTSGTYYWHIPTGTTQWEPPGRASPSQGNSPQEESQLTWTGFAHQEGFEEGEFWKDEPSEEAPMELGLKDPEEGTLPFSAQSLSPEPVPQEEENLPQRNANPGIKCFAVRSLGWVEMTEEELAPGRSSVAVNNCIRQLSYHKNNLHDPMSGGWGEGKDLLLQLEDETLKLVEPQNQTLLHAQPIVSIRVWGVGRDSGRERDFAYVARDKLTQMLKCHVFRCEAPAKNIATSLHEICSKIMSERRNARCLVNGLSLDHSKLVDVPFQVEFPAPKNELVQKFQVYYLGNVPVAKPVGVDVINGALESVLSSSSREQWTPSHVSVAPATLTILHQQTEAVLGECRVRFLSFLAVGRDVHTFAFIMAAGPASFCCHMFWCEPNAASLSEAVQAACMLRYQKCLDARSQTSTSCLPAPPAESVARRVGWTVRRGVQSLWGSLKPKRLGSQTP

SEQ ID NO: 9758 - DNA, 2654 bp, Homo sapiens
  ref <308>: DATABASE ACCESSION NUMBER: Refseq / NM_001164
  ref <309>: DATABASE ENTRY DATE: 2002-11-05
atgttgtgatggagaagccgcggcggagcccgaaccccgcagcctgagccacctccgtcatctgggcccggggcctcaccgcgcaggagctgccaaggccatgtctgttccatcatcactgagccagtcggccattaatgccaacagccacggaggccccgcactgagcctacccctgcctctgcacgctgcccacaaccagctgctcaacgccaagctgcaggccacagctgtgggacccaaggacctgcgcagcgccatgggggagggtggtgggcctgagccaggccctgccaatgccaagtggctaaaagagggccagaaccagctccggcgggccgccacggcccaccgtgaccagaatcgcaatgtgaccttgaccttggcggaggaggccagccaggagcctgagatggcacccttgggccccaaaggcctgatacacctgtactctgagctggagctctcagctcacaacgcagccaaccgaggcctacgaggacctggcctgatcatcagcactcaagagcaggggccagatgagggagaggagaaggcggccggggaggccgaggaggaggaggaggatgatgatgatgaagaggaggaggaggacttatcttctcccccagggctgcctgagcccctggagagtgtggaggccccccccaggccccaagcccttacagatggcccccgggaacacagcaagagtgccagcctcctgtttggcatgcggaacagtgcagccagtgatgaggactcaagctgggctaccttatctcagggcagcccctcctatggctccccagaggacacagattccttctggaaccccaacgccttcgagacggattccgacctgccggctggatggatgagggtccaggacacctcagggacctattactggcacatcccaacagggaccacccagtgggaaccccccggccgggcctccccctcacaggggagcagcccccaagaggagtcccagctcacctggacaggttttgctcatggagaaggctttgaggatggagaattttggaaggatgaacccagtgatgaggccccaatggagctgggactgaaggaacctgaggaggggacgttgaccttcccagctcagagcctcagcccagagccgttgccccaagaggaggagaagcttcccccacggaataccaacccagggatcaagtgtttcgccgtgcgctccctaggctgggtagagatgaccgaggaggagctggcccctggacgcagcagtgtggcagtcaacaattgcatccgtcagctctcttaccacaaaaacaacctgcatgaccccatgtctgggggctggggggaaggaaaggatctgctactgcagctggaggatgagacactaaagctagtggagccacagagccaggcactgctgcacgcccaacccatcatcagcatccgcgtgtggggcgtcgggcgggacagtggaagagagagggactttgcctacgtagctcgtgataagctgacccagatgctcaagtgccacgtgtttcgctgtgaggcacctgccaagaacatcgccaccagcctgcatgagatctgctctaagatcatggccgaacggcgtaatgcccgctgcttggtaaatggactctccctggaccactctaaacttgtggatgtccctttccaagtggaattcccagcgcctaagaatgagttggtccagaagttccaagtctattacctggggaatgtacctgttgctaaacctgttggggtagatgtgattaatggggccctcgagtcagtcctgtcctccagcagccgtgaacaatggaccccaagtcatgtcagtgtggcccctgctaccctcaccatcttgcaccagcagacagaggcagtgctgggagagtgtcgggtgcgtttcctctccttcctggccgtgggcagagatgtccacacgtttgcattcatcatggctgccggcccagcctccttctgctgccacatgttctggtgcgagcccaatgctgccagcctctcagaggctgtgcaggctgcgtgcatgcttcgctaccagaagtgtctggatgcccgttcccaggcctccacctcctgcctcccagcaccccctgctgagtctgtggcacggcgtgtagggtggactgtccgcaggggtgttcagtcgctgtggggctccctgaagcccaaacggctgggggcccataccccatgaagaagcccccaccttcccttccacctgattgtgttgggccccagggaactaaagggtgtgggtcagggaggggtctagaggctattcctaggcctcaggcctcccaaatatgcccctccccagtaggtacggttccctgcctaggagctggggagggagagatctaatcccttcaaggaagtgataacactggagtggtaacaagaggagcaggaagcaaggccagccctggttctccatccccatgtgtttcaggtggaacaggaggaactggtccaggccaggcctcatcctcctggacccagcaggggcagaaggaggaagggactggtccaggcatgggtcccttccccctgctccatgggcacctctgctgtattgatatcactaataaagtctgtctgcactgcaaaaaaaaaaa

SEQ ID NO: 9759 - protein, 710 aa, Homo sapiens
  ref <308>: DATABASE ACCESSION NUMBER: SWISS-Prot / O00213
  ref <309>: DATABASE ENTRY DATE: 2001-10-16
MSVPSSLSQSAINANSHGGPALSLPLPLHAAHNQLLNAKLQATAVGPKDLRSAMGEGGGPEPGPANAKWLKEGQNQLRRAATAHRDQNRNVTLTLAEEASQEPEMAPLGPKGLIHLYSELELSAHNAANRGLRGPGLIISTQEQGPDEGEEKAAGEAEEEEEDDDDEEEEEDLSSPPGLPEPLESVEAPPRPQALTDGPREHSKSASLLFGMRNSAASDEDSSWATLSQGSPSYGSPEDTDSFWNPNAFETDSDLPAGWMRVQDTSGTYYWHIPTGTTQWEPPGRASPSQGSSPQEESQLTWTGFAHGEGFEDGEFWKDEPSDEAPMELGLKEPEEGTLTFPAQSLSPEPLPQEEEKLPPRNTNPGIKCFAVRSLGWVEMTEEELAPGRSSVAVNNCIRQLSYHKNNLHDPMSGGWGEGKDLLLQLEDETLKLVEPQSQALLHAQPIISIRVWGVGRDSGRERDFAYVARDKLTQMLKCHVFRCEAPAKNIATSLHEICSKIMAERRNARCLVNGLSLDHSKLVDVPFQVEFPAPKNELVQKFQVYYLGNVPVAKPVGVDVINGALESVLSSSSREQWTPSHVSVAPATLTILHQQTEAVLGECRVRFLSFLAVGRDVHTFAFIMAAGPASFCCHMFWCEPNAASLSEAVQAACMLRYQKCLDARSQASTSCLPAPPAESVARRVGWTVRRGVQSLWGSLKPKRLGAHTP

SEQ ID NO: 9760 - DNA, 2249 bp, Rattus norvegicus
  ref <308>: DATABASE ACCESSION NUMBER: EMBL / X60469
  ref <309>: DATABASE ENTRY DATE: 1996-01-02
aaaggtccaagcttaatggatgtatactcgtgactgagctctcggcccacaatcagccaaccgagggcttcatggatccgccaagatcatcaacacccagggactgggaccagatgaaggagggagaaggcagcgaggagaagttgaggaggaggatgaagatgaggaggaagaggatgaggaggaggaggaagaggatgaggaggaggaggacttgtcttctcctcaagggctacctgagcctctggagaatgtggaagtcccctctggaccccaggtcctcacagatggcccccgggaacatagcaagagtgctagcctcctatttggcatgcgaaacagtgcagccagtgacgaggactcaagctgggccaccttatcgcagggcagcccctcctatggctctccggaggacacagattccttctggaaccccaacgctttcgagacggattccgatctaccggctggatggatgagggtccaagacacctcagggacctactactggcacatcccaacagggaccacccagtgggaacccccaggccgggcctccccatcacaggggaacagtccccaagaagagtcccagctcacctggactggctttgctcaccaagaaggctttgaggaaggagagttttggaaggatgaacctagtgaagaggccccaatggagttgggactgaaggaccctgaggaggggacattgcccttctcagctcagagcctcagcccagagccagtgccccaggaggaggagaatctgccccaacggaacgccaatccagggatcaagtgtttcgctgtgcgctccctaggctgggtagagatgactgaggaggagctggccccaggacgcagcagtgtggcagtcaacaattgtatccgccagctctcctaccacaaaaacaatctacatgatccgatgtctggaggctggggagagggaaaggatctgctgctccagctggaggatgagacgctaaagttggtggagccacagaaccagacactgctgcatgcccagcccatcgtcagcattcgcgtgtggggcgttgggcgggacagtggaagagagagggactttgcctacgtagctcgagataagctgacccagatgctcaagtgccacgtgtttcgctgtgaggcacctgccaagaacatcgccaccagcctgcatgagatctgctccaagatcatgtctgaacggcgcaatgctcgctgcttggtaaatggactctccctggaccactctaaacttgtggatgtccctttccaagtggaattcccagcaccaaagaatgaactggtgcagaagtttcaagtctattacctagggaacgtgcctgtggctaaacccgttggggtagatgtgattaatggagccctggagtcagtcctgtcttccagtagtcgtgagcagtggaccccaagtcacgtcagcgtggcccctgccaccctcaccatcttgcaccagcagacagaagcagtgctgggggagtgtcgagtgcggttcctctccttcctggctgtgggcagagatgtgcacacgttcgcattcatcatggctgccggcccagcctccttctgctgtcacatgttttggtgcgagcccaatgctgccagtctctcggaggctgtgcaggctgcatgcatgctccgctaccagaagtgtctggatgctcgttcccagacctccacctcctgcctcccagcaccccctgcggagtcagttgcgagacgtgtagggtggactgtccgcaggggtgttcagtctctgtggggttccctcaagcccaaacgtctaggatcccagaccccatgaagagctcccatcctccctctacctgcttgttttgggccccagggaactcaagggtttggggcaggtaggggctgtggatgttcttcctacaccccatgtcccccgggctgcccctcctcagtagctggggttccctacctaggggctgggagagagaaattgaattccttcacagaagtcattacactggactgatgacatcggggccgagaagcaaagccagccttgggctctccatccccagtgtttgaggtggagcaggaggaactggtccaagccaggccccatcctcaaaggcccaataagggcaggaggggactggtctcggcatggatcccctgtcccctgttctgcggacacctccactgtactgatatcactaataaagtctgtctgtcgctgaaaaaaaaaaaaaaaa

SEQ ID NO: 9761 - protein, 598 aa, Rattus norvegicus; identical to SEQ ID NO: 9757
  misc_feature (1)..(598): Xaa=Unknown amino acid
  ref <308>: DATABASE ACCESSION NUMBER: SWISS-Prot / CAA42999
  ref <309>: DATABASE ENTRY DATE: 2001-10-16

SEQ ID NO: 9762 - DNA, 2654 bp, Homo sapiens; identical to SEQ ID NO: 9758
  ref <308>: DATABASE ACCESSION NUMBER: Refseq / NM_001164
  ref <309>: DATABASE ENTRY DATE: 2002-11-05

SEQ ID NO: 9763 - protein, 710 aa, Homo sapiens; identical to SEQ ID NO: 9759
  ref <308>: DATABASE ACCESSION NUMBER: SWISS-Prot / O00213
  ref <309>: DATABASE ENTRY DATE: 2001-10-16

SEQ ID NO: 9764 - DNA, 2249 bp, Rattus norvegicus; identical to SEQ ID NO: 9760
  ref <308>: DATABASE ACCESSION NUMBER: EMBL / X60469
  ref <309>: DATABASE ENTRY DATE: 1996-01-02

SEQ ID NO: 9765 - protein, 598 aa, Rattus norvegicus; identical to SEQ ID NO: 9757
  misc_feature (1)..(598): Xaa=Unknown amino acid
  ref <308>: DATABASE ACCESSION NUMBER: SWISS-Prot / CAA42999
  ref <309>: DATABASE ENTRY DATE: 2001-10-16

SEQ ID NO: 9766 - DNA, 2654 bp, Homo sapiens; identical to SEQ ID NO: 9758
  ref <308>: DATABASE ACCESSION NUMBER: Refseq / NM_001164
  ref <309>: DATABASE ENTRY DATE: 2002-11-05

SEQ ID NO: 9767 - protein, 710 aa, Homo sapiens; identical to SEQ ID NO: 9759
  ref <308>: DATABASE ACCESSION NUMBER: SWISS-Prot / O00213
  ref <309>: DATABASE ENTRY DATE: 2001-10-16

SEQ ID NO: 9768 - DNA, 1184 bp, Rattus norvegicus
  ref <308>: DATABASE ACCESSION NUMBER: EMBL / X60767
  ref <309>: DATABASE ENTRY DATE: 1995-08-30
ctcggcctctaagctcccggagtcgctgcgtccgcgcagtccggaactcgtgtggccaccgcgggaacagagagggtccgttgtaacctgttgagtaactatggaggactatatcaaaatagagaaaatcggagaagggacttatggtgtggtatataaaggtagacacaggactactggccagatcgtggccatgaagaaaatcagacttgaaagcgaggaagaaggagtgcccagtacggcaatccgggaaatctctctgttaaaagaacttcgacatccaaatatagtcagcctgcaggatgtactcatgcaggactccaggctgtatctcatcttcgagttcctgtccatggatctcaagaagtacctggactctatccctcctggccagttcatggattcttcgctcgttaagagttacttgtaccaaatcctccaggggattgtgttttgtcactcccgacgagttcttcacagagacttgaaacctcaaaatctattgattgatgacaaaggaacaatcaaactggcagatttcggccttgccagagcgtttggaataccgataagagtgtacacacacgaggtagtgacgctgtggtaccggtcgccagaggtgttgctgggctcggctcgctactccaccccggttgacatctggagcatagggaccatatttgcagagctggcgaccaagaagccgcttttccacggcgactcagagattgaccagctcttcaggatcttcagagctctgggcacccctaacaacgaagtgtggccagaagtagagtccctgcaggactacaagaacactttccccaagtggaagccggggagcctcgcgtcccacgtcaagaacctggatgaaaacggcttggacttgctctcgaaaatgctggtctatgatccagccaaacgaatctctggaaaaatggcccttaagcacccatactttgacgacttggacaatcagatcaagaagatgtaaccctctggaagtcccgccctgctgtggcagggaagatcgtggcgtttactgttggctcttcctgtcttgtatagttttcttttctttgtctgtaaaccatcatctggacttttcctattttcctacgtataacttaattaacatgtaaatattattccatatgaatttaaatataattctgtatatgtgt

SEQ ID NO: 9769 - protein, 297 aa, Rattus norvegicus
  ref <308>: DATABASE ACCESSION NUMBER: SWISS-Prot / P39951
  ref <309>: DATABASE ENTRY DATE: 2001-10-16
MEDYIKIEKIGEGTYGVVYKGRHRTTGQIVAMKKIRLESEEEGVPSTAIREISLLKELRHPNIVSLQDVLMQDSRLYLIFEFLSMDLKKYLDSIPPGQFMDSSLVKSYLYQILQGIVFCHSRRVLHRDLKPQNLLIDDKGTIKLADFGLARAFGIPIRVYTHEVVTLWYRSPEVLLGSARYSTPVDIWSIGTIFAELATKKPLFHGDSEIDQLFRIFRALGTPNNEVWPEVESLQDYKNTFPKWKPGSLASHVKNLDENGLDLLSKMLVYDPAKRISGKMALKHPYFDDLDNQIKKM

SEQ ID NO: 9770 - DNA, 1050 bp, Homo sapiens
  ref <308>: DATABASE ACCESSION NUMBER: EMBL / X05360
  ref <309>: DATABASE ENTRY DATE: 1993-09-12
ggggggggggggcacttggcttcaaagctggctcttggaaattgagcggagacgagcggcttgttgtagctgccgtgcggccgccgcggaataataagccgggatctaccataccattgactaactatggaagattataccaaaatagagaaaattggagaaggtacctatggagttgtgtataagggtagacacaaaactacaggtcaagtggtagccatgaaaaaaatcagactagaaagtgaagaggaaggggttcctagtactgcaattcgggaaatttctctattaaaggaacttcgtcatccaaatatagtcagtcttcaggatgtgcttatgcaggattccaggttatatctcatctttgagtttctttccatggatctgaagaaatacttggattctatccctcctggtcagtacatggattcttcacttgttaagagttatttataccaaatcctacaggggattgtgttttgtcactctagaagagttcttcacagagacttaaaacctcaaaatctcttgattgatgacaaaggaacaattaaactggctgattttggccttgccagagcttttggaatacctatcagagtatatacacatgaggtagtaacactctggtacagatctccagaagtattgctggggtcagctcgttactcaactccagttgacatttggagtataggcaccatatttgctgaactagcaactaagaaaccacttttccatggggattcagaaattgatcaactcttcaggattttcagagctttgggcactcccaataatgaagtgtggccagaagtggaatctttacaggactataagaatacatttcccaaatggaaaccaggaagcctagcatcccatgtcaaaaacttggatgaaaatggcttggatttgctctcgaaaatgttaatctatgatccagccaaacgaatttctggcaaaatggcactgaatcatccatattttaatgatttggacaatcagattaagaagatgtagctttctgacaaaaagtttccatatgttatg

SEQ ID NO: 9771 - protein, 297 aa, Homo sapiens
  ref <308>: DATABASE ACCESSION NUMBER: SWISS-Prot / P06493
  ref <309>: DATABASE ENTRY DATE: 2002-06-15
MEDYTKIEKIGEGTYGVVYKGRHKTTGQVVAMKKIRLESEEEGVPSTAIREISLLKELRHPNIVSLQDVLMQDSRLYLIFEFLSMDLKKYLDSIPPGQYMDSSLVKSYLYQILQGIVFCHSRRVLHRDLKPQNLLIDDKGTIKLADFGLARAFGIPIRVYTHEVVTLWYRSPEVLLGSARYSTPVDIWSIGTIFAELATKKPLFHGDSEIDQLFRIFRALGTPNNEVWPEVESLQDYKNTFPKWKPGSLASHVKNLDENGLDLLSKMLIYDPAKRISGKMALNHPYFNDLDNQIKKM

SEQ ID NO: 9772 - DNA, 1194 bp, Rattus norvegicus
  ref <308>: DATABASE ACCESSION NUMBER: EMBL / X60769
  ref <309>: DATABASE ENTRY DATE: 1991-08-16
ttcgccgcgcccgcgcccgcgcaccacgacttcctttccgacctcttcgccgacgactacggcgccaagccgagcaagaagccgtccgactacggttacgtgagcctcggccgcgcgggcgccaaggccgcaccgcccgcctgcttcccgccgccgcctcccgccgcactcaaggccgagccgggcttcgaacccgcggactgcaagcgcgcggacgacgcgcccgccatggcggccggcttcccgttcgccctgcgcgcctacctgggctaccaggcgacgccgagcggcagcagcggcagcctgtccacgtcgtcgtcgtccagcccgcccgggacgccgagccccgccgacgccaaggccgcgcccgccgcctgcttcgcggggccgccggccgcgcccgccaaggccaaggccaagaaggcggtggacaagctgagcgacgagtacaagatgcggcgcgagcgcaacaacatcgcggtgcgcaagagccgcgacaaggccaagatgcgcaacctggagacgcagcacaaggtgctggagctgacggcggagaacgagcggctgcagaagaaggtggagcagctgtcgcgagagctcagcacgctgcggaacttgttcaagcagctgcccgagccgctgctggcctcggcgggtcactgctagcccggcgggggtggcgtgggggcgccgcggccaccctgggcaccgtgcgccctgccccgcgcgctccgtccccgcgcgcgcccggggcaccgtgcgtgcaccgcgcgcacctgcacctgcaccgaggggacaccgtgggcaccgcgcgcacgcacctgcaccgcgcaccgggtttcgggacttgatgcaatccggatcaaacgtggctgagcgcgtgtggacacgggactgacgcaacacacgtgtaactgtcagccgggccctgagtaatcacttaaagatgttcctgcggggttgttgctgttgatgtttttgtttttgttttttgttttttgttttttttttggtcttattatttttttgtattatataaaaaagttctatttctatgagaaaagaggcgtatgtatattttgagaaccttttccgtttcgagcattaaagtgaagacattttaataaacttttttggagaatgtttaaaaaaaaaaaaaaaaaaaaaaaaaaaaaaaaaaaaaaaaaaaaaaaa

SEQ ID NO: 9773 - protein, 297 aa, Rattus norvegicus
  ref <308>: DATABASE ACCESSION NUMBER: SWISS-Prot / P21272
  ref <309>: DATABASE ENTRY DATE: 2002-06-15
MHRLLAWDAACLPPPPAAFRPMEVANFYYEPDCLAYGAKAARAAPRAPAAEPAIGEHERAIDFSPYLEPLAPAAADFAAPAPAHHDFLSDLFADDYGAKPSKKPSDYGYVSLGRAGAKAAPPACFPPPPPAALKAEPGFEPADCKRADDAPAMAAGFPFALRAYLGYQATPSGSSGSLSTSSSSSPPGTPSPADAKAAPAACFAGPPAAPAKAKAKKAVDKLSDEYKMRRERNNIAVRKSRDKAKMRNLETQHKVLELTAENERLQKKVEQLSRELSTLRNLFKQLPEPLLASAGHC

SEQ ID NO: 9774 - DNA, 1038 bp, Homo sapiens
  ref <308>: DATABASE ACCESSION NUMBER: Refseq / NM_005194
  ref <309>: DATABASE ENTRY DATE: 2000-11-01
atgcaacgcctggtggcctgggacccagcatgtctccccctgccgccgccgccgcctgcctttaaatccatggaagtggccaacttctactacgaggcggactgcttggctgctgcgtacggcggcaaggcggcccccgcggcgccccccgcggccagacccgggccgcgcccccccgccggcgagctgggcagcatcggcgaccacgagcgcgccatcgacttcagcccgtacctggagccgctgggcgcgccgcaggccccggcgcccgccacggccacggacaccttcgaggcggctccgcccgcgcccgcccccgcgcccgcctcctccgggcagcaccacgacttcctctccgacctcttctccgacgactacgggggcaagaactgcaagaagccggccgagtacggctacgtgagcctggggcgcctgggggctgccaagggcgcgctgcaccccggctgcttcgcgcccctgcacccaccgcccccgccgccgccgccgcccgccgagctcaaggcggagccgggcttcgagcccgcggactgcaagcggaaggaggaggccggggcgccgggcggcggcgcaggcatggcggcgggcttcccgtacgcgctgcgcgcttacctcggctaccaggcggtgccgagcggcagcagcgggagcctctccacgtcctcctcgtccagcccgcccggcacgccgagccccgctgacgccaaggcccccccgaccgcctgctacgcgggggccgggccggcgccctcgcaggtcaagagcaaggccaagaagaccgtggacaagcacagcgacgagtacaagatccggcgcgagcgcaacaacatcgccgtgcgcaagagccgcgacaaggccaagatgcgcaacctggagacgcagcacaaggtcctggagctcacggccgagaacgagcggctgcagaagaaggtggagcagctgtcgcgcgagctcagcaccctgcggaacttgttcaagcagctgcccgagcccctgctcgcctcctccggccactgctag

SEQ ID NO: 9775 - protein, 345 aa, Homo sapiens
  ref <308>: DATABASE ACCESSION NUMBER: Refseq / NP_005185
  ref <309>: DATABASE ENTRY DATE: 2000-11-01
MQRLVAWDPACLPLPPPPPAFKSMEVANFYYEADCLAAAYGGKAAPAAPPAARPGPRPPAGELGSIGDHERAIDFSPYLEPLGAPQAPAPATATDTFEAAPPAPAPAPASSGQHHDFLSDLFSDDYGGKNCKKPAEYGYVSLGRLGAAKGALHPGCFAPLHPPPPPPPPPAELKAEPGFEPADCKRKEEAGAPGGGAGMAAGFPYALRAYLGYQAVPSGSSGSLSTSSSSSPPGTPSPADAKAPPTACYAGAGPAPSQVKSKAKKTVDKHSDEYKIRRERNNIAVRKSRDKAKMRNLETQHKVLELTAENERLQKKVEQLSRELSTLRNLFKQLPEPLLASSGHC

SEQ ID NO: 9776 - DNA, 1542 bp, Rattus norvegicus
  ref <308>: DATABASE ACCESSION NUMBER: EMBL / X61295
  ref <309>: DATABASE ENTRY DATE: 1997-01-29
catccaccatgatcaagtaggcttcatcccaggcatgcagggatggtttaatatacggaaaaccatcaacgtgatccattatataaacaaactgaaagaacagaaccacatgatcatttcattagatgctgagaaagcatttgacaaaattcaacaccccttcatgataaaagtcctggaaaaaataggaattcaaggcccatacctaaacatagtaaaagccatatacagcaaaccagttgctaacattaaactaaatggagagaaacttgaagcaatcccactaaaatcagggactagacaaggctgcccacgctctccctacttattcaatatagttcttgaagttctagccagagcaatcagacaacaaaaggagatcaaagggatacagatcggaaaagaagaggtcaaaatatcactatttgcagatgatatgatagtatatttaagtgatcccaaaagttccaccagagaactactaaagctgataaacaacttcagcaaagtggctgggtataaaattaactcaaataaatcagttgccttcctctatacaaaagagaaacaagccgagaaagaaattagggaaacgacacccttcataatagacccaaataatataaagtacctcggtgtgactttaaccaagcaagtaaaagatctgtacaataagaacttcaagacactgaagaaagaaattgaagaagacctcagaagatggaaagatctcccatgctcatggattggcaggattaatatagtaaaaatggccattttaccaaaagcaatctacagattcaatgcaatccccatcaaaataccaatccaattcttcaaagagttagacagaacaatttgcaaattcatctggaataacaaaaaacccaggatacgtaaagctatcctcaacaataaaaggacttcagggggaatcactatccctgaactcaagcagtattacagagcaatagtgataaaaactgcatggtattggtacagagacagacagatagaccaatggaatagaattgaagacccagaaatgaacccacacacctatggtcacttgatttttgacaaaggagccaaagccatccaatggaaaaaagatagcattttcagcaaatggtgctggttcaactggagggcaacatgtagaagaatgcagatcgatccatgcttatcaccctgtacaaagcttaagtccaagtggatcaaggacctccacatcaaaccagacacactcaaactaatagaagaaaaactagggaagcatctggaacacatgggcactggaaaaaatttcctgaacaaaacaccaatggcttatgctctaagatcaagaattgacaaatgggatctcataaaactgcaaagcttctgtaaggcaaaggacactgtggttaggacaaaacggcaaccaacagattgggaaaagatctttaccaaccctacaacagatagaggccttatatccaaaatatacaaagaactcaagaagttagaccgcagggaaacaaataaccctattaaaaaatg

SEQ ID NO: 9777 - protein, 513 aa, Rattus norvegicus
  ref <308>: DATABASE ACCESSION NUMBER: SWISS-Prot / CAA43593
  ref <309>: DATABASE ENTRY DATE: 2002-10-01
IHHDQVGFIPGMQGWFNIRKTINVIHYINKLKEQNHMIISLDAEKAFDKIQHPFMIKVLEKIGIQGPYLNIVKAIYSKPVANIKLNGEKLEAIPLKSGTRQGCPRSPYLFNIVLEVLARAIRQQKEIKGIQIGKEEVKISLFADDMIVYLSDPKSSTRELLKLINNFSKVAGYKINSNKSVAFLYTKEKQAEKEIRETTPFIIDPNNIKYLGVTLTKQVKDLYNKNFKTLKKEIEEDLRRWKDLPCSWIGRINIVKMAILPKAIYRFNAIPIKIPIQFFKELDRTICKFIWNNKKPRIRKAILNNKRTSGGITIPELKQYYRAIVIKTAWYWYRDRQIDQWNRIEDPEMNPHTYGHLIFDKGAKAIQWKKDSIFSKWCWFNWRATCRRMQIDPCLSPCTKLKSKWIKDLHIKPDTLKLIEEKLGKHLEHMGTGKNFLNKTPMAYALRSRIDKWDLIKLQSFCKAKDTVVRTKRQPTDWEKIFTNPTTDRGLISKIYKELKKLDRRETNNPIKK

SEQ ID NO: 9778 - DNA, 5979 bp, Homo sapiens
  ref <308>: DATABASE ACCESSION NUMBER: EMBL / U93574
  ref <309>: DATABASE ENTRY DATE: 1999-07-01
gtctacagctcccagcgtgagcgacgcagaagacgggtgatttctgcatttccgtctgaggtaccgggttcatctcactagggagtgccagacagtgggcgcaggccagtgtgtgtgtgcaccgtgcgcgagccgaagcagggcgaggcattgcctcacctgggaagcgcaaggggtcagggagttccctttccgagtcaaagaaaggggtgacggacgcacctggaaaatcgggtcactcccacccgaatattgcgcttttcagaccggcttaagaaacggcgcaccacgagactatatcccacacctggctcagagggtcctacgcccacggagtctcgctgattgctagcacagcagtctgagatcaaactgcaaggcggcaacgaggctgggggaggggcgcccgccattgcccaggcttgcttaggtaaacaaagcagccgggaagctcgaactgggtggagcccaccacagctcaaggaggcctgcctgcctctgtaggctccacctctgggggcagggcacagacacacaaaaagacagcagtaacctctgcacacttaagtgtccctgtctgacagctttgaagagagcagtggttctcccagcacgcagctggagatctgagaacgggcagactgcctcctcaagtgggtccctgacccctgacccccgagcagcctaactgggaggcaccccccagcaggggcacactgacacctcacacggcagggtattccaacagacctgcagctgagggtcctgtctgttagaaggaaaactaacaaccagaaaggacatctacaccgaaaacccatctgtacatcaccatcatcaaagaccaaaagtagataaaaccacaaagatggggaaaaaacagaacagaaaaactggaaactctaaaacgcagagcgcctctcctcctccaaaggaacgcagttcctcaccagcaacagaacaaagctggatggagaatgattttgacgagctgagagaagaaggcttcagacgatcaaattactctgagctacgggaggacattcaaaccaaaggcaaagaagttgaaaactttgaaaaaaatttagaagaatgtataactagaatatccaatacagagaagtgcttaaaggagctgatggagctgaaaatcaaggctcgagaactacgtgaagaatgcagaagcctcaggagccgatgcgatcaactggaagaaagggtatcagcaatggaagatgaaatgaatgaaatgaagcgagaagggaagtttagagaaaaaagaataaaaagaaatgagcaaagcctccaagaaatatgggactatgtgaaaagaccaaatctacgtctgattggtgtacctgaaagtgatgtggagaatggaaccaagttggaaaacactctgcaggatattatccaggagaacttccccaatctagcaaggcaggccaacgttcagattcaggaaatacagagaacgccacaaagatactcctcgagaagagcaactccaagacacataattgtcagattcaccaaagttgaaatgaaggaaaaaatgttaagggcagccagagagaaaggtcgggttaccctcaaaggaaagcccatcagactaacagcggatctctcggcagaaaccctacaagccagaagagagtgggggccaatattcaacattcttaaagaaaagaattttcaacccagaatttcatatccagccaaactaagcttcataagtgaaggagaaataaaatactttatagacaagcaaatgctgagagattttgtcaccaccaggcctgccctaaaagagctcctgaaggaagcgctaaacatggaaaggaacaaccggtaccagccactgcaaaatcatgccaaaatgtaaagaccatcaagactaggaagaaactgcatcaactaatgagcaaaatcaccagctaacatcataatgacaggatcaaattcacacataacaatattaactttaaatataaatggactaaattctgcaattaaaagacacagactggcaagttggataaagagtcaagacccatcagtgtgctgtattcaggaaacccatctcacatgcagagacacacataggctcaaaataaaaggatggaggaagatctaccaagccaatggaaaacaaaaaaaggcaggggttgcaatcctagtctctgataaaacagactttaaaccaacaaagatcaaaagagacaaagaaggccattacataatggtaaagggatcaattcaacaagaggagctaactatcctaaatatttatgcacccaatacaggagcacccagattcataaagcaagtcctcagtgacctacaaagagacttagactcccacacattaataatgggagactttaacaccccactgtcaacattagacagatcaacgagacagaaagtcaacaaggatacccaggaattgaactcagctctgcaccaagcagacctaatagacatctacagaactctccaccccaaatcaacagaatatacatttttttcagcaccacaccacacctattccaaaattgaccacatagttggaagtaaagctctcctcagcaaatgtaaaagaacagaaattataacaaactatctctcagaccacagtgcaatcaaactagaactcaggattaagaatctcactcaaagccgctcaactacatggaaactgaacaacctgctcctgagtgactactggctacataacgaaatgaaggcagaaataaagatgttctttgaaaccaacgagaacaaagacaccacataccagaatctctgggacgcattcaaagcagtgtgtagagggaaatttatagcactaaatgcctacaagagaaagcaggaaagatccaaaattgacaccctaacatcacaattaaaagaactagaaaagcaagagcaaacacattcaaaagctagcagtaggcaagaaataactaaaatcagagcagaactgaaggaaatagagacacaaaaaacccttcaaaaaatcaatgaatccaggatctggttttttgaaaggatcaacaaaattgatagaccgctagcaagactaataaagaaaaaaagagagaagaatcaaatagacacaataaaaaatgataaaggggatatcaccaccgatcccacagaaatacaaactaccatcagagaatactacaaacacctctacgcaaataaactagaaaatctagaagaaatggatacattcctcaacacatacactctcccaacactaaaccaggaagaagttgaatctctgaatagaccaataacaggctctgaaattgtggcaataatcaatagtttaccaaccaaaaagagtccaggaccagatggattcacagccgaattctaccagaggtacaaggaggagctggtaccattccttctgaaactattccaatcaacagaaaaagagggaatcctccctaactcattttatgaggccagcatcattctgataccaaagccgggcagagacacaaccaaaaaagagaattttagaccaatatccttgatgaacattgatgcaaaaatcctcaataaaatactggcaaaccgaatccagcagcacatcaaaaagcttatccaccatgatcaagtgggcttcatccctgggatgcaaggctggttcaatatacgcaaatcaataaatgtaatccagcatataaacagagccaaagacaaaaaccacatgattatctcaatagatgcagaaaaagcctttgacaaaattcaacaacccttcatgctaaaaactctcaataaattaggtattgatgggacgtatttcaaaataataagagctatctatgacaaacccacagccaatatcatactgaatgggcaaaaactggaagcattccctttgaaaactggcacaagacagggatgccctctctcaccgctcctattcaacatagtgttggaagttctggccagggcaatcaggcaggagaaggaaataaagggtattcaattaggaaaagaggaagtcaaattgtccctgtttgcagacgacatgattgtttatctagaaaaccccatcgtctcagcccaaaatctccttaagctgataagcaacttcagcaaagtctcaggatacaaaatcaatgtacaaaaatcacaagcattcttatacaccaacaacagacaaacagagagccaaatcatgagtgaactcccattcacaattgcttcaaagagaataaaatacctaggaatccaacttacaagggatgtgaaggacctcttcaaggagaactacaaaccactgctcaaggaaataaaagaggacacaaacaaatggaagaacattccatgctcatgggtaggaagaatcaatatcgtgaaaatggccatactgcccaaggtaatttacagattcaatgccatccccatcaagctaccaatgactttcttcacagaattggaaaaaactactttaaagttcatatggaaccaaaaaagagcccgcattgccaaggcaatcctaagccaaaagaacaaagctggaggcatcacactacctgacttcaaactatactacaaggctacagtaaccaaaacagcatggtactggtaccaaaacagagatatagatcaatggaacagaacagagccctcagaaataatgccacatatctacaactatctgatctttgacaaacctgagaaaaacaagcaatggggaaaggattccctatttaataaatggtgctgggaaaactggctagccatatgtagaaagctgaaactggatcccttccttacaccttatacaaaaatcaattcaagatggattaaagatttaaacgttagacctaaaaccataaaaaccctagaagaaaacctaggcattaccattcaggacataggcgtgggcaaggacttcatgtccaaaacaccaaaagcaatggcaacaaaagccaaaattgacaaatgggatctaattaaactaaagagcttctgcacagcaaaagaaactaccatcagagcgaacaggcaacctacaacatgggagaaaattttcgcaacctactcatctgacaaagggctaatatccagaatctacaatgaactcaaacaaatttacaagaaaaaaacaaacaaccccatcaaaaagtgggcaaaggacatgaacagacacttctcaaaagaagacatttatgcagccaaaaaacacatgaagaaatgctcatcatcactggccatcagagagatgcaaatcaaaaccactatgagatgtcatttcacaccagttagaatggcaatcattaaaaagtcaggaaacaacaggtgctggagaggatgtggagaaataggaacacttttacactgttggtgggactgtaaactagttcaaccattgtggaagtcagtgtggcgattcctcagggatctagaactagaaataccatttgacccagccatcccattactgggtatatacccaaaggactataaatcatgctgctataaagacacatgcacacgtatgtttattgcggcactattcacaatagcaaagacttggaaccaacccaaatgtccaacaatgatagactggattaagaaaatgtggcacatatacaccatggaatactatgcagccataaaaaatgatgagttcatgtcctttgtagggacatggatgaaattggaaaccatcattctcagtaaactatcgcaagaacaaaaaaccaaacaccgcatattctcactcataggtgggaattgaacaatgagatcacatggacacaggaaggggaatatcacactctggggattgtggtggggtcgggggaggggggagggatagcattgggagatatacctaatgctagatgacacattagtgggtgcagcacaccagcatggcacatgtatacatatgtaactaacctgcacaatgtgcacatgtaccctaaaacttagagtata

SEQ ID NO: 9779 - protein, 1275 aa, Homo sapiens [sequence omitted]

SEQ ID NO: 9780 - DNA, 498 bp, Rattus norvegicus
  ref <308>: DATABASE ACCESSION NUMBER: EMBL / X61381
  ref <309>: DATABASE ENTRY DATE: 1992-05-26
tgtgtgcgatcgcggtggatcgctaccatgaaccacacttctcaagccttcgtgaacgctgccactgggggacaacccccaaactacgaaagaatcaaggaagaatatgaggtgtctgaactgggggctccccacggatcggcttctgtcagaactaccgtgatcaacatgcccagagaggtctctgtgcctgaccatgtggtctggtccctgttcaatacgctcttcatgaacttctgctgcctgggcttcattgcctatgcctactctgtgaagtctagggatcggaagatggtgggtgatatgactggagcccaggcctacgcatccactgccaaatgcctgaacatcagctccctggtcctcagcatcctcatggtcattatcactattgttactgtcgtcatcattgctcttaatgctcctcgtctccagacttgatagaggattctggtttctgatcctgacgtgcttcacgctctgctggctgcccttttt

SEQ ID NO: 9781 - protein, 137 aa, Rattus norvegicus
  ref <308>: DATABASE ACCESSION NUMBER: SWISS-Prot / CAA43655
  ref <309>: DATABASE ENTRY DATE: 2002-06-15
MNHTSQAFVNAATGGQPPNYERIKEEYEVSELGAPHGSASVRTTVINMPREVSVPDHVVWSLFNTLFMNFCCLGFIAYAYSVKSRDRKMVGDMTGAQAYASTAKCLNISSLVLSILMVIITIVTVVIIALNAPRLQT

SEQ ID NO: 9782 - DNA, 637 bp, Homo sapiens
  ref <308>: DATABASE ACCESSION NUMBER: EMBL / BC006794
  ref <309>: DATABASE ENTRY DATE: 2001-07-13
ggagggctcactgagaaccatcccagtaacccgaccgccgctggtcttcgctggacaccatgaatcacactgtccaaaccttcttctctcctgtcaacagtggccagccccccaactatgagatgctcaaggaggagcacgaggtggctgtgctgggggcgccccacaaccctgctcccccgacgtccaccgtgatccacatccgcagcgagacctccgtgcccgaccatgtcgtctggtccctgttcaacaccctcttcatgaacccctgctgcctgggcttcatagcattcgcctactccgtgaagtctagggacaggaagatggttggcgacgtgaccggggcccaggcctatgcctccaccgccaagtgcctgaacatctgggccctgattctgggcatcctcatgaccattctgctcatcgtcatcccagtgctgatcttccaggcctatggatagatcaggaggcatcactgaggccaggagctctgcccatgacctgtatcccacgtactccaacttccattcctcgccctgcccccggagccgagtcctgtatcagccctttatcctcacacgcttttctacaatggcattcaataaagtgcacgtgtttctgaaaaaaaaaaaaaaaa

SEQ ID NO: 9783 - protein, 133 aa, Homo sapiens
  ref <308>: DATABASE ACCESSION NUMBER: SWISS-Prot / Q01628
  ref <309>: DATABASE ENTRY DATE: 2002-06-15
MNHTVQTFFSPVNSGQPPNYEMLKEEHEVAVLGAPHNPAPPTSTVIHIRSETSVPDHVVWSLFNTLFMNPCCLGFIAFAYSVKSRDRKMVGDVTGAQAYASTAKCLNIWALILGILMTILLIVIPVLIFQAYG

SEQ ID NO: 9784 - DNA, 860 bp, Rattus norvegicus
  ref <308>: DATABASE ACCESSION NUMBER: EMBL / X61654
  ref <309>: DATABASE ENTRY DATE: 1993-07-20
ggctgctgagccgcggtaggagagcatcaagaagcgtcggggagcgcaggcccagcagccatggcggtggaaggaggaatgaagtgtgtcaagtttttgctctacgttctcctactggccttttgcgcctgcgcagtgggattgattgccattggcgtagcagttcaggttgtcttgaagcaggccattacccacgagactactgctggctcgctgttgcctgtggtcatcattgcagtgggtgccttcctcttcctggtggcctttgtgggctgctgtggggcctgcaaagagaactactgtctcatgattacatttgccatcttcctgtctcttatcatgctcgtggaggtggcggtggccattgctggctatgtgtttagagaccaggtgaagtcagagtttagtaagagcttccagaagcagatgcagaattaccttacagacaacaaaacggccaccattttggacaaattgcagaaggaaaataaatgctgtggagcctctaactacacagactgggagcgcatccccggtatggccaaggacagggtccccgattcttgctgcatcaacatcactgtgggctgtggaaacgatttcaaggaatccaccatccatacccagggctgcgtggaaactatagcggcatggctgaggaagaacgtactgctggtggctggagcagccctgggcattgcttttgtggaggtcctgggcattatcttctcctgctgtctggtgaagagtatccggagtggctacgaagtaatgtagggtgggggcgtgtctgagctcgtctgtcttttcatggagtggactctccaggttttcaattaaacggattattttttcagacc

SEQ ID NO: 9785 - protein, 237 aa, Rattus norvegicus
  ref <308>: DATABASE ACCESSION NUMBER: SWISS-Prot / P28648
  ref <309>: DATABASE ENTRY DATE: 2001-10-16
AVEGGMKCVKFLLYVLLLAFCACAVGLIAIGVAVQVVLKQAITHETTAGSLLPVVIIAVGAFLFLVAFVGCCGACKENYCLMITFAIFLSLIMLVEVAVAIAGYVFRDQVKSEFSKSFQKQMQNYLTDNKTATILDKLQKENKCCGASNYTDWERIPGMAKDRVPDSCCINITVGCGNDFKESTIHTQGCVETIAAWLRKNVLLVAGAALGIAFVEVLGIIFSCCLVKSIRSGYEVM

SEQ ID NO: 9786 - DNA, 826 bp, Homo sapiens
  ref <308>: DATABASE ACCESSION NUMBER: EMBL / X07982
  ref <309>: DATABASE ENTRY DATE: 1995-03-27
gccttgggaagcccaggcccggcagccatggcggtggaaggaggaatgaaatgtgtgaagttcttgctctacgtcctcctgctggccttttgcgcctgtgcagtgggactgattgccgtgggtgtcggggcacagcttgtcctgagtcagaccataatccagggggctacccctggctctctgttgccagtggtcatcatcgcagtgggtgtcttcctcttcctggtggcttttgtgggctgctgcggggcctgcaaggagaactattgtcttatgatcacgtttgccatctttctgtctcttatcatgttggtggaggtggccgcagccattgctggctatgtgtttagagataaggtgatgtcagagtttaataacaacttccggcagcagatggagaattacccgaaaaacaaccacactgcttcgatcctggacaggatgcaggcagattttaagtgctgtggggctgctaactacacagattgggagaaaatcccttccatgtcgaagaaccgagtccccgactcctgctgcattaatgttactgtgggctgtgggattaatttcaacgagaaggcgatccataaggagggctgtgtggagaagattgggggctggctgaggaaaaatgtgctggtggtagctgcagcagcccttggaattgcttttgtcgaggttttgggaattgtctttgcctgctgcctcgtgaagagtatcagaagtggctacgaggtgatgtaggggtctggtctcctcagcctcctcatctgggggagtggaatagtatcctccaggtttttcaattaaacggattattttttca

SEQ ID NO: 9787 - protein, 237 aa, Homo sapiens
  ref <308>: DATABASE ACCESSION NUMBER: SWISS-Prot / P08962
  ref <309>: DATABASE ENTRY DATE: 2002-06-15
AVEGGMKCVKFLLYVLLLAFCACAVGLIAVGVGAQLVLSQTIIQGATPGSLLPVVIIAVGVFLFLVAFVGCCGACKENYCLMITFAIFLSLIMLVEVAAAIAGYVFRDKVMSEFNNNFRQQMENYPKNNHTASILDRMQADFKCCGAANYTDWEKIPSMSKNRVPDSCCINVTVGCGINFNEKAIHKEGCVEKIGGWLRKNVLVVAAAALGIAFVEVLGIVFACCLVKSIRSGYEVM

SEQ ID NO: 9788 - DNA, 2153 bp, Rattus norvegicus
  ref <308>: DATABASE ACCESSION NUMBER: EMBL / X62322
  ref <309>: DATABASE ENTRY DATE: 1992-08-26
agggagcgcggaccccgacgcaggcagaccatgtggatcctggtgagctggctggccttagtggcaaggctggtggctggaacacagtgcccagatggtcaattctgccctgttgcctgctgccttgaccagggaggagccaactacagctgctgtaaccctcttctggacacatggcctataataacgagccgtcgtctagatggctcctgccagatccgtgaccactgtcctgatggctactcttgtcttctcactgtgtctgggacttccagctgctgcccgttctctgagggtgtatcttgtgatgatggccagcactgctgcccccggggcttccactgtagtgcggatgggaaatcctgctctcagatatcagatagcctcttgggtgctgtccagtgtcctggtagccagttcgaatgtcctgactccgccacctgctgtattatgattgatggttcctgggggtgctgccccatgccccaggcctcttgctgtgaagacagagtgcattgctgtccccacggggcctcctgtgacctggttcacacgcgatgcatttcacccacgggcacccaccccttactaaagaaattccccgcacaaaggaccaacagggcagtggctttccctttttccgtggtgtgccctgatgctaagacccagtgccctgatgactctacctgctgtgagctacccactgggaagtatggctgttgtccaatgcccaacgccatctgctgttccgaccacctgcactgctgcccccaggacactgtatgtgacctgatccagagcaagtgcatatccaaggactacaccacagatctcatgaccaagctgcctggatacccagtgaatgaggtgaagtgcgacttggaggtgagctgtcctgatggctacacctgctgccgcctcaacactggggcctggggctgctgtccattcaccaaggctgtgtgttgtgaagaccacattcactgctgcccagccgggtttcagtgtcacacagagacaggaacctgtgaactgggagtccttcaggtaccctggatgaaaaaggtcacggcctccctcagcctgccagacccacagatcttgaagaatgatgtcccctgtgatgacttcagtagctgtccttctaacaatacctgctgcagactcagttctggggactggggctgctgtcccatcccagaggctgtctgctgcttagaccaccagcattgctgccctcagggtttcaaatgtatggatgaggggtactgtcagaagggagacagaatggtggctggcctggagaagatgcctgtccgccagacaactctgctccaacatggagatattggttgtgaccagcataccagctgcccagtagggcaaacatgctgcccaagcctgaagggaagttgggcctgctgccagttgccccatgctgtgtgctgtgaggaccggcagcactgttgcccggctgggtacacctgcaacgtgaaggcgagaacctgtgagaaggatgcaggctctgtccagccttccatggacctgacctttggctctaaggttgggaatgtggaatgtggtgccggacatttctgccatgataaccagtcctgttgtaaagacagccaaggaggctgggcctgctgtccctatgtaaagggtgtctgctgtagagatggacgtcactgttgtcccattggcttccactgttcagccaagggaaccaagtgtttgcggaagaagacccctcgctgggacatacttttgagggatccagccccaagaccgctactgtgaggaagggctaacgactaaagaactccacagtcctgggaaccctgttctgagggtatccaccactcaggcctccctggcacctcttcctttagtctccccggcctactcattctgagtcaccccatcaccatggaaggtggggcctcaaactaagaccttctcttatggaaagaaggctgtggcaaaagccccgtatcaaactgccatttcttctgatttctgtggaccttgtggccaggtgctcttctcgatccacaggtgttgtgtgagcttgcttttgtgtgtgtgtgtgtgcgcgcgtgcgagcgtgttgctccaataaagtttgtacactttcaaaaaaaaaaaaaaaa

SEQ ID NO: 9789 - protein, 588 aa, Rattus norvegicus
  ref <308>: DATABASE ACCESSION NUMBER: SWISS-Prot / P23785
  ref <309>: DATABASE ENTRY DATE: 2001-10-16
MWILVSWLALVARLVAGTQCPDGQFCPVACCLDQGGANYSCCNPLLDTWPIITSRRLDGSCQIRDHCPDGYSCLLTVSGTSSCCPFSEGVSCDDGQHCCPRGFHCSADGKSCSQISDSLLGAVQCPGSQFECPDSATCCIMIDGSWGCCPMPQASCCEDRVHCCPHGASCDLVHTRCISPTGTHPLLKKFPAQRTNRAVASFSVVCPDAKTQCPDDSTCCELPTGKYGCCPMPNAICCSDHLHCCPQDTVCDLIQSKCISKDYTTDLMTKLPGYPVNEVKCDLEVSCPDGYTCCRLNTGAWGCCPFTKAVCCEDHIHCCPAGFQCHTETGTCELGVLQVPWMKKVTASLSLPDPQILKNDVPCDDFSSCPSNNTCCRLSSGDWGCCPMPEAVCCLDHQHCCPQGFKCMDEGYCQKGDRMVAGLEKMPVRQTTLLQHGDIGCDQHTSCPVGQTCCPSLKGSWACCQLPHAVCCEDRQHCCPAGYTCNVKARTCEKDAGSVQPSMDLTFGSKVGNVECGAGHFCHDNQSCCKDSQGGWACCPYVKGVCCRDGRHCCPIGFHCSAKGTKCLRKKTPRWDILLRDPAPRPLL

SEQ ID NO: 9790 - DNA, 2152 bp, Homo sapiens
  ref <308>: DATABASE ACCESSION NUMBER: EMBL / X62320
  ref <309>: DATABASE ENTRY DATE: 1992-08-26
gctgctgcccaaggaccgcggagtcggacgcaggcagaccatgtggaccctggtgagctgggtggccttaacagcagggctggtggctggaacgcggtgcccagatggtcagttctgccctgtggcctgctgcctggaccccggaggagccagctacagctgctgccgtccccttctggacaaatggcccacaacactgagcaggcatctgggtggcccctgccaggttgatgcccactgctctgccggccactcctgcatctttaccgtctcagggacttccagttgctgccccttcccagaggccgtggcatgcggggatggccatcactgctgcccacggggcttccactgcagtgcagacgggcgatcctgcttccaaagatcaggtaacaactccgtgggtgccatccagtgccctgatagtcagttcgaatgcccggacttctccacgtgctgtgttatggtcgatggctcctgggggtgctgccccatgccccaggcttcctgctgtgaagacagggtgcactgctgtccgcacggtgccttctgcgacctggttcacacccgctgcatcacacccacgggcacccaccccctggcaaagaagctccctgcccagaggactaacagggcagtggccttgtccagctcggtcatgtgtccggacgcacggtcccggtgccctgatggttctacctgctgtgagctgcccagtgggaagtatggctgctgcccaatgcccaacgccacctgctgctccgatcacctgcactgctgcccccaagacactgtgtgtgacctgatccagagtaagtgcctctccaaggagaacgctaccacggacctcctcactaagctgcctgcgcacacagtgggggatgtgaaatgtgacatggaggtgagctgcccagatggctatacctgctgccgtctacagtcgggggcctggggctgctgcccttttacccaggctgtgtgctgtgaggaccacatacactgctgtcccgcggggtttacgtgtgacacgcagaagggtacctgtgaacaggggccccaccaggtgccctggatggagaaggccccagctcacctcagcctgccagacccacaagccttgaagagagatgtcccctgtgataatgtcagcagctgtccctcctccgatacctgctgccaactcacgtctggggagtggggctgctgtccaatcccagaggctgtctgctgctcggaccaccagcactgctgcccccagggctacacgtgtgtagctgaggggcagtgtcagcgaggaagcgagatcgtggctggactggagaagatgcctgcccgccgggcttccttatcccaccccagagacatcggctgtgaccagcacaccagctgcccggtggggcagacctgctgcccgagcctgggtgggagctgggcctgctgccagttgccccatgctgtgtgctgcgaggatcgccagcactgctgcccggctggctacacctgcaacgtgaaggctcgatcctgcgagaaggaagtggtctctgcccagcctgccaccttcctggcccgtagccctcacgtgggtgtgaaggacgtggagtgtggggaaggacacttctgccatgataaccagacctgctgccgagacaaccgacagggctgggcctgctgtccctaccgccagggcgtctgttgtgctgatcggcgccactgctgtcctgctggcttccgctgcgcagccaggggtaccaagtgtttgcgcagggaggccccgcgctgggacgcccctttgagggacccagccttgagacagctgctgtgagggacagtactgaagactctgcagccctcgggaccccactcggagggtgccctctgctcaggcctccctagcacctccccctaaccaaattctccctggaccccattctgagctccccatcaccatgggaggtggggcctcaatctaaggccttccctgtcagaagggggttgtggcaaaagccacattacaagctgccatcccctccccgtttcagtggaccctgtggccaggtgcttttccctatccacaggggtgtttgtgtgtgtgcgcgtgtgcgtttcaataaagtttgtacactttcaaaaaaaaaaaaaaaaaaaaaaaaaa

SEQ ID NO: 9791 - protein, 593 aa, Homo sapiens
  ref <308>: DATABASE ACCESSION NUMBER: SWISS-Prot / P28799
  ref <309>: DATABASE ENTRY DATE: 2002-06-15
MWTLVSWVALTAGLVAGTRCPDGQFCPVACCLDPGGASYSCCRPLLDKWPTTLSRHLGGPCQVDAHCSAGHSCIFTVSGTSSCCPFPEAVACGDGHHCCPRGFHCSADGRSCFQRSGNNSVGAIQCPDSQFECPDFSTCCVMVDGSWGCCPMPQASCCEDRVHCCPHGAFCDLVHTRCITPTGTHPLAKKLPAQRTNRAVALSSSVMCPDARSRCPDGSTCCELPSGKYGCCPMPNATCCSDHLHCCPQDTVCDLIQSKCLSKENATTDLLTKLPAHTVGDVKCDMEVSCPDGYTCCRLQSGAWGCCPFTQAVCCEDHIHCCPAGFTCDTQKGTCEQGPHQVPWMEKAPAHLSLPDPQALKRDVPCDNVSSCPSSDTCCQLTSGEWGCCPIPEAVCCSDHQHCCPQGYTCVAEGQCQRGSEIVAGLEKMPARRASLSHPRDIGCDQHTSCPVGGTCCPSLGGSWACCQLPHAVCCEDRQHCCPAGYTCNVKARSCEKEVVSAQPATFLARSPHVGVKDVECGEGHFCHDNQTCCRDNRQGWACCPYRQGVCCADRRHCCPAGFRCAARGTKCLRREAPRWDAPLRDPALRQLL

SEQ ID NO: 9792 - DNA, 2153 bp, Rattus norvegicus; identical to SEQ ID NO: 9788
  ref <308>: DATABASE ACCESSION NUMBER: EMBL / X62322
  ref <309>: DATABASE ENTRY DATE: 1992-08-26

SEQ ID NO: 9793 - protein, 588 aa, Rattus norvegicus; identical to SEQ ID NO: 9789
  ref <308>: DATABASE ACCESSION NUMBER: SWISS-Prot / P23785
  ref <309>: DATABASE ENTRY DATE: 2001-10-16

SEQ ID NO: 9794 - DNA, 2152 bp, Homo sapiens; identical to SEQ ID NO: 9790
  ref <308>: DATABASE ACCESSION NUMBER: EMBL / X62320
  ref <309>: DATABASE ENTRY DATE: 1992-08-26

SEQ ID NO: 9795 - protein, 593 aa, Homo sapiens; identical to SEQ ID NO: 9791
  ref <308>: DATABASE ACCESSION NUMBER: SWISS-Prot / P28799
  ref <309>: DATABASE ENTRY DATE: 2002-06-15

SEQ ID NO: 9796 - DNA, 2001 bp, Rattus norvegicus
  ref <308>: DATABASE ACCESSION NUMBER: EMBL / X62323
  ref <309>: DATABASE ENTRY DATE: 1996-02-21
acctgttggctcggacaaagaactgagtgacctcctggacttcagtatgatgttcccgctacctgtggccaatggcaagggccggcccgcctccctagctggaacccagttcgcaggctcaggactggaggaccgacccagctcagagtcctggggcaacagtgaacagaacagttcttcctttgaccctagccgggcatacagcgaaggtgcccacttcagtgactcccacagcagcctgccgccttccacgttcctaggagctgggcttggaggcaagggcagtgaacggaatgcctatgccaccttcgggagagacaccagtgttggcaccctgagtcaggctggcttcctaccaggtgagctgggcctcagcagtcccgggccactgtccccatcaggcgtcaagagcagctcccagtattacacctcattccccagcaaccctcggcggagagctgcagatggtggcctggcagatactcagcccaagaaggtccggaaggttccgcctggtcttccttcctcggtatatccatccagctcaggtgataactacagcagggacgccacagcctacccctccgccaagacccccagcagcgcttacccctcccccttctacgtggcagacggcagcctgcacccctcagcggagctctggagtccccctggccaggtgggctttgggcccatgctaggtgatggctcggcccccctgccgcttgcaccgggcagcagttccgtgagcagtggtgcctttgggggcctccagcagcaggatcgcatgggctaccagctgcatgggtctgaggtcaatggtacgctcccagctgtatccagcttctcagctgcccctggcacttacagtgggacttctggccacacgccacccgtgagcggggccgacagcctcttaggcacccgagggactacagccagcagctcaggggatgcccttgggaaggcactggcctccatctactccccggatcactccagcaataatttctcgcccagcccctcaacgcctgtgggttcaccccagggcctgccagggacatcacagtggccccgggcaggagcgcccagtgccttatcccccaactacgatgcaggtctccatggcctgagtaaaatggaagatcgcttggacgaggccatccacgtcctccgcagtcacgctgtcggcactgcaagcgagctccatggactgctgcctggccacagcacgttgaccacaagctttgcgggccccatgtcactgggcgggcggcatgcaggcctggtcagcggaagccaccctgaggatggcctcacaagtggtgccagtcttttgcataaccatgccagccttcccagccagcccagctccctccctgacctctcacagaggccacccgactcctttagtggactcgggagggcaggcgtgactgcaggcgccagtgagatcaagcgggaggagaaagaggacgaggaggtcacatcagtggcagacgctgaggaagacaagaaggacctgaaggtcccacgcacacgtaccagcagtacagatgaggtgctgtccctggaggagaaggacctgagggaccgggagaggcgcatggccaataacgctcgggagcgggtgcgcgtgcgggacattaacgaggccttccgggagctgggccgcatgtgccagctgcacctcaagtcggataaggcgcagaccaagctgctgatcctgcagcaggcggtgcaggttatcctgggcctggagcagcaggtgcgagaacgcaacctgaaccccaaagcagcctgcttgaagcggcgggaggaggagaaggtatctggcgtggtcggggatccgcagctggcgctgtcagccgcccacccgggcctgggtgaggcccacaatccagctgggcacctgtgagccgtcacagggtcttcgttggaccagggaccaccacatctctgcccggggtgcacccaggatggtcctggatgagacatctc

SEQ ID NO: 9797 - protein, 649 aa, Rattus norvegicus; identical to SEQ ID NO: 7770
  ref <308>: DATABASE ACCESSION NUMBER: SWISS-Prot / P21677
  ref <309>: DATABASE ENTRY DATE: 2001-10-16

SEQ ID NO: 9798 - DNA, 258 bp, Homo sapiens
  ref <308>: DATABASE ACCESSION NUMBER: EMBL / AA504291
  ref <309>: DATABASE ENTRY DATE: 2000-03-03
gggcggcaagcacacggaggaccccagcatctgcacctgggtgcggggaagggagagggtgctggggcagccctggccggggagcctacctcgcacctgctgctccagccccaggatgacctgcacggcctgctgcaggatgagcagcttggtctgcgctttgtccgacttgaggtgcatctggcacatgcgccccagctcccggaaggcctcgttaatatcccgcacgcgcacccgctcccgcgcgttattggccat

SEQ ID NO: 9799 - protein, 654 aa, Homo sapiens; identical to SEQ ID NO: 7772
  ref <308>: DATABASE ACCESSION NUMBER: Refseq / XP_047600
  ref <309>: DATABASE ENTRY DATE: 2002-08-01

SEQ ID NO: 9800 - DNA, 410 bp, Rattus norvegicus
  ref <308>: DATABASE ACCESSION NUMBER: EMBL / X62325
  ref <309>: DATABASE ENTRY DATE: 1999-07-30
atgaaatccttgagtgtttcactagtgctcctgtggctccagctaaacggggtgagcagccagcagaaggtgcagcagagcccagaatccctcattgtctcagagggagccaaagcctctttcaactgcactttcagtgatagtacttctgattatttctggtggttcagacagtattctgggaaaagccccaaggccctgatgtccatcttctccaatggtgacaagcaagaaggcagattcacagttcacctcaataaaaccagcctgcatgtttccctgcacatcaatgactcccaacccactgactctgctgtctacctctgtgcagtgagtgcgaaaataatgcaggtgccaagctcacgtttggagggggaacaaggttgacggtcaaaccccatgtcacagac

SEQ ID NO: 9801 - DNA, 410 bp, Rattus norvegicus; identical to SEQ ID NO: 9800
  ref <308>: DATABASE ACCESSION NUMBER: EMBL / X62325
  ref <309>: DATABASE ENTRY DATE: 1999-07-30

SEQ ID NO: 9802 - DNA, 893 bp, Rattus norvegicus
  ref <308>: DATABASE ACCESSION NUMBER: EMBL / X62660
  ref <309>: DATABASE ENTRY DATE: 1999-07-01
ccaataaggaaactctgaaccaggagtcatggaagtcaaacccaagctctactactttcaaggcaggggaaggatggagtcgatccgctggctgctggctacagctggagtggagtttgaagaagaatttcttgagacgagagaacaatatgagaagttgcaaaaggatggatgcctgctttttggccaagtcccattggtggaaatagacgggatgctactgacacagaccagagccatcctcagctacctggccgccaagtacaacttgtatgggaaggacctgaaggagagagtcaggattgacatgtatgccgatggcacccaggacctgatgatgatgattatcggggctccatttaaagcccctcaggaaaaagaagagagcctagctttagcagtgaagagggctaaaaaccgttacttcccagtgtttgaaaagattttaaaagaccatggagaggcatttcttgttggcaaccaactcagttgggcagacatacagctactagaagccattttgatggtggaagaagtcagtgctcctgtgttgtctgacttccctctgctgcaggcatttaagacaagaatcagcaacattcctacaattaagaagttcctgcaacctggaagtcagaggaagccacctccggatggccactatgttgacgtggtcaggaccgtcctgaagttctagtgacagcgtgctttaaagtggctactgcaagggtccaatcacagcagcagctacagagcattccagaggcaagatagagctctcaggagtaaaggtcttcaaagaacctgaaaaccactctgtccaacaatgacaaatgccaattaaatagagtgaaaaactgttaaaaaaaaaaaaaaaaaaaaaaaaaaaaaaa

SEQ ID NO: 9803 - protein, 222 aa, Rattus norvegicus
  ref <308>: DATABASE ACCESSION NUMBER: SWISS-Prot / CAB46530
  ref <309>: DATABASE ENTRY DATE: 1995-11-01
MEVKPKLYYFQGRGRMESIRWLLATAGVEFEEEFLETREQYEKLQKDGCLLFGQVPLVEIDGMLLTQTRAILSYLAAKYNLYGKDLKERVRIDMYADGTQDLMMMIIGAPFKAPQEKEESLALAVKRAKNRYFPVFEKILKDHGEAFLVGNQLSWADIQLLEAILMVEEVSAPVLSDFPLLQAFKTRISNIPTIKKFLQPGSQRKPPPDGHYVDVVRTVLKF

SEQ ID NO: 9804 - DNA, 918 bp, Homo sapiens; identical to SEQ ID NO: 2695
  ref <308>: DATABASE ACCESSION NUMBER: Refseq / NM_000847
  ref <309>: DATABASE ENTRY DATE: 2002-11-05

SEQ ID NO: 9805 - protein, 222 aa, Homo sapiens; identical to SEQ ID NO: 2696
  ref <308>: DATABASE ACCESSION NUMBER: SWISS-Prot / Q16772
  ref <309>: DATABASE ENTRY DATE: 2002-06-15

SEQ ID NO: 9806 - DNA, 3120 bp, Rattus norvegicus
  ref <308>: DATABASE ACCESSION NUMBER: EMBL / X62839
  ref <309>: DATABASE ENTRY DATE: 1993-01-14
cctcagcacccagagaagcggctcaaccacctgaaccccgaaaacgccaacaagtagtttctcctttgaggagggcggctcagctggccacagtgactccgtccgactgcaggaagaacctcgtccacacggagacccaagcagatccacttttctcccggtctccttaagtcatgtctgagccacagagatgagcaagatcgagaacaacgagagggtgatcctcaatgtcggaggcaccaggcacgaaacctaccgcagcactctcaagacccttcctggaactcgcctggcccttctcgcctcctctgaacctcagggcgactgcctgactgctgcgggtgacaagctgcagccgctgccccctccgctgtctccaccgccgcgaccgcctcccttgtcccctgtccccagcggctgcttcgagggcggcgcaggcaactgcagttcgcacggtggcaatggcagcgaccaccctgggggaggccgcgaattcttcttcgatcgccacccaggagtcttcgcctatgtgctcaactactaccgcacgggcaagctgcactgccccgccgacgtgtgtggaccgctcttcgaggaagagctggcattctggggcatcgatgagaccgacgtggagccctgctgctggatgacctacaggcagcaccgggacgcggaggaggccctggatatcttcgagacacccgacctcatcggaggcgaccctggtgatgatgaggacctagggggcaagagactgggcattgaggatgctgcggggctgggaggacccgatggcaagtctggccgctggaggaagctgcagcctcgcatgtgggctctctttgaggacccctattcatccagagccgctaggtttattgcttttgcttctctgttcttcattttggtttccatcacaaccttttgcctggagacacacgaagctttcaatattgttaaaaacaagacagagccagtcatcaacggcaccagcgctgttctccagtatgaaatcgaaacggatcctgccttgacatatgtggaaggagtgtgtgtggtgtggtttacttttgaatttttagtccgtattgttttctcgcccaataaacttgagttcatcaaaaatctattgaacatcattgactttgtggccatcctccccttctacttagaggtgggactcagcgggctgtcttccaaagcggctaaagatgtgctcggctttctcagggtggttaggtttgtgaggatcctgagaatcttcaagcttacccgccatttcgtaggtctgagagtgctcggacacactcttcgtgcgagcaccaatgaatttttgttgctgatcatctttctggctctgggagttttgatattcgctacgatgatctactacgctgagcgagtaggggctcaacctaatgatccctcagcgagtgagcacacacagttcaaaaacatccccattggtttctggtgggctgtggtgaccatgactaccttaggctatggggatatgtacccccaaacatggtcagggatgttggtgggggccttgtgtgctctggctggagtgctgaccatagctatgcctgtgcccgtcattgtcaacaattttgggatgtactactccttggcaatggcgaagcagaaacttccaagaaaaagaaagaagcacattcctcctgcccctctggcaagctcacctacattttgcaagacagaattaaacatggcttgtaacagtacccagagtgacacatgtctgggcaaagaaaaccggcttctggaacataacagatcagtgttatcaggtgacgacagtacaggaagtgagccgccattatcacctccggaaaggctccccatcagacgctctagtaccagagacaaaaacagaagaggggaaacatgtttcctgttgacgacaggtgattacacgtgcgcttctgatggaggaatcaggaaagtgttgtacagaatttatcatggatttttgcctgctgaaaatgggacattgagatttagccattccaaggattgtactggaaacttctgctactgaatgtgaccggatgtgaccggtttgtgttcagaagagttcccgcattctctgaggcatttaaagcttgtaaagaaatggtggctggaactgaaatggtgtttgccaaggaaatattctgcttgtcgacagaccagagtccacaaaacaactgtaaataccaacgtgtgcatgggtccacccttctcacagtctcatagcacagggagccacattcattgtcagcatctgtgaagcttcaagaaatgcccacaaggctctgaatggctcctctcgggctcatggtggttttgctgcaaattacagagggcagtgaatccaatgtagtataggtctgttttcatttcttttatttgtacattacgtgttgtatctacaaacaccgattgcctcattttcttgcaaaccacttatatatccgcttgtgaactatgttgtaaacttttagtgtctacatagaaatctaaccatttcttagtcatgtattcatttagttctggaacgctgttactatctagaagacagtcatcaccagtattcatagtttaagtcttttgtcattgttacctcaattataaatattaaaaatataaattctggcaatgagaatatttttttattaaatgatcaaggaaaatgtcagtatatagtagaatattatcaaattatatcctaaaatgtctattttgcataaaagagatattcttcaatcgattcctttttttcgtgagctttgtggctaatgaagcgtgtgtttgtcttcatcactgctgtagttgaaactgtgtaagagtttttcatcttgcttaatcaatatttccagaatctattagttcccctgggattctgaatatactctatagcctaattataaacccctgtatcgtgtaccttttgtgaccatctcaaggtgcatgcctaatcgttgtgataagccaatggacatgttactaactgaaatgaagaataaaagtcaaacgatctggggataaacttgaatcctatctgattaaatgattcctacccttaaaaaaaaaaaaaaaaaaaaaaaaaaaaaa

SEQ ID NO: 9807 - protein, 638 aa, Rattus norvegicus
  ref <308>: DATABASE ACCESSION NUMBER: SWISS-Prot / CAA44643
  ref <309>: DATABASE ENTRY DATE: 2002-06-15
MGKIENNERVILNVGGTRHETYRSTLKTLPGTRLALLASSEPQGDCLTAAGDKLQPLPPPLSPPPRPPPLSPVPSGCFEGGAGNCSSHGGNGSDHPGGGREFFFDRHPGVFAYVLNYYRTGKLHCPADVCGPLFEEELAFWGIDETDVEPCCWMTYRQHRDAEEALDIFETPDLIGGDPGDDEDLGGKRLGIEDAAGLGGPDGKSGRWRKLQPRMWALFEDPYSSRAARFIAFASLFFILVSITTFCLETHEAFNIVKNKTEPVINGTSAVLQYEIETDPALTYVEGVCVVWFTFEFLVRIVFSPNKLEFIKNLLNIIDFVAILPFYLEVGLSGLSSKAAKDVLGFLRVVRFVRILRIFKLTRHFVGLRVLGHTLRASTNEFLLLIIFLALGVLIFATMIYYAERVGAQPNDPSASEHTQFKNIPIGFWWAVVTMTTLGYGDMYPQTWSGMLVGALCALAGVLTIAMPVPVIVNNFGMYYSLAMAKQKLPRKRKKHIPPAPLASSPTFCKTELNMACNSTQSDTCLGKENRLLEHNRSVLSGDDSTGSEPPLSPPERLPIRRSSTRDKNRRGETCFLLTTGDYTCASDGGIRKGYEKSRSLNNIAGLAGNALRLSPVTSPYNSPCPLRRSRSPIPSIL

SEQ ID NO: 9808 - DNA, 31737 bp, Homo sapiens
  ref <308>: DATABASE ACCESSION NUMBER: EMBL / AL137790
  ref <309>: DATABASE ENTRY DATE: 2001-01-02
gatccgaggcttgcttctccgaggacctgcttacccacattgcctccatttcctcccctctgcctctctcttttcttcacttcccctggcttcttgccagggagcaactccgaggaagcctctgaagccccctgtggcctcctgcgtggactccctcagggtctttcactggcagcactgacccttcctcctccaggctctgggttttcctcttgcctctgctgcttctccttctctgactccctttcaggagactctccctcttccctgcattcagtgttggagataggagcaggcttttgcttcttatccctctgtaactacagccacagcctcagctcctgccagcacacctgctactcagaaagtctatctccagcttgtctctctctggctccaggctcatctgtccagcggaccacttggcatttcattttagatgtcttaaagacacattcagctcaacctttgtagaactaatgtcctgatcctccctgcccaacaccatcaacctgttcctctcccactgtccccatctccacctgctcaggtatgcaggccagagacatggccctcacctcggcctctccctctccagcatctcccatctccagtccatcccgaaggtctccttggtttgtcctgcgaagatctctccattggcaccacccagccccttagcaaagccactgtcccctccagcctggaccccagaagccgcttccttgaaggtctgctgaatccacttatttcttttggaaatgcacatgattgtgtccccacttctttaaacccctcggtggcttcttgggttaggtgctttcttagggtgaagacaggatctgtacaggcctttgatctaacttctctcctctcccagccctacctgtgccacccccacctcgtcctcactgcttcagccaccctggcaccttccattcccttttacacaccatcctctgtcctatctcaggacctctgtccatgcttcttcccgaatgttcttccctccccttgtggcctcgctttcatcagctttcaaatgtcagcttgaggaccccttcttctgggaagccttgcctggcctcccaacttgttcagatccccttcttatgggctctccaagcactgggtgcccagccttcacagcccttgtcacatttgcaatttagcatttgttcgtgggatcatttgaccaatgtgtctctctccaactagaatgtaaacttggagagcctgattgcttctattccccatggcctctgcatcgcctagcaccaggcctggcccacagcaggtgctcagagattgatggatgagtggctacatgtcattgccacagggaggccttgacaccttatacctaataagtacacaggggtgggctggggagagggtctcctcatagatgccaaggggcccttagatccttaaggcctgggttctgggctttcttggtggactaaagatggttttacttattttgtgctggatgggggaccttaatctcccctggagtacacatgctgtctgaccaggcagtcctcctgggtctccatttgtgcccaggccctgaagctcaaaggctcgactaccatcccccacctctttcccctcagcatgggggtgccgccctcagcctcactgctctgccagcgctctgagcttgccaacatctcagctgttggagtgctgccaggagttgagacatgcctaggaagctgctgagatgatggcaggtgggccctgtgtcctggatgttatttagggctgtgatattaaagacagctaaagtccagacggaccctagagtccaacacctcactgttcaggtgaggacttacccacaggtactcagaaggggcagccgggccaggacccacacagggcttgtcaccacagggaagtgaactctctgaattggctccttgcctccttagtctgtctggagtgaggtcacttaggttcacctcagcagcaaaggtcacaggggaaaatgctttaaagagtataggtgatagaaaaactgagtcaggagttggtgctggggccgggggcgggggcctggcccagaatatctatattttagttatcactctgccccgactaaccagctccattaccttgagcaagtcatttcatctttggggtctcagtttaccctttaaaaacatgaatagtaatccttgcttcctgcacccccgcaaaacacaaaacaccctgtcctgacgaggtcagcctcattctgttgggattgagtgccactacgtacaggcattacttgttgctatacatttgatcctcacgttcactccgagactctattactattcccttttcttcagatgagtaatctgaagctcataacacagtcagtgccacttaccaaaagcttcatagccatttaaagatgggagtcaggatttggatctggatctgtctgagactctaaagctctgtgctgggtccaaggcttggtccctgccccaaggaacaaacaataaaaggaaaataggttggaaaggggctttggaaattgctccatgccatcccaatgctgttgcagttcgggctcctgtcaggtgtgagggcagatggaagcttaggcggaggccctttctccaggaattgtctaggttctgtgcttcaggttgggtgatggtggggaaaagcaggcggtttgggttttttttcctttcatgaggtagaggagtttgaggtggagaaggcgtcagggagattctggtattctcagttttcttgtgctgctgtgcaagctgttcactgcaggactctaggaggcacctgtcacactgtagtccaagtgaatggcactctctagagctgtgtactacatgaccatatgtgatggccttgacgatgttccttagtatgatggctgcatgggaagccatggtagcagttaaattactatgtaagcactcagcatttatgttgtcttaccaagtcctcacagtcatcctctgaagttgatactcttgtgatctgcgtattggggaaactgaggctcagaggagtagggaaattgcccaagttcacacagcttcttaccactatgggctgctgcctctgaactctgttgaggctgagaaagggggtgtgcacatgaataaaaccatcccctctgtgtctcttttcttcctcctgccttggtcttctgccatagctggacaagatgctggacccccaggtgtggcgggaggcagctacccaggtcttctttgccttgggcctgggctttggtggtgtcattgccttctccagctacaataagcaggacaacaactgccacttcgatgccgccctggtgtccttcatcaacttcttcacgtcagtgttggccaccctcgtggtgtttgctgtgctgggcttcaaggccaacatcatgaatgagaagtgtgtggtcgagtaggtggcatctctcctcctgtccctccttctccctgtctaccttacctgggagtgggcaggggtgggggcgcaggtgtgcatggggagagaggtcccctccactcagactgaggaatggagatcagaggagcactctctgtccccagctccgggccacagggacaagctcagagatgcctctgtcagtgacccatgaggttcccacctgggtgcctgggaagagcctccaggatctcacccattgcccacccctgccttcttacctggtcctctcggttttgtgctgcaggaatgctgagaaaatcctagggtaccttaacaccaacgtcctgagccgggacctcatcccaccccacgtcaacttctcccacctgaccacaaaggactacatggagatgtacaatgtcatcatgaccgtgaaggaggaccagttctcagccctgggccttgacccctgccttctggaggacgagctggacaaggtgcggggacaggctgcccttcccaggacaggcaggaacccagagagcagctgtggccggcgggagcttgggctcaggcctcaggatgctgacaggtagtcattagtttacttggtaagcaaggatctgctgtgtgtccagagggagtgaaagggaagaaaggtattggccaaagtccctgcccagaggtaggcttgagcctagacaagaagtagggcagacacacacctctcagaagtcacagtaagtgtatgggacgatgtttccatttactgagtgggcttctcgtgcatcagtcactgccacaggtaatatactcagaacagtgccttgacatggtgtgcatcaaagaagtgttgaagttagtgtttgcccgttgctgtctatctcttttgacgctcaagacagctctatgagttgagtattcatattgttccctaccttacagatgagtagcctatgagatggggggcttgatcaaggtctcataactagtaagtcagagaggcagttagttgggtccaaatccagttagttgggtccagagcccatgctcaggatcacctcttgatgcttctgcccctccccaacctgtccccattccaatctcactgccatgatgactcttagactttagggtggtgctgggggtgctgactcctcctcagtgctcaggcccatgttaggacaccttgcttctatttatacttacatagctggacactttcaaaatgactgttctgttagaaggggtaacaggaaagggacatacccacagcatcttgggaaccaggctggagccaaggctcacatggggcggagccagctcccatcagcctgggtcaaccctgtccttcatgggactggggaagggggtgctttccctgggctctatgttaaaagtcagctccattggatggtaccatcctaatgctgagggagctgcatcctacaccccaaccctttccctgcggatcaagagcaaaagagcccaatctcgggcccactgccctggtttcttccccaggtaactggcagcataaaggacctccccttttcacattctctgaaaccctgctcagttctcatgggcatggcctggttctctgaattaaactaggtttatagcagtgttttcatacaatacaactccgatagcattcaaatgacaagattatacactcacttagtggggaagaaatgttcccttacaatcactgaacattacagggcaacgtgtaagtgacagggggcagtgtgtggtcacctgacccacaagcatggcccaagcattaaagcagtgattctctaccttggctacccattagagttcctggggtatttttgtttgttttaaaaaaaaactctgacacccagcttcaccccagaccaatccagtcattgtccgtggggtgagacccaggtgtcggtgtttctaaaggctccggtgtgcttccattgagagccgaggctgagaccactgcatgaagatctgcagttcagaagttctgagctgggagcggccacagtgtggctggagcaatcaggaaagacatcttagaggagcagggtcctgagctgggtgtatttctaaacatgagcatcttcacttgaatcacctaagctcctggtacaacccgtagattccaggtcccacaggtgaactcccaagttggtgtttttgagctacgtctaggggattccaatgcctgctaaagttcgagacccactggccaaaatcaacaggatttaggtggaggtgggaacccctgtgaaagagggaatagttattccaaaagtttgaagggcagagggaaggaagcagtgggctccccagggaggggtgacctcacaggccctgctttccaccccaccttcagtccgtgcagggcacaggcctggccttcatcgccttcactgaggccatgacgcacttccccgcctccccgttctggtccgtcatgttcttcttgatgcttatcaacctgggcctgggcagcatgatcgggaccatggcaggcatcaccacgcccatcatcgacaccttcaaggtgcccaaggagatgttcacaggtaactcctccctgcccccatgcccaggctctgcaggctgcccttgtggacaacaattccgttctggcttctgactgggtccttcatgaccccacacccagaaggctccaccccacactgggacacagctggagcctggctgtgccactcagtgattagcactcacaagccaggaagagaaagctacttggaaatctggagcaaacatgagccgggaggcctgcatctaggcccctttgttagttcacttgcccctctccccaagggcctgctgagtcgtcttgggaagtgggtgctgagtcgtcttgggcaggggcactcactggccttgcgccctgttccatctttgtcactccagtcccgggctgtgtccacagttcccttcggggtttgctgcgttgatctagggcccatagagggatacctctcatctgcatccctaaagcggggtatctttctgttctcaagtggggaaactgaggtggagaaaaagactggtaacaatcagatgaatcatttaagttaaatacagcaattaagtagcgcacctgccacgggccaggccctgtgctggggcagaggcatgggatgaaagttagacacaacgccttcctcaggtgctccccgactagtagagcggggctcagaacctgagcatctggatccctcgtgcaggactgagcctgctggcaggagggctgcaggcatgctttggggagggatgtgatgggaggggcctgggtgcccccgagacccccagggccctgcccaccctgcacctttgcccccaaaccggcctcccggctctctgtagtgggctgctgtgtctttgcattcctcgtggggctgttgttcgtccagcgctccggaaactactttgtcaccatgttcgatgactactcggccaccctgccactcactctcatcgtcatccttgagaacatcgctgtggcctggatttatggaaccaagaagtaagaggaacatgggggaaaggtgggatgggaggaggggtctgtcctatcatgactccctggagaggcagatcatagagtcacaatggcagagctgaaagtgcccttacggatcatttagggaaactgaggtgtagtgcaaggacatggctgcctaaggccacttgtccagggagaaacagagccagtctgaggactgggtgtcctgggtgcaggtcctggcatcatccttaaattaccacagcacctttcctgggtaccaactcttcagaactctgttaagtttttgtgaagggcttagtgggtctacaagaggcccttgccctccaagaacgtgtagacttcagcagcctggttcacaattgtaagggcctagataggggtatgagatgaggtatgattttggccccaagtttggggttgtgcagggtaagaggattcagctctaagaaaggattgggtctcacagcctaggcctagggcagttgtacacttactgtaaactcttggcctcatccctcatgttagggcaaatacgtgttcccaggagttctagaactaggtctctctgactcactcagcatcgaccatgaccacattgtccttgtccttggcaagacccacctccactaacccacttggtctgaccctccctgatgcctggacctggtttggcagtggggctctttcacaggggccgtctgcttcctaggagagcacaggaggggacagggagtggggggaaggacactcctctgcttccacctgctgtgggccagggctgtaagacactgccacaaaggactctggctgatttttgtgtcctggactccttcggcagtctggtgatgtccctgtatgttactttaaatgcataagataaaatgtgtagggttatataagaaacttattatattgaaaaatagcaaaatatcatttaaaatttgtgatatagtaatgtatgagcactttatttttaatgcattgttacaagatctagctatagatctaataacagtggtaactttgaagtagtgatgaaaatcagcgatgactcaatattttcaataactgggatgtaatatgaaaatatctgtaatctattggtgacagtcacaggtattgttaatactactgtgtttgcttgcattcataatataatagaaagtaatgcaagattttagttagcggttattgaggtaaagatgattcttttgtatgccattcaagcacaagcctgcctgccttccagaattctgctcaccccttggtgagaaacccctgagtcagggcagctctctacctttggactctagagaagtgcacttctactgcttttccagcagggggagccttcagccaggccagtgtgaaagggctaggcccctccctgaacacacaagctgtctatacataaaacagacgtgcacctgcccagggtgtgtctggtgggccctatcatatctctggatggggtatgatgtgacggaatcagaagaggttagaggaggacagtagagccttcccagaggccagccagaccacacacaatgagcactgaatgtgaagaatagaagagcccaggagggagggactgggaaacgaagactttctggaggagatggtgatgggggaagagggaggtgtgactgagggatgccaactgctggaccctctgctatgcctggcaggttcatgcaggagctgacggagatgctgggcttccgcccctaccgcttctatttctacatgtggaagttcgtgtctccactatgcatggctgtgctcaccacagccagcatcatccagctgggggtcacgcccccgggctacagcgcctggatcaaggaggaggtgaggggtggggccccaaaccccagggacatttgcatcttctcaggccttgaatgcaaccactgatagggatacacctttctagggcagctgctatgtgccaggccttgccaggtgcctcacacctaaaccgcaatcttacaacaagccaaagacagaggtggcatcatccctgtagcacaaacggggacaccgaggctcagaaagattaatgcacttatccagtctttctaacccatattctctctccatgcctgtggagtggaattagtccattttatagtaggagaaaccaccctagaccctttcaccaaggtgaccaggtaaacccccatccttggctgtgcctggccaggatggtgggaggggagaggagtggaaggccatgggtgagggcaggagagcagtcttggagggcctgggcggggagggctgtcacagtgccggcagcagcccttaaggcagcccacccgcaggctgccgagcgctacctgtatttccccaactgggccatggcactcctgatcaccctcatcgtcgtggcgacgctgcccatccctgtggtgttcgtcctgcggcacttccacctgctctctgatggctccaacaccctctccgtgtcctacaagaagggccgcatgatgaaggacatctccaacctggaggagaacgatgagacccgcttcatcctcagcaaggtgcccagtgaggcaccttcccccatgcccactcaccgttcctatctggggcccggcagcacatcacccctggagaccagcggtaaccccaatggacgctatgggagcggctacctgctggccagcacccctgagtcggagctgtgaccactgcccaagccctgcccgcctctccccccacgctcaacctgcccacttgtccaggcctggcctctttcttgaggtggccaccaggcccaggccaggccctttgcccaagaagagagggtctgccctgcctcactcccctcttcagtcccagtagactctgctccctagccctgagcaggaggctgggagcagctctgtttcctaattcaggaccccactcatctagccctccaagagcctccgccaaattgtagccatgtaattggaacaacccataaggcctgcttcccagtccatgggagattccaagtggccactgcaggagtcactcacctccctctctccctgtaacttgccacctgcagttcttagggctgtggggtcagatggtggtggtgagaggccttggggctggggaaggagagtggactttggctcactctgccatgagaacaggacaccatcctgcccagcccagacggggttgctcctggtccaagaggctacctgctccaaggcggagggtgggagcaggtgtgccagggctcagggctcagacttgggagggcctaggcagaagccccaagttctgttttctgaggtatgtgctgcccttggcttcagcatgagccttggtagcagaaggtgaggaacctcctctgccctggtccctgggtggaatcttcccatgtccttggccctgcctggggtgtgtggtgtgtgctcctgcatcttgtctgggagtgcagtgaccgggaccagaaccttccccacctcaattagggcttagccatctccctgtccccagcacccctccccagcccacagtggtggcctctgcctctttcctggagagagaaggacagtgcacggagaggtttccagagcacaaattgttggttcctagcacaaattagatggtttggagcacaatggtgaagcacactcccctccctcctcacctggggtccaatgttctgtctagtggcagcttttcccctggaacaggggtccctggagttcacaggcttatccccaggaagcctcactcctggggaaagacagataatttcactgcccctttgagccaccactcactctccttattacacaagcacagccgcccagtgtgcacatcatgtgcagacaccttggaaacctttcccaagccttcctggcccacagtggccagtgccataggcagtgctgtggacagtagaggctgccaaaggcaagggctggtcttcaggatggaggccagcctgtgcagaaggctgcagctgacaacagcgaccccacctgccattaccttcagggcctcctctggaagagaacccattctcagagtgcagccagggaggaacctgacccaagagtaaatgtctgcagagagatggatggatggatggatagatggatggatgggttggggagtgggggtggatggatggatagatggatggatggatggatggatgggttggggggtgggggtggatggatagatggatggatggatggacggatggggtgggggaaggaaggaaaggagggagaaaggagggaatactggctccatctttgagagctctggtgggcagggcagaaacaggccacagtgctcaacccggacaccctcacgaagggtcgcaagtcactcttgtggctcagattgctcttaggacctggagggacagaccagaatcagggtcccctcctttacccctgagttccttactgttcccccaagcctgggagcagtctatcccccaaccctgccatctcccttactcatccctcttccacagcttcccctttctagccccctctgccctacctgtctttcctgagtgtttgaggggagagagagacccacatctccccaaagagatgagcttttggggcacaacatcccaccgcagtccccctcacccgacaacacctcctacctggccccttgccaaatcccaagcagaattagcaacaggaaaagcagagccccaggagagacactctactatatatactcttctatatattctgtttctattgtatattcactctgtacatgtgggtgtaaatgctgttaaatgacaaacccaatattatactgtggctggtggactattttcatcctcagtgctgtacagatctattttcattgtatatttgatatatttttaattttgtagcgtgtggctgggccaggccccagcgggaggggctgagctggggctgtgtgcttgctaggtgtgggcgcgctagtgctcgttgtagccttttgctgtgtcttcgctgtgtgttagacgtagggcctagagctcggggtgtgtgtgtgcgtgctgtgtgtatggtgtgcacatacgtgagtgtgggtgtgtgtagcgtgctgatctgtgactcccagtgttcaccaccttcctgaagaccacgctccctccccctgcctcctcctcctcctcttggctctattgggagcctcagggccggcagggtgcttcgggagccccctgctacggggaaaggcatgtgtttcttgctggtgactcattgccttcacaccactgggtttgccagaaacagggaaggagggcgttaagggaaaaaaaaaatcctcaaatttatttaccagtcagcttcttgctgttcccagtagaatcgctagctcttctccagaggaaaagtactaggattcttaagatggcgagaccccaagagggatctcatagcactgctgcatttgccgttgacgcagtcctgacagtgtttgaaaagggccgcctgccccctccccactgtgcttttgatgcctttggagtcaaaggcaggtggggtcacctgatgagctaagatccagccccagaatcctggaggagcaggaggtagcaggagaggaccaggtccccaagtcccttcacagggtccccacccccactggctttggtgctgtccacacagtgcccaccagaaggcagagggaactccagggcagggatgtgcctgaaagagtcaacagtcccctgatcccctacctctgcctgccctccagccccatcaccagcttcttgctcagggagacttccgccctcctcactgaggcaacatgaagcccgaggcccagatgggggctgaacaggtagggcacatcagttaatgccagtgaggtcagcttctgccctccagcaatacatgtgcaggggttgctgctttcccagtgccaggagaacccccgctccgagtcagcctgtgtgggtcatgaggctggggcccaggagacacggtcccaggcactgcacaggcctgcagtattaccaggcggaggggctgcttttctgcccttcctcacccccacgccccaccccactcccccagagtactccccactgtgaaaagagctggaaactaaactggttagaatgaacctggctccctgagcatccctggatccttcaaataggccctgagatgtgaggtctgctgcttcactggggcccgatgactttggctgggggagggggcctagggcctcttctcattgaaagctctgctttatacagacccaagcatacacaccaggccgtcactttgggttctggcataagttcagaacaattcaagtccatgtgtcccatggctggtcagagccctgggtcaaaaccactcagcccaggggaggggatgaggcattgtcaccctagacccctcttcctctctcccccaccatagtgtgcaataaagtgtctgttcttaccaaacccttcttgcctttctcacctgctcttgcaatgagggagagggaagggtggccaaggatcctgcgggaagctttggggtgaaaagcttggactgggatgggtggacaggactgctgaggggggttgtgggtgctggctggctgaggagcagcgcggggagtgtgcacaggttcatatctgtattttcctatgaattgtcctaggtattaacaatgcacacacttgtagagggccctattggggtccagcgattccacatgtctaatttcctgtcatctttgcaaccgtttcctaagggagaccctttgctggctacatttttccaggtgaaactgcatctgaaattaggatggtatttggtggtctcttacaggaccctgtaggggaaactcctgtcccacctgactaccaggaaaagctatacttgtcagcctggcaagggtggggtgtgtggaggcccacctcagggaaggacaggggtgggaaggtgccagtgttgagaggtctgacagcaaggaccaggactctcttgggtgctgggttggggggggggtgggctcccctggaacaggcatattctaaagttctgcccctctcttcaagatagctatccctcttgcaaacttcagtagaaggtaaagacgaactaggggatctgacatcacctctgttctaacattccagccccaagtattcatttattaaacacccactgaatactcagcactgtgaagaacggactgtgctggtggctgggaagctcttcttcctgcctcaccctctaggagcaccgacattgaaagaaacaagaagtctggctcctggaggaggcctcacccccaccccacccagctccaggctggaatgatgctgcttgcactcagacgcacacagccaaggaccctgaaggaacctgccattttcttctcttgccatagaaagtgttgttccaggaatagccaccagatggcaggaaaacctttctcgccagatcatagtctgcttgccttcctctctgtcatttattcctttgtgggttagtttatttgttgaacaaacatttattacgtacccaccctggacaggctccatgccagctatagatgaataaagataaaatcagcccctgctgtcctgagtttggcagagggaggggaccggccctataactccacatctccccatgtatctttcaaaccaggaaatggcctggtgctgaaagtcactccttgtcaagtattcagtcttttggttgaaggtaatgtttttggttgagatgcaagccctcttgccaggaggggcacacagatccaccaagatgcagcataacaagggctttggttccaaggagctctagagtcatacttctcaagttcaagttcaaatgccacccagcttcctgcttcctgggaggccttgagcgagtcatttaatcgctctgagcttaaatgtcctagtctgtaaaacagacataataaatagattcaatgagataacacatgttggtccagttatctattgctgtgttccaagttactccaagtctgagcggcttaaaacaaccattctatctcgcagttttctgagtaaggaattcaggcaggactcgtctgagcaactcttctggtggcaaccaaggtcactcagtgatattcaactagcagcgaactagtctggagggtccaaggcagctgccctcacattcactcaaatgccgggcactccagtgagaatggctggaagactgagttcagctgggcctgccggccagagtgagcacctacaactgcctctccagcatggctacttggccagacttctgactgaagggcttagggtccccagagagaccatttcaagagacaggaggtggaagctgccaggtttttaaggcctggggctggaaaatggcacagtacctctaccatcttctgtgggtcacagcatctgcccaaataaaggggagggcacacagaagccccccttgttgatggggagtggggagagtctggctgcccatgtaatgggctgattctagagtgttagggatctttgtcatcagtcacctgcacatgcatggaagccttctcctgaggggatgtcagcttagagacacagaactgggacacacagcaggtcatttctggtggggaggtgagtggttaagtttgggccctgggtggagggagcagtcagaggaggatgagaagggcatgcaggaggacaggtgaggccactgcttctgcctcaggtttgccccagggcaggtggcatgagtggtttgaatcatgggtctgtcgccaaccataccaccttggggaagccactttaaccctggaatctccattttctgatctgtaaaaggaggacgacaataaaatctcttccttagagatggtatgagggaaaaatgaacttcatcagtaacatctactggaatacagtatcgacttctttccatatggggatacaataggtgctcattaaatatttccttccttccttcttgcgatcctgggcaaggccatggggcctacttcattctgggggccccatcacccatgcaatgagccatctcctaaagctattcacaaaggacagtttcagcctaaaatccagagaagccaaggaaggaaggcagaaaaggaactctctccaggaaagggagtaccagagtgtgggggtctcactgatcctgtacattatcatgttcaccccagcagtcaccaccagacagctccagtcatagggacttgggccaaggctaaagtattccacagaccacaaggctattgtggggttttgtttttgttttctttgttgttggttggccccaaattctttttaatacttctcccatcaaaagtggagtctatgctcctcctcttgaatctgggtgagcaaatgcttcctgtgaccaacagggtatagtagaagtgatgctatgtgacttccaaggctagattaggaaaggccgtgccacttccacctggtgttctagggatactcattctagaggcagccagctgccatgtaagacagccaaccaccctgagactgccatgctagggaggcgatatgtttgcagatgcttaggttgacagcttcagctgagcttccagccaacagccagtgtcaactgccagccacatgaacacagcatactgaacgtttagcccagctgagcttcagatgtttgcagcccgctgacatctgattgtagctgcataagagaccctaagcaagaactgttcaactgagcccttccttatttcctgacccataaaataataaacaaaataaaatggctgttgggtttatatcactacatactaggggtaatttgtttcataacaatagtaaccagaatatgaaccttagtgattatctggtcaaacctccttgtacaacaatgggggaaacggaggcccaaagaggaaaagaccagacttcccacaaccaagcaaggggaagatcggggccaatgcctgggtttcttgactcccaatctagtgcactctctgccacacagcaagaaactgacagggaggactcctcccccgccaccccccgcctcattaattccatgcatcaagcaagcatgaatcaggtattttgagtgcctgggattgtgctgagcactgggaatatacaaaggaccaggcaagagtccctggctcgcagaggcagtcacaatctgacttgggcatctcccttcctggcacactcactggtgccaggcacgctgctgcattctttaattacatcatcttaggtgggaagaaaccttgagatgggagaagactatgcctgtcattcaaccacaaacccttacaaagattgatccatgccaggcacagtcctggctgcagagcataaagactcagtggggatctgctctctgtccctgggtctgagctgcctgggttctgggtccctccattctgcccagggctgacccaagcagggaagaatccctggacttcaggagcacccaagaggaacctgagtttggcctgtctctccagacacctgcttcccctttccccaggatattgctggaggggactgggcccatcaggactaattaactcctctaatggaatgaaccagtttttcctggaacttagcccaggtgggagcaatctctacttttctagatggagaaatgctaagtgtcaagaggtcttgccagccggaccctgggctagcgtgcatgtggcaggcgcggtggcgggagtgtgctgtctggatgcaggctgagttcccagcccaggagccttaaacaaggaggcctctagggtccactcagctggtggcccccgtatcgttctctgtccttggcccaacaccagccctagctccgtctctcagagttcgctgctgctgcttaggcctgacatccctaagcggggggaaggtgtccatgagctaacactcaggtcccctccaaccctatgactccaggtccatagtgtatgaggccctgagccctgcccaggcccgagcttctgatctcttctctttaagagctgggccttcaaaggccacctttgagccccagatacaacttcactgggattaccacagcaacccaaccctgctttcagtcctgaggcagagccattctactgatcttcacaagacctgaattactagggctaggttctccccagagcccctcccccaccaacccccctccccccaaagaaggctctcacatttgatttggagcctgcaagtctctgcaggctgcttggggttgggggaggcaggatgaagtgagctgagacgcagacaggaggctgccagcctgctcttgccttcccttctcttgttcccccatgagcggggaggccctatcaccctctaatgagtctgataaagcaattcaattttccaggctgggagagagtgaggcatgctgggaaaggatgctggctccttggcctggacctgaaggagggtcagtccctggcaggagctagaataccaaaaagggaaagtgtgagcaccaatggatagaaccttgccttggcctggagcccctcaccacaaacaggtttcaaagaaggaagatggagaggagattggatggctccagtcatcctaaagaggctgagcccatacaaagctcccagtggggaaaggggaagggtaaacggctttgatttcaggctttcagcttcctacggacagggtcagcgtcggcactcagagggtgaggaccttattatgcgggtggagggggggcctggaaagggtgcaggtgcttgacagcctccatcggtgcccctttagaatctcccatggccctctcttcctattctttcaccacaccctcacccctgatgagggaaacccgctgtggctgacaccttctgtgaactggctttcagacaggtgctcttccctgacagcctgaagaagccagggcactaaggagaggacaaaagagaaaaggtgaaaatgagggaaagaagcttggggaactaggaatttccaatagtggctgctttgtggtcttgcttaagcctgtcaggtatcaaggtcttggaggaatgaagaagggagggagtaggcagagtcccaatggcagagttaggctagaagatgtacctgaggtcctggaatcaacaggaagcccagaatcagctgccaccccatctgcccacatcacagcccccagagctcagggcgaggtctggagccaggatgttctagcaccaccagagggcagcaccctcacatccatggtaggctgtgtcacagtagcctgggcagggggctctcctatccttccccggctctgtgttttgagggaacaccaagacctcacacaaagaaatgatggggacaagtcccatagtgctaactgcagcatatcgactccctcagagaggtacacgtaacaggtgagcccagagttctagaataaaccttcagcaagggtgaggcattctctggaggcctcaggactgaggctgagctcccctctcccgagctggtcagtgcacagagctgggagtcctggccccatgcacctttacccagctgcctctctcaggctgggccctctgtttttgtcagctcttcctaggttcctatgcctgtgtcccaactttctgatcttcctcccttccctcttggcctcctttttccctggcagctttctccctttacccatctccccaggtgctcatcactatccacaagcaccgcagagtggaagcaccagttgggcagatttactaggatgagtggctgttttattcactgatgtatttccagtacccggaactgcttctggcatatcgtaggtattcaataagtgttcattgagttaataagtcaatcaggggtgggatactatgggttttgtccccttgcctactacactccctttgttacaattactgagctcagtcatcctgatgaacggaaagcaggggagagaccccaagggactttgccaggacacggaccagataggacttgaaagttattcattacattaatattctgtggttctttcttcctcactccagtttctggcctgtcccgggtcttctcttcccagtcacacttgggatatttcttttcactgcagcaaactcaaagacagctaaactctgaaatacaaacatcagtttcgaggagcagggactgggcacaaagggggtgccagtaaatgtgtgtttctgattaactcacctcccctgcgtgtcagtacagatcatcaaagatcattgtcattttggttttctggcctcattaataatgagacttttgcttgtaaaaatcccttgcattggcactgagcttttaacctttcctgagacacacataggcccttgtcttgtttttctcagttgagctaggtactgcctgatctggaactgggaaggtgcacaggtgtccagggcaggtgtgtcattcacctttcatttctgcctcaagatctctttacatcatccagacaggcatggaggctgcctgaagctgtaaaaaagaaaaaaaaacccaatggggattaatatgaagatgtaaaataggttctggacttaacaaaaacaaatgaatctggaaattgctcttgggatagggccagtaaagtcctgttggtgcctacgttttgggtatggcagcttctcaatcacttagcaaacaggttctcagaggcaggcactgtgggagctatcaagatgaaaaagcacaatgccgcctgcaggagctcagggttagggaggggagaggagacatatacacaggcaaagtcaaattgtaatgggtagaataagagtagaaacaggaaggggtcatgaggcaggacacgggcatttcctatgtggaccccagagcaatgacgagcaaaggctttaactaatgacttttcagggccacccacccactccacatccataaaacatttcgcgatgaacacagccagagctacggtttccttccatccggcacaagaagcgcttctctgcccaaggccaccccgtcctccattccatcgcggggactttggtggctgggacagaggcggagagcatcaagaccatgggtgtcttgggctacgttgggcctccgaggcgcaggatgcggggcggggtggtcagaaggccccaacacggtccctgggaaaggagagggcagcctgatcctcgcgacagcgtctctaccctctttcttccttggccttccgtcagccgcagtgaaacggcaacagtgcgaccagcttggcggggagggggcgagggacgaagcaagaagagccgggcggaggttagaggtcaggggtcgagagcgcttcggtgtcagcgggctgcggtgggaggagctgcgggcccgggggaggcgcggagcagggctgaggggggcgggaggggttgccggcggaagcgcgcaggggcggcgcgctgggctgggcactggcggcgaggaggtgacgcgcttggttggggctcggctccggggaggaagactgcgctcggtcgccagggcctgcagtgagtcggatcggccccgcgctgcgccgcgccccgcccaccccgccccgcgaagggcgcgtctgggcgaggcggggccccggaggaaaaggcgccactggggcgtggcggccgctgccagcgccggagggagaccatgagcccctagggccccagcccaccggcgccgaggcgccccctcccctatgccacctcgcgcccgccccctgccgcgcgcgagccaaggccggcgccccgcccggagatgggcagacgcgtagatggcgtggctcccagcgccgccagatcgcaggaaccaggcgccggggcgttgcgctgaggctccctctccgcgcggcccgggaagcctgcaggtgtccttggccgctcggccgccgcccccggtacaccttcgccagtgcccagagcccggctccccagagcggccccgccccccaggctcggcgccgcgcaggacgccccgtctgaggcacccccgccccagcgcggcccccgcagcgctgcgcccggtccggcgcagctcccagccgcggacgcaggacccgaggctcgctcctgcgggcgcgcttgttttccagctgccgcctcgccctgcgcagcccccgcccgcccggccgccgctctctgctctgccccgcctgccttcctcgcccggcgctggatttatgaatggggggaagaggccacatgccgccgccgccgcctcgtgttgaccgcaagcagcccgggcccacggagctccggctgccgtgagagtgtcggcctggccccggcagccgctcggaggacttgttgctgctgcgctgccgccgctgcggggaagccggctattccggggcttggtgcggtcttggagccggagggtggcccgtgtgagcgcgagcgccccggaccttcgcggtgcgcgtggactgtgcgcttcctcgtctttggtcggggtgaaggcgggggcgtgtccccggcccagagcgtttgtgtgtcccgtcgtagcgggggaccgcgtgtgtgcttgcttctacttccccgggtcctccctctctgcgcctccctctctccggagcttcctgccctaaccccaaccacctgtgtaccggagaaatccaactcctcccgctccgcgtcctagggggataggcaggggcaagcccaagccgcagagggggccgccaccgcctcctgcctcctcttcgtctcctccccctcccccgtctgacgctgcctcctcgggaagggtgtttggagggcagcggccgccccaagccggagccccgcagcgcttcttatgatcagctcggtgtgtgtctcctcctaccgcgggcgcaagtcggggaacaagcctccgtccaaaacatgtctgaaggaggagatggccaagggcgaggcgtcggagaagatcatcatcaacgtgggcggcacgcgacatgagacctaccgcagcaccctgcgcaccctaccgggaacccgcctcgcctggctggccgaccccgacggcgggggccggcccgagaccgatggcggcggtgtgggtagcagcggcagcagcggcggcgggggctgcgagttcttcttcgacaggcacccgggcgtcttcgcctacgtgctcaactactaccgcaccggcaagctgcactgccccgcggacgtgtgcgggccgctcttcgaagaggagctcaccttctggggcatcgacgagaccgacgtggaaccctgctgctggatgacctaccggcagcaccgcgacgccgaggaggcgctcgacatcttcgagagcccggacggaggcggcagcggcgcggggcccagcgacgaggccggcgacgatgagcgggagctggccctgcagcgactgggcccccacgagggaggcgcgggccatggcgccgggtctgggggctgccgcggctggcagccccgcatgtgggcgctcttcgaggatccctactcctcccgggccgctagggtgagtggcaggagcccgtgtctccccatcttgggtctgcaaggggtccgtggtgggtggtgggtaggggccgggaggagcagggaccgagcctgacttaccttaccaccgcagattgttcccgccttcctctcaacccccctccgtggctcgcaggggaattacacactcccaccctctcccctgcacgctccatcaggagattgcacacacttgacttactacttggacccagtcccagctgcctgctttgccgcatcccctccagtgagtggggtgcccagctcagctcctccacccccttctttggtctgcacaggctgccctatcttcagctgccctccactccacacaggactacggtcctggaagagctggaatttggtcttctgatgggggcaggcagggttgagaggaaggaaactagggtgggttttgttagatgcttccatgccgtgccacctcatttacatcctcccagcagctcagtgtgctcacaactatgcacttcagagaggaggatataggcttcagcatcttaagctcagaagaggcaaagctgagaccacaatccggcctcctttccaggtttaagaaaggcattctttctgccagggaggataccatgcccctgaggcttcctgcacacctgggatgtcctggcctcagctggggtgagaggagaattaaacacgaagggcctagcgttctaggctctgcaggctcccacggccagtggccagccacaggcttcctggtgatgataccagatttttgttgccgcttcttttctttctgctgcagcacaaactgtctttccagaaagccctggttcaggttactgcttgaaatgggtgtatgagggaagggggaagcacaggttgatttaggcaagacctaccgcctcctccccaagtaaatccagtttccctaactcctttaggtgaaaggggagaacgggggaggtgcttcccccattatgcttcgacagctaaaaaaaaaaaaaaaaaaaaaaaaaaatccctgaaggatggctttagattctttaaagaaagaaaactctgggggctggtgtcggatctcatggtcagcagcctaaagcctggctggagtctgtctgggagacaggaaagagcaatgtaacttgttgggtctggggactgctgcttgctgtggaacctggttggttcctccagcatcccaaattgtcatgttaatgagtctcagagcaccctccctttcccagcacccctgtgctggactccttcctagtcatagaagaaggcagggtagggaattggggaacaggcctgcagggaaaagccaggctggcataaatgccaggccagggcagatgcatcttctgcctggaagagaagggaggagcagaggtctcaggggccatggcataccgggctggggctgcaggcagccacgagaaggcagggatctttctcaggactgacaacaaagctagaggcaactgtctgggtttctttccttgcagccctgagactggctaagaaggtgagggcatagtgatgcccctggcctgggtctgctgtgagttctacagacttctcatgtaggtcactaaccttgctagtgttagcacttggctgtctgcattaggggagagagggcaggcacacatcattcagactctttcaaagttgggggtcggggaggagagatagagatagagatggggaaaggggacaaaccagggaagcagggatgagatgaggtggttaggggagctaggccctatttctgagcattctgggacttctaggggcttttcacctgctcttcttcccctctggaattccaggtggcaccccacatatcattgagtttattttcttcctaactcactgctgaatggccaagccagggggcctctttgagtaagctcagagcctggcctgcccctggaagtcttcccaggaacccagggtgctttgcccctttgacatggaatcacatcagcccaggcattccagttgaggtcttgaagtttatgatggagcaaggttaattcttccatttaaacattgagaaaaccaggattcagagacattaagtttcttgccaaagacatttaactaatagcagaggcaggaaaccacccctagtttccagccttctggttgttcatcctgatgtgaatatctggatggagctctggccaacacatgcactaaaagaggacttgcctcctgctcaggagcccaggcaaaggcaaccctcacctgctcccgggacacacaagtgggaatacataatttttacaaattaatgaataactgctcattattgagcaccccagacagatacattgctgtatatactttacattaatctctaatcctcccaataaacttaaaacccggtgattatccccgtttaatagattgaggctgtgagaaggtaaacaacttgcctgagatcacacagccagatagtggccaggctttgaatcaaagccagagtccctgactcccaagcccttgctcttgtgattacaacaccttctttccactgaactaggctgtttttgaggcagagagcttgtttcttactgtagcctgagaaatgtccttctgaggttctgtacctcctgtggatgacatcagaaaacccaggggcagatggagacgtcagaaggaagacttactgtattacccctccaggcctgagggtactatgccatgcggggagttctggggctgcactttcccccctccatttgcccctggcttgtcacactgtcccatccttcccagccctgttccccccggtatatgtgctaccttccctcgctcacagctacctcctccctggaagggcccgcagcactgtggggtggtgggcgaagagggagagaggagcagtgctctgccctgaggcgtcctttcgcacacagcaacctggtcatttgagtagtgcgttatgacaggagcaaaacgatacaaatggaaagtgaactgagctgattatgagagcctgttgcctagctacaggcctggcccaaggagctgttccgctcaggcaggctcctggactgggatgctcacccctgctccactgtgctgggcccatgggcagctgctgctgtggttccgtttctgtggcctgagctgggaacaggtacgaggggcagggcagagtgaaggctcaccgtggagacttcacagcctcagggggcccagtggaggtttggcagcatccgaaactttagaaacctgcaccttcttttctgagagcagacaagaggcctggagaatggggccaggatgcccttcccctaccctagtctccaaggtctccagggcagggctggctttagctcagctatcagccttattaaggattacagttcctctcctttggctaaatcagcacatttttcctgtgatgtttcccttttgagtagaggaggggacccacaggaactccctgctccaggaaggcagctccagcagggtcttcccctttgttaagtgtcagttactatgtgggaggcttggcctgtgctttctgctactactcatctggcctaggtgaggcagatattgttaacatctgtgtatcagtatacagataaggaaacaggcctggtggggctttctcaaggtcgcaccacttgtggtagaactaggatccaaacctaggtctcatcaatctaagtctgtgctcctcctatggcctctggctcctgcccagagaggatctctggtttccagagggtggcccctcactggagagcttcttcctccactctgctcttatctgttcctttacttctcactccccagaattggtcaaggataacctctcttctcactgtgggatttccataggaaaaatgaagggaggcgtggctgggagaaaagactaagggaagctccctggcccaggcagagcatgaaaccaaggccttctaggaaaggagcagagctgcattcctgcctgcccgcttctgaagttccctggcttctctggtccgggcattgcctgggggacaggtcagtgatcacgacaggctttaaagtgagggccaggactcactgatgctgtgccctctgagctagggtgaaccaggaacctgagcccaggagggcagtaccctggctttctgagctccccaggagggcagtgccaagcctgcccggggcagcccctccacctccttcctgaggagcaggcaggggccaggctgaaggctgcaggactccctgcaggccctgcccgcagggcatcctcccagtttcctcttgggtttgttttcttctcttgttctgaacagatcaacatttgtctctgaacatcttgtctctgaatgctgaggtgtttctggttgtcacattaggggtggggtgtggagtagggaaggggagaaagtaaacgagctattttggagactcgggggaagagcaggcaggcaggagcagagccaggcagcttggccttgagggtaggagaccctgggcccttcacccccacccatgggcagtgtcagcctgggatgctgggcaccagagctctgtgcaaccctcattccctgtgcgtaactgacttgccatgacctctggccctgctccctgctggaattttcttcaggctaaggggtggtcacctggcccctagcaggggtccttatctggaagtggacctggctcgctctggagggcagcagaggtcctagggccccagcacctagaggtattactgggcatatacccttgtcactttgtcccagtcagtggagctgatgacctcttcttctgacaggctcatcaggaccaggagagagagcagggggtcaccttggccccagtcattcagaaaacacttactgcgtacttaccatacacatgtggggttctagaaatccaaagatgagtcagagggggccatgctcctgacaaaagccaagtcgggtagagtaagtggcagtcaagggaaattaggtgacaagaaatggcaacagtaatacaagacggatcatgagaggtgccacaggagtcgtaagaaaataaagttcaataggaagtgagaggaggaatcaataaatcccacctctacgtgggatgaggtgtaggaggtgttcagagaggcttccacaaggaactagaagttgaattgggtgggccttgtaggatactgacttagtgccttaaataattttttcaaagagtcacattataaatacatacataaataaataaaatttccatgtgggtagagctaaaccatatgcagcgttagggaaagggggaattttctggtcaggtgaccagctcaagcagagcttggacagtgtggggcctgggtgggcaataaccaggaattccatttgactgaatagcgggttcttggatagtgatccgggctagactgaattccttctggggtagggactcatccgttctgggcaacccagaggccctgagaggccccaagtgctggctcgtcggagggtgagcataggtagaggtgggttctggacactgggaccagaaggtcctggctcagcatggggtgggggcagggccaggtcctgttcctaggggcacccatggaggggagaggaggggatgtttctctgctgggacctaggccttagtgcgggccctcaaccaggagccagggatagctcagagatgctttgtttggcagaccttctcatttcctgcctcttacccccgggactgccccactgtcttccagcactgcctgggcacaaggatcttgcttccctggaaggctcagtccctcagtccctcaccccatccccacagatcttactctgccagtgtctttggctgtgttctcaattttcccttctcctacacttcatccttaatataggtttttgggcctgagtctccttatgtttatctgtccatctgtctccctggcccttcttcctgggctctcctcccctgcccccgctgattgtatgcagttcccaatgattggtgtctgtcacctctcccctcgacccagcctgtgccagattcctggaatgctctaggctttgtgctgagttttacaagtatcatttctttgcatcctcaaaacaactgtaccaggtagatactaccctcatcccctcaaacatagcaagcagattgtagcctcaggacctttgcactactcatcccttctgcctcgaactctccggttcttcgtatgactcactccttcactcttcagggctgttcaggtgtcaccttgtcattaaggccttacctgacctctctattggaaacaactcccctatcctcccacccgttatctcctttttctctttattttttttcataacccttagaccacctgacatactgtgtattttgcttgtttatttgttaaagtcggcctccactagaatgtaaggtcccggggcaagggtggttgtctggtattttcccaaacacggtgtcttgtacttggtaggcgctccctttttcactttataaatgaagaccttaaggcttggagaggttaaggaactcatgcaggtctcatatgcagtcagtagcagagcccaacttgaacccagaagtgtgtggctttacatttctagggacagtccaacggtggggttggtggaggaggatggtaatagggctgaacaactgggcctttggagaggggtgagttttcaacaggacacaggagcccagggggcgcagggagttgggaggagaggcgctctcctgcttagaggatgggagcctgctgtccagggtgctgagaccctcctgcatcctcccagcaggagaggagctgcccctggtggagccagttcaccggcagttttctacttgggaagttttgccttccagcagaatccatgccctttgtggtggaaagaactagcagcttcagccatgaaaatcaggacaagcaagcactcctccctgggcctcagtttcttcatctgtaaaacagcagaaatggagttgaactggataactttctcagtctccgtttttcacttctaaaaagcaaagattctgtggtattttggctccagattcggctcaccttcaaaagctgcacgcagaggaccctaaccctcctcaactcttatctccattttatggagcacctattgggtgccaggcatttaccatgtagaagctcatttaatcctaccgtaacactgtgaagggggtactagtactgtccccattttatatagaggaaacaggtgcagaagttaccattcatttacctggttgagtggcagggccaggatgaggaatcccggaagtctaaacccgggcccaaggcttctagtgtagggttccttagctgttctctgcccttagtctgtcagcacaggggcccatgagagggaggctcggatctccactgccagctctgtaggatggcaggatggtccagtggggaatgaatagaaggctcaaggctgaggctttggcctctaagcagggtggtgttgctgcaaccacctcttcttcccttggccccctttagtgctaggaagccctagtcaagggagctgtgtatccctgcccacagggatacacagtggatacacagtgtggacaggtgaaaaggcctggtgaaaagcaccatttgcaagcagggtcaaccacttatgaaataattcagtttggggagcaacatagggcagaaaggaataatttgggccctgaaggggaacctgtaacctcaggacccacctggagcaaggtgccacagctcaggccgcatctctgtctccttggggagtgagggcttcttggggcctgctgagtgcctgctgccccagccctggagaggccacagtggagattgaggccccaccaaggtttcaacaaaggaggaggggattatacctacctgctcggtcagaggggccaattggaaagagctttgagctgagagtcaggagacttggcctcagtgtgatcctgagcaaatcatctgccctctcttgtgcctctatttcacttaaaaaatgggcacacatgaccactctttagctcccctcctcttctcagggtggaggtgaggggtagcagttaatagtagatggaacagttctgtgttttgaaaaaaagcaaaggtgaatggacagacaggaatccagggggttgttccctaatccaggatgtggctggtgcccacggggcctgaaggactctcttgcctgctgcagaatgagcccatggtggtggcagttgaggagggtagcaaggcaggctccctggccctgctatgagaggatggccggggccatgccgccctccctccctccctccctctgctcaccctcttggcagctcttcctgaactt

SEQ ID NO: 9809 - protein, 606 aa, Homo sapiens
  ref <308>: DATABASE ACCESSION NUMBER: SWISS-Prot / CAC19684
  ref <309>: DATABASE ENTRY DATE: 2003-02-01
MISSVCVSSYRGRKSGNKPPSKTCLKEEMAKGEASEKIIINVGGTRHETYRSTLRTLPGTRLAWLADPDGGGRPETDGGGVGSSGSSGGGGCEFFFDRHPGVFAYVLNYYRTGKLHCPADVCGPLFEEELTFWGIDETDVEPCCWMTYRQHRDAEEALDIFESPDGGGSGAGPSDEAGDDERELALQRLGPHEGGAGHGAGSGGCRGWQPRMWALFEDPYSSRAARVVAFASLFFILVSITTFCLETHEAFNIDRNVTEILRVGNITSVHFRREVETEPILTYIEGVCVLWFTLEFLVRIVCCPDTLDFVKNLLNIIDFVAILPFYLEVGLSGLSSKAARDVLGFLRVVRFVRILRIFKLTRHFVGLRVLGHTLRASTNEFLLLIIFLALGVLIFATMIYYAERIGARPSDPRGNDHTDFKNIPIGFWWAVVTMTTLGYGDMYPKTWSGMLVGALCALAGVLTIAMPVPVIVNNFGMYYSLAMAKQKLPKKRKKHVPRPAQLESPMYCKSEETSPRDSTCSDTSPPAREEGMIERKRADSKQNGDANAVLSDEEGAGLTQPLASSPTPEERRALRRSTTRDRNKKAAACFLLSTGDYACADGSVRK

SEQ ID NO: 9810 - DNA, 3120 bp, Rattus norvegicus; identical to SEQ ID NO: 9806
  ref <308>: DATABASE ACCESSION NUMBER: EMBL / X62839
  ref <309>: DATABASE ENTRY DATE: 1993-01-14

SEQ ID NO: 9811 - protein, 638 aa, Rattus norvegicus; identical to SEQ ID NO: 9807
  ref <308>: DATABASE ACCESSION NUMBER: SWISS-Prot / CAA44643
  ref <309>: DATABASE ENTRY DATE: 2002-06-15

SEQ ID NO: 9812 - DNA, 31737 bp, Homo sapiens; identical to SEQ ID NO: 9808
  ref <308>: DATABASE ACCESSION NUMBER: EMBL / AL137790
  ref <309>: DATABASE ENTRY DATE: 2001-01-02

SEQ ID NO: 9813 - protein, 606 aa, Homo sapiens; identical to SEQ ID NO: 9809
  ref <308>: DATABASE ACCESSION NUMBER: SWISS-Prot / CAC19684
  ref <309>: DATABASE ENTRY DATE: 2003-02-01

SEQ ID NO: 9814 - DNA, 3146 bp, Rattus norvegicus
  ref <308>: DATABASE ACCESSION NUMBER: EMBL / X62840
  ref <309>: DATABASE ENTRY DATE: 1993-01-14
ccactgcctcctccgcagccaggccagctccctctcacactaggcgccttaaagaccctaaggagcccgcgcacacacccctggacccgcacctgactgacagctccccctgagggggcttggctcgttggttggggtgggtggccagagccgcggtcctctgtgccccccgacggctggggggaggggggaagaggccctgcgcccccctccccgtcgccaactccccctggcggcagctcccatgggtgtcgctgggccgcgccatgcctaagggggcgccgcgatgggccaaggggacgagagcgagcgcatcgtgatcaacgtgggcggcacgcgccaccagacgtaccgctcgacgctgcgcacgctgcccggcacgcggcttgcctggctggcggagccggacgcccacagccacttcgactatgacccgcgcgctgacgagttcttcttcgaccgccacccgggcgtcttcgctcacatcctgaactattaccgcaccggcaagctacactgcccggccgacgtgtgcgggccgctctacgaggaggagctggccttctggggcatcgacgagacggacgtggagccctgctgctggatgacgtatcgccagcaccgcgacgctgaggaggcgctggacagctttggtggcgcgcccttggacaacagcgccgacgacgcggacgccgacggccccggcgactcgggcgacggcgaggacgagctggagatgaccaagagattggcgctcagtgactccccagatggccggcctggcggcttctggcgccgctggcagccacgcatctgggcactgttcgaggacccctactcatcccgctatgcgcggtacgtggcctttgcctccctcttcttcatcctggtctccatcacaaccttctgtctggagacccacgagcgcttcaaccccatcgtgaacaagacagaaattgagaacgttcgaaatggcacacaagtgcggtactaccgggaagcggagacggaggccttcctcacctacatcgagggtgtctgcgtggtctggttcaccttcgagttcctcatgcgtgttgtcttctgtcccaacaaggtggagttcatcaagaactccctcaatatcattgacttcgtggccatcctccccttctacctggaggtgggcctaagtggcctgtcctccaaagctgccaaggacgtgctaggcttcctgcgcgtcgtgcgcttcgtgcgcatcctccgtatcttcaagctgacccgccattttgtgggcctgcgggtcctgggccacacgctccgtgccagcaccaacgagttcctgctgcttatcatcttcctggccctgggtgtgctcatctttgccaccatgatctactatgctgagaggataggggcacagcccaatgaccccagcgccagcgaacacacacactttaaaaatatccccatcggcttctggtgggctgtggtcaccatgacgacactgggctatggagacatgtatcctcagacgtggtctgggatgttggtgggagcactgtgcgccctggctggtgtgctgaccattgccatgccggtgcccgtcatcgtgaacaattttgggatgtactactctttagccatggctaagcagaaactaccaaagaaaaaaaagaagcatattccgcggccaccacagctgggatctcccaattattgtaaatctgtcgtaaactctccacaccacagtactcagagtgacacatgtccgctggcccaggaagaaattttagaaattaacagagcagattccaaactgaatggggaggtggcgaaggccgcgctggcgaacgaagactgcccccacatagaccaggccctcactcccgatgagggcctgccctttacccgctcgggcacccgcgagagatacggaccctgcttcctcttatcaaccggggagtacgcgtgcccgcctggtggaggaatgagaaaggatctttgcaaagaaagccctgtcattgctaagtatatgccgacagaggctgtgagagtgacttgaccaggcggcttggccgaggacactggtggctattaagcatctgggtggacctgcagcccctcctcaccctcggacagagtaaattcacgccatgcaggtttgccggacgagtccgagtggccccgggcattgtactaagacggacgtagctttttctacggcccacggtaactgaccgtagaggattcgcccttctttcttttgattttctttttctttcttttttttttttttagaagttaccttttatttggggagggggggtcaaggggagccttagcatgacttgcatgaagttaaacagaaaacccagctaaaccaaccccaccagcccctgctgtgactgtatgctcactctaaccaccacccgagaaccagagaaaagcaagagtctcttatttcttccagcattctttgacacgtagtgtcggagtcaaactgtgacgggctgcttggtagaaccctgtacatttccgggagtgggtgcggggggggggggggaggtcagggactaaggatggggccaggggagtggattgcttttttgtacacgagacccagaggaaaggtcccaaaaaggcagtcagtcatcggtcacattgacctcaccttcatagctcacctctcgctcggaaaaccaagaactatgctccgaataggattgtggaaattcacactgccaccctcttccacctccgtttggcatgcttgcgacccaatggacctctccccaagaccccgacagcggctagtttaggtcaattctctcatcttggtgtgtagctccagtgtgaccaagtttcataacaaattgttcatagttacaccacatggattttccaatgtcattttaaagccaggatgtagagtccctccagttcaggaccaccagaggggcgcctcccctccacctttactaaggcgaaaaccgacactgtatgcaatttagtacttcagagctcaaagaaaaaaaaaaaaaaaaaaaaaaagaaaaaagaaaaactgcatgcccaatgttatgcaaagagattcgagcatgaaataaattttgtaacatggaaaaaaaaaaaaaaaaaaaaaaaaaaaaaaaaaaaaaaaaaaa

SEQ ID NO: 9815 - protein, 585 aa, Rattus norvegicus
  ref <308>: DATABASE ACCESSION NUMBER: SWISS-Prot / CAA44644
  ref <309>: DATABASE ENTRY DATE: 2002-06-15
MGQGDESERIVINVGGTRHQTYRSTLRTLPGTRLAWLAEPDAHSHFDYDPRADEFFFDRHPGVFAHILNYYRTGKLHCPADVCGPLYEEELAFWGIDETDVEPCCWMTYRQHRDAEEALDSFGGAPLDNSADDADADGPGDSGDGEDELEMTKRLALSDSPDGRPGGFWRRWQPRIWALFEDPYSSRYARYVAFASLFFILVSITTFCLETHERFNPIVNKTEIENVRNGTQVRYYREAETEAFLTYIEGVCVVWFTFEFLMRVVFCPNKVEFIKNSLNIIDFVAILPFYLEVGLSGLSSKAAKDVLGFLRVVRFVRILRIFKLTRHFVGLRVLGHTLRASTNEFLLLIIFLALGVLIFATMIYYAERIGAQPNDPSASEHTHFKNIPIGFWWAVVTMTTLGYGDMYPQTWSGMLVGALCALAGVLTIAMPVPVIVNNFGMYYSLAMAKQKLPKKKKKHIPRPPQLGSPNYCKSVVNSPHHSTQSDTCPLAQEEILEINRADSKLNGEVAKAALANEDCPHIDQALTPDEGLPFTRSGTRERYGPCFLLSTGEYACPPGGGMRKDLCKESPVIAKYMPTEAVRVT

SEQ ID NO: 9816 - DNA, 1604 bp, Homo sapiens
  ref <308>: DATABASE ACCESSION NUMBER: Refseq / NM_004976
  ref <309>: DATABASE ENTRY DATE: 2002-11-03
ggggcgcggcccagcgacacccatgggagcggccgccagggggagttggcgccggggaggggggcgcgatgggccaaggggacgagagcgagcgcatcgtgatcaacgtgggcggcacgcgccaccagacgtaccgctcgaccctgcgcacgctgcccggcacgcggctcgcctggctggcggagcccgacgcccacagccacttcgactatgacccgcgtgctgacgagttcttcttcgaccgccaccccggcgtcttcgcgcacatcctgaactactaccgcacgggcaagctgcactgcccagccgacgtgtgcgggccgctctacgaggaggagctggccttctggggcatcgacgagaccgacgtggagccctgctgctggatgacgtaccgccagcaccgcgacgccgaggaggctctggacagcttcggcggcgctcctctggacaacagcgccgacgacgcggacgccgacggccctggcgactcgggcgacggcgaggacgagctggagatgaccaagcgcctggcgctcagtgactccccggatggccggcctggcggcttttggcgccgctggcagccgcgcatctgggcgctcttcgaggacccgtactcgtcccgctacgcgcggtatgtggccttcgcttccctcttcttcatcctggtctccatcaccaccttctgcctggagacccacgagcgcttcaaccccatcgtgaacaagacggagatcgagaacgttcgcaatggcacgcaagtgcgctactaccgggaggccgagacggaggccttccttacctacatcgagggcgtctgtgtggtctggttcaccttcgagttcctcatgcgtgtcatcttctgccccaacaaggtagagttcatcaagaactcgctcaacatcattgactttgtggccatcctgcccttctacctggaggtggggctgagcggcctgtcctccaaggcagccaaggacgtgctgggcttcctgcgcgtcgtccgcttcgtgcgcatcttgcgcatctttaagctgacccgccactttgtgggcctgcgggtcctgggccacacgctccgagccagcaccaacgagttcctgctgctcatcatcttcctggccttgggcgtgctgatcttcgccaccatgatctactacgccgagaggataggggcacagcccaatgaccccagtgccagtgagcacacgcactttaagaacatccccatcggcttctggtgggccgtggtcaccatgacgaccctgggctatggagacatgtacccgcagacgtggtccggcatgctggtgggggctctgtgtgcgctggcgggcgtgctcaccatcgccatgcccgtgcccgtcatcgtgaacaatttcgggatgtattactccttagccatggctaagcagaaactaccaaagaaaaaaaagaagcatattccgcggccaccgcagctgggatctcccaattattgtaaatctgtcgtaaactctccacaccacagtactcagagtgacacatgtccgctggcccaggaagaaattttagaaattaacagagcaggtaggaaacctctcagaggcatgtcgatctga

SEQ ID NO: 9817 - protein, 511 aa, Homo sapiens
  ref <308>: DATABASE ACCESSION NUMBER: SWISS-Prot / P48547
  ref <309>: DATABASE ENTRY DATE: 2002-06-15
MGQGDESERIVINVGGTRHQTYRSTLRTLPGTRLAWLAEPDAHSHFDYDPRADEFFFDRHPGVFAHILNYYRTGKLHCPADVCGPLYEEELAFWGIDETDVEPCCWMTYRQHRDAEEALDSFGGAPLDNSADDADADGPGDSGDGEDELEMTKRLALSDSPDGRPGGFWRRWQPRIWALFEDPYSSRYARYVAFASLFFILVSITTFCLETHERFNPIVNKTEIENVRNGTQVRYYREAETEAFLTYIEGVCVVWFTFEFLMRVIFCPNKVEFIKNSLNIIDFVAILPFYLEVGLSGLSSKAAKDVLGFLRVVRFVRILRIFKLTRHFVGLRVLGHTLRASTNEFLLLIIFLALGVLIFATMIYYAERIGAQPNDPSASEHTHFKNIPIGFWWAVVTMTTLGYGDMYPQTWSGMLVGALCALAGVLTIAMPVPVIVNNFGMYYSLAMAKQKLPKKKKKHIPRPPQLGSPNYCKSVVNSPHHSTQSDTCPLAQEEILEINRAGRKPLRGMSI

SEQ ID NO: 9818 - DNA, 2858 bp, Rattus norvegicus
  ref <308>: DATABASE ACCESSION NUMBER: EMBL / X62841
  ref <309>: DATABASE ENTRY DATE: 1993-01-14
gtgcgcttctctgtctttctggggttggggggggcgtgtccccggcccggagcatccttgtgcttgcctcaaccttctgagaccccggaccccttggattgagtcctcgaccctggtcttcacctcctgcctcccctaggttcttcctgccaaatcccaaccacctgtgcaccacaaaaagccaactcttcctgctccgagccccgggggggtggggtgggggggaggcaggggcagagccactctgcagaaggggccgccaccacctcctgcctcctcctcctccaccacctcctcctccttctcgtctcctccccctccccgttctgacgctgcctccttgggaagggtgtttggagggcagcggccgccccaagccggagccccgcagcgcttcttatgatcagctcggtgtgtgtctcctcctaccgcgggcgcaagtcggggaacaagcctccgtccaaaacatgtctgaaggaggagatggccaagggcgaggcgtcggagaagatcatcatcaacgtgggcggcacgcgacatgagacctaccgcagcaccctgcgcaccctaccgggcacccgccttgcctggctggcggatcccgacggcgggggtcggccagagtcggatggcggcggtgcaggcagcagcggcagcagcggcggcggcgggggctgtgagttcttctttgatcggcacccgggtgtttttgcctatgtgctcaactactaccgcacgggcaagctgcattgccccgcagacgtctgtgggcctctctttgaggaagagctcactttctggggtatcgatgagacagatgtggaaccctgctgctggatgacctaccggcagcaccgcgatgctgaagaggcactggacatcttcgagagcccggacgggggcgggggtggcgcagggcccggcgacgaggctggagacgatgagcgggagttggccttgcagcgcctgggcccccatgaaggaggctctggccctggtgctgggtccgggggttgccgtggctggcagccccgaatgtgggcgctcttcgaggacccgtactcatcccgggcggccagggtggtagcctttgcctctctcttcttcatcttggtctccattaccaccttctgcctggagacccacgaggccttcaacattgaccgaaatgtgacggagatccaccgggtagggaatatcaccagcgtgcgcttccggcgggaggtagaaacagaacccattcttacctacatcgagggcgtgtgcgtgatgtggttcactctagagttcctggttcgcattgtgtgctgccctgatacgttggactttgtcaagaacctgctcaacatcatcgactttgtggccatcttgcccttttacctggaggtgggattgagtggcctgtcatccaaggcagctcgagatgtgctgggtttcctgcgtgtggtgcgctttgtacgcatcctgcggatcttcaagctcacacgccactttgtggggctgcgtgtgctcggccacacactccgggccagcaccaacgagttcctgctgcttatcatcttcctggccctgggtgtgctcatctttgccaccatgatctattatgctgagcgaatcggggccaggccatctgacccacggggcaatgaccacaccgacttcaagaacatccccatcggtttctggtgggctgtggtcaccatgacaacgcttggctatggggacatgtatcctaagacatggtcaggaatgctggtgggtgcgctgtgtgcactggctggtgtgctaaccattgccatgcctgtgcctgtcatcgtcaataactttggtatgtactactccctggctatggccaagcagaagcttcccaagaaacgaaagaagcatgtaccacggccaccccagcttgagtcacccatttactgcaagtctgaggagacttcaccccgggacagcacctacagtgacaccagcccccctgcccgggaagagggtatggtcgagaggaaacgagcagactccaagcagaatggtgacgctaatgcggtgctgtccgatgaggagggagctggcctcacccagcccctggcctcggcccccacccctgaagagcgtcgagccctgagacgctcaggcacacgggacagaaacaagaaggcagctgcctgcttcctgctcagtgctggggactatgcctgtgctgatggcagtgtccagaaagaaggcagtgttgagccgaaagcgtgcgtcccagtgtctcacacctgtgctctttaaacacagagacctgccaagacgccctctcgtccaactatgcccatgctgaagtcctcaccctctcttagagcggcaccaacgtgagaaagacagacagacagaaagccagaggcttaggaaaactctggaacccaggcacgaatcttttgctgggaaagatatccttgtttgcacaagactggtggaaaaatctcccatgcaactctcagggcccagagccatctgggtctgatactctgttctactgtacattgaagagacatatatgcacatatagtatctatattcatacatactatatactcttgtgtgtagtgcacgtgctactggtggtctgtcttcatcgttaggctatgtctcccaagtcctctgcccaccctgtttccccaccccctcttccttcatggattgtttcttctgaccatgtttttggagtgtcccaggagaggtatacctgggacctgcccctccagctgggtggtcccaggctgctctcacttgggggtgtcccctgccagcaggtggcctgctgaagtcagttgaaggcacgattgcccttctggggtcactgcttcactagc

SEQ ID NO: 9819 - protein, 625 aa, Rattus norvegicus
  ref <308>: DATABASE ACCESSION NUMBER: SWISS-Prot / CAA44645
  ref <309>: DATABASE ENTRY DATE: 2002-06-15
MISSVCVSSYRGRKSGNKPPSKTCLKEEMAKGEASEKIIINVGGTRHETYRSTLRTLPGTRLAWLADPDGGGRPESDGGGAGSSGSSGGGGGCEFFFDRHPGVFAYVLNYYRTGKLHCPADVCGPLFEEELTFWGIDETDVEPCCWMTYRQHRDAEEALDIFESPDGGGGGAGPGDEAGDDERELALQRLGPHEGGSGPGAGSGGCRGWQPRMWALFEDPYSSRAARVVAFASLFFILVSITTFCLETHEAFNIDRNVTEIHRVGNITSVRFRREVETEPILTYIEGVCVMWFTLEFLVRIVCCPDTLDFVKNLLNIIDFVAILPFYLEVGLSGLSSKAARDVLGFLRVVRFVRILRIFKLTRHFVGLRVLGHTLRASTNEFLLLIIFLALGVLIFATMIYYAERIGARPSDPRGNDHTDFKNIPIGFWWAVVTMTTLGYGDMYPKTWSGMLVGALCALAGVLTIAMPVPVIVNNFGMYYSLAMAKQKLPKKRKKHVPRPPQLESPIYCKSEETSPRDSTYSDTSPPAREEGMVERKRADSKQNGDANAVLSDEEGAGLTQPLASAPTPEERRALRRSGTRDRNKKAAACFLLSAGDYACADGSVQKEGSVEPKACVPVSHTCAL

SEQ ID NO: 9820 - DNA, 31737 bp, Homo sapiens; identical to SEQ ID NO: 9808
  ref <308>: DATABASE ACCESSION NUMBER: EMBL / AL137790
  ref <309>: DATABASE ENTRY DATE: 2001-01-02

SEQ ID NO: 9821 - protein, 606 aa, Homo sapiens; identical to SEQ ID NO: 9809
  ref <308>: DATABASE ACCESSION NUMBER: SWISS-Prot / CAC19684
  ref <309>: DATABASE ENTRY DATE: 2003-02-01

SEQ ID NO: 9822 - DNA, 785 bp, Rattus norvegicus
  ref <308>: DATABASE ACCESSION NUMBER: EMBL / X62875
  ref <309>: DATABASE ENTRY DATE: 1991-11-20
gccccgatggctgacctggcggcagcagtgtggtcagtgcaggggaagcttaggtcccagcatgtatgtcccccatcaagcgtcaccgggtgggtttctcagtccctcctgccccaccctactgagaatcctgcaccaggttggctgagccccttggctggacaacaggaagtaggatggtgttggctccacccactttgctgctcttccctgggacaagacagatgggcgctaccacccatctcgagtgaggtcctgagcacttccacctaaggcagacggggctccaacaggcgcctcccccactacactcttcctctagcagggcaccaaggagctcgccttgcccccctctccttttgctcctccctgcccccaaggttctggttccactttttcctctgttcacaaactacctctggacagttgtgttgtgttttttgttcaaatgttcattcttagacacccaccattgctgctaccagcgccagatgtccatcctcccgattttgcctgtaccccccacacaatacactctaggggaagggggggctggtgtgcagcagcaggctggttaccgagtaccccacgctagggaagatggccccgccccgtggatgctgcagcagagtgaggagggggggcccacttggatgggaaaagggtataggaccacctccccttgttgtgggggaggggtggccagtatttgtcccagcctggggctccccctctggtttcctatttgcagttacttgaataaaaaaaaatagccttttctggac

SEQ ID NO: 9823 - DNA, 785 bp, Rattus norvegicus; identical to SEQ ID NO: 9822
  ref <308>: DATABASE ACCESSION NUMBER: EMBL / X62875
  ref <309>: DATABASE ENTRY DATE: 1991-11-20

SEQ ID NO: 9824 - DNA, 466 bp, Rattus norvegicus
  ref <308>: DATABASE ACCESSION NUMBER: EMBL / X62950
  ref <309>: DATABASE ENTRY DATE: 1997-05-12
aggaaagacagaatcctactagaggccagaaagaatgttccagacatgggtggaaggccctcactcccgactgacttcaatacgcctgaaggtagggagtgctccatgtctgcccccaggctccaagggtgggtctcctagggcctggaaaatgccccaccaatctggctaagataaggaaagggtatgaagagaaagttacagaaatttgaagggttaagctaagttgctgagagttagtataagttacagagaaagtaaggttaaacaaagagaaagagaaaagaaggtaaaaagagcaggaagctagggaagaaaagagactaaaagaagaggaagctagagagctaaagagagataaaagacaagagaggaacatatactggccacagtagttagggaacctaggaagacagtacctggcaacagaagagaattcctggctaaagatcagtgtgcctaatgc

SEQ ID NO: 9825 - protein, 415 aa, Rattus norvegicus
  ref <308>: DATABASE ACCESSION NUMBER: SWISS-Prot / AAA40872
  ref <309>: DATABASE ENTRY DATE: 2002-06-15
MLLLLALVSVALAHASEEHFDGNRVYRVSVHGEDHVNLIQELANTKEIDFWKPDSATQVKPLTTVDFHVKAEDVADVENFLEENEVHYEVLISNVRNALESQFDSHTRASGHSYTKYNKWETIEAWIQQVATDNPDLVTQSVIGTTFEGRNMYVLKIGKTRPNKPAIFIDCGFHAREWISPAFCQWFVREAVRTYNQEIHMKQLLDELDFYVLPVVNIDGYVYTWTKDRMWRKTRSTMAGSSCLGVRPNRNFNAGWCEVGASRSPCSETYCGPAPESEKETKALADFIRNNLSTIKAYLTIHSYSQMMLYPYSYDYKLPENYEELNALVKGAAKELATLHGTKYTYGPGATTIYPAAGGSDDWSYDQGIKYSFTFELRDTGFFGFLLPESQIRQTCEETMLAVKYIANYVREHLY

SEQ ID NO: 9826 - DNA, 1796 bp, Rattus norvegicus
  ref <308>: DATABASE ACCESSION NUMBER: EMBL / X62952
  ref <309>: DATABASE ENTRY DATE: 2000-08-23
gttcacagccactgcgccctcgctctcttcttgcagatcttgcagccgcagcaagccaggccacctcgtccttcgaagccatgtccaccaggtccgtgtcctcgtcctcctaccgcaggatgttcggtggctccggcacatcgagccggcccagctccaaccggagctatgtgaccacatccacccgcacctacagcctaggcagcgcgctgcgccccagcactagccgcagcctctattcctcgtccccgggtggcgcctatgtgacccggtcctccgccgtgcgcctgcggagcagcatgcccggcgtgcggctgctgcaggactccgtggacttctcgctggccgacgccatcaacaccgagttcaagaacacccgcaccaacgagaaggtggaattgcaggagctgaatgaccgcttcgccaactacatcgacaaggtgcgcttcctcgagcagcagaacaaaatcctgctggccgagctcgagcagcttaagggccagggcaagtcgcgcctgggcgacctctacgaggaggagatgagggagttgcgccggcaggtggatcagctcaccaatgacaaggcccgtgtcgaggtggagagggacaacctggccgaggacatcatgcggctgcgagaaaaattgcaggaggagatgctccagagggaggaagccgagagcaccctgcagtcattcagacaggatgttgacaatgcttctctggcacgtcttgaccttgaacgtaaagtggaatccttgcaggaagaaattgcctttttgaagaagctgcacgatgaagagatccaggagctgcaggcccagattcaggaacagcatgtccagatcgatgtggacgtttccaagcctgacctcaccgctgccctgcgtgatgtccgccagcagtatgaaagtgtggctgccaagaacctccaggaggccgaggaatggtacaagtccaagtttgctgacctctctgaggctgccaaccggaacaacgatgccctgcgccaggcaaagcaggagtcaaacgaataccggagacaggtgcagtcactcacctgcgaagtggatgcccttaaaggcactaatgagtccctggagcgccagatgcgtgaaatggaagagaattttgcccttgaagctgctaactaccaggacactattggccgcctgcaggatgagatccagaacatgaaggaagagatggctcgccaccttcgtgaataccaggacctgctcaatgtaaagatggctcttgacattgagatcgccacctacaggaagctgctggaaggggaggagagcaggatttctctgcctcttccaaacttttcttccctgaacctgagagaaactaacctggagtcacttcctctggttgacacccactccaaaagaacactcctgattaagacggttgaaaccagagacggacaggtgatcaatgagacttctcagcaccacgatgaccttgaataaaaactgcacaggctcagtgcaacggcgcagtaccagcaagaaggaaaaaaaaatcgtatcttagaaaaaagagctttcaagtgcctttactgcagttttcaggagcgcaagatagatctgggatagaaacgagctcagcacataacaactgacacccccaaaaggcgtagaaaaggtttacaaaataatctagttttacgaagaaatcttgtgctagaatactttttaaagtatttttgaataccattaaaactgctttctttttccagaaaatatctgaccaacttgttactgcttcaataaaacttcagaaat

SEQ ID NO: 9827 - protein, 465 aa, Rattus norvegicus
  ref <308>: DATABASE ACCESSION NUMBER: SWISS-Prot / P31000
  ref <309>: DATABASE ENTRY DATE: 2002-06-15
STRSVSSSSYRRMFGGSGTSSRPSSNRSYVTTSTRTYSLGSALRPSTSRSLYSSSPGGAYVTRSSAVRLRSSMPGVRLLQDSVDFSLADAINTEFKNTRTNEKVELQELNDRFANYIDKVRFLEQQNKILLAELEQLKGQGKSRLGDLYEEEMRELRRQVDQLTNDKARVEVERDNLAEDIMRLREKLQEEMLQREEAESTLQSFRQDVDNASLARLDLERKVESLQEEIAFLKKLHDEEIQELQAQIQEQHVQIDVDVSKPDLTAALRDVRQQYESVAAKNLQEAEEWYKSKFADLSEAANRNNDALRQAKQESNEYRRQVQSLTCEVDALKGTNESLERQMREMEENFALEAANYQDTIGRLQDEIQNMKEEMARHLREYQDLLNVKMALDIEIATYRKLLEGEESRISLPLPNFSSLNLRETNLESLPLVDTHSKRTLLIKTVETRDGQVINETSQHHDDLE

SEQ ID NO: 9828 - DNA, 973 bp, Homo sapiens
  ref <308>: DATABASE ACCESSION NUMBER: EMBL / BF344933
  ref <309>: DATABASE ENTRY DATE: 2000-11-27
gtgaataccaagacctgctcaatgttaagatggcccttgacattgagatagccacctacaggaagctgctggaaggcgaggagagcaggtatttctctgcctcttccaaactttcccacgcgtccgagcagacaatgtgggctccaagcagatgcagcagatccgcatgtcccttcgcgggaaggctgtggtgctgatgggcaagaacaccatgatgcgcaaggccatccgagggcacctggaaaacaacccagctctggagaaactgctgcctcatatccgggggaatgtgggcttgtgttcaccaaggaggacctcactgagatcagggacatgttgctggccataaggtgccagctgctgcccgtgctggtgccattgccccatgtgaagtcactgtgccagcaccagaacactggtctcgggcccgagaagacctcctttttccaggctttaggtatcaccactaaaatctccagggcaccattgaaaatcctgagtgatgtgcagctgatcaagactggagacaaagtgggagccagcgaagccacgctgctgaaatgctcaaatctcccccttctcctttgggcttggtcatccagcaggtgttcgaccaatggcagaatctacaaccctggagagtgcttgatattcacagaggagacgtctgcatactcgacttcctggaagggtgtccgcaactggtagccagtgtctgaccagaagaattgctacaccaactgttggctcaggaccccatcatatcatcaaagggtacaacagagtcatgagcactgcccgggggcccggataaccactccccacctggtaaaagggcaagggctccgggtgaaccacatggcttgggggctgaccggtagcgagaacacaacggcactgcggacggtgacccccaacaggtgaacacggaaacggaggacggacagaagagcagggcctgtaccgaaagaaa

SEQ ID NO: 9829 - protein, 317 aa, Homo sapiens
  ref <308>: DATABASE ACCESSION NUMBER: SWISS-Prot / P05388
  ref <309>: DATABASE ENTRY DATE: 2002-06-15
MPREDRATWKSNYFLKIIQLLDDYPKCFIVGADNVGSKQMQQIRMSLRGKAVVLMGKNTMMRKAIRGHLENNPALEKLLPHIRGNVGFVFTKEDLTEIRDMLLANKVPAAARAGAIAPCEVTVPAQNTGLGPEKTSFFQALGITTKISRGTIEILSDVQLIKTGDKVGASEATLLNMLNISPFSFGLVIQQVFDNGSIYNPEVLDITEETLHSRFLEGVRNVASVCLQIGYPTVASVPHSIINGYKRVLALSVETDYTFPLAEKVKAFLADPSAFVAAAPVAAATTAAPAAAAAPAKVEAKEESEESDEDMGFGLFD

SEQ ID NO: 9830 - DNA, 2615 bp, Rattus norvegicus
  misc_feature (1)..(2615): n=a, c, g or t
  ref <308>: DATABASE ACCESSION NUMBER: EMBL / X63143
  ref <309>: DATABASE ENTRY DATE: 1998-11-12
cttcgagagacagccatgcggttcattcctgacatagccctggctgcacccaccgcacctgccatgctacccacgaccgttatccagcccgtggataccccgtttgaggaactcctttctgagcatcccggccccgaaccagtcaccagtcccccactggtgacagaggtgacagaagttgtggaagagcccagtcagagagccaccactatctccaccaccacatctaccactgcagccaccaccacaggggccccaactatggccacagcacctgctacagcagccaccactgcccctagcactcccgcggcaccccctgccacggccaccacggctgacataaggaccaccggcatacaagggctgctgcctcttcccctgaccacggctgccacagccaaggccactaccccagcagtaccctcaccacccactactgtgactaccttggacacagaggccccgacacctaggctggtcaacacagctacctctcggccacgagcccttcctcggccagtcaccacccaggagcctgaagttgctgagaggagtaccctgccgttggggaccaccgctcctggacccacagaggtggctcagaccccaactccagagtcccttctgaccacgacccaggatgagccagaggtgccagtaagcggggggcccagcggggactttgagctgcaagaagagaccacacagccagacacagccaatgaagtggtggcggtggaaggagccgcggccaagccatcacctccactggggacactacccaagggtgcccgcccaggccttggcctccacgacaatgccatcgactcgggcagctctgctgcccagctccctcagaagagcatactagagcggaaggaggtgctcgtagctgtgatcgtaggtggcgtggtgggcgccctcttcgctgccttcctggtcacgttgctcatctaccgcatgaagaagaaggacgaaggcagctacaccttggaagagcccaagcaggcaagcgtcacataccagaagcccgacaagcaggaggagttctacgcttagcagagagagccacagtgcctcctgcagcctcgactccgccttgcccagtccctgtcccaacaacagcccagnccaatcctgggcctgggcctgggcctgggatggagcctggccctgcttccttctgctcaggctgctagcttaacacagactgtcctaaggagcagaggcgccaccatctgccccagactgtgcccgtatgaccccttctctaggcccattccctccagcctggggcttcaggatcttgagtcccatggacaagaggaaggaagccctggttgctggttgaaacatgggcggggccagggttaagatggcccacagtgctcttcacgcagaggccaccatgctggcttctaaaaccaacacatggtacatctagccctccaattcaacatcatccggatgctgaggcctcgagctgctgtccaaggcctctctcgacaggagggtgtcctttgtcaccagcctgagtcgtcgtggagtcaccgccccctctcccctgcctaatgcacatgtccccaggctgcacctctttctgcacctcctcccagggaaagggcttcctcagtgcacagggcagtcagtggtaagggaggccactctagcgtccctcctgagaggggatgtcacatcgcctttgtcaaccactgctataatcctataatgcattcacacaggagacaaaaacatacccagtcctgaccacccggccagcgagacatcacacacacgcaccaccttcacgcagtctcagacatcctgacgcttctgccacgtaggccactgtcatcgtcaccagtggcaaccacgccaccttcctcccactctctctttacacacattggtcctgcatctggctcctctaaccatccgggtcactgaggaaggcaggaccgagttgtaggcatcagcccatattgggtcccccagagtcaccctattccacttggtccccaccatgacacctataccagccacactgatgctgatcccagctgatgtcagtcacaaccccacacagatgcaggctcgccctccccactgtggctcatagagaagttttgggctagcctctgccagccaagtctgaaggaagaagggagctagggtctcccaggaccaaggagctgtgtgggttgtccctggtctctatgtatttcctttctgctctgagccaggagctgtctctgcctcccaggacacgtgtctccaaagtgcctgcgagggcgggctccgcccaggccctctgtgtcccctgccctgccctggcctggtgagaccgacctcaggcctacctactctgggtcctctctgtggacacaactgaccaggcaacttggcagttctggctacaactggatggactcatactccagcaggctcatcccaatgctgtaggccccaagagtcattgatggggacaagggtgtcacaggcctcaagtctaccaccctgtctctgttattcttagaagtggggctattccagaggtattttaagtgtgggatcaccattctctttgtgagaggggtgtgccgagggaattc

SEQ ID NO: 9831 - protein, 442 aa, Rattus norvegicus
  ref <308>: DATABASE ACCESSION NUMBER: SWISS-Prot / CAA44848
  ref <309>: DATABASE ENTRY DATE: 2000-05-30
MKPGPPRRGTAQGQRVDTATHGPGARGLLLPPLLLLLLAGRAAGAQRWRNENFERPVDLEGSGDDDSFPDDELDDLYSGSGSGYFEQESGLETAMRFIPDIALAAPTAPAMLPTTVIQPVDTPFEELLSEHPGPEPVTSPPLVTEVTEVVEEPSQRATTISTTTSTTAATTTGAPTMATAPATAATTAPSTPAAPPATATTADIRTTGIQGLLPLPLTTAATAKATTPAVPSPPTTVTTLDTEAPTPRLVNTATSRPRALPRPVTTQEPEVAERSTLPLGTTAPGPTEVAQTPTPESLLTTTQDEPEVPVSGGPSGDFELQEETTQPDTANEVVAVEGAAAKPSPPLGTLPKGARPGLGLHDNAIDSGSSAAQLPQKSILERKEVLVAVIVGGVVGALFAAFLVTLLIYRMKKKDEGSYTLEEPKQASVTYQKPDKQEEFYA

SEQ ID NO: 9832 - DNA, 1463 bp, Homo sapiens
  ref <308>: DATABASE ACCESSION NUMBER: EMBL / AF248634
  ref <309>: DATABASE ENTRY DATE: 2001-10-12
gaattccacaaaggcgcccgcccgccgcccgccgcccgcgcccgcgccgccgccatgaagccggggccgccgcaccgtgccggggccgcccacggggccggcgccggggccggggccgcggccgggcccggggcccgcgggctgctcctgccaccgctgctgctgctgctgctggcggggcgcgccgcgggggcccagcgctggcgcagtgagaacttcgagagacccgtggacctggagggctctggggatgatgactcctttcccgatgatgaactggatgacctctactcggggtcgggctcgggctacttcgagcaggagtcgggcattgagacagccatgcgcttcagcccagatgtagccctggcggtgtccaccacacctgcggtgctgcccaccacgaacatccagcctgtgggcacaccatttgaagagctcccctctgagcgccccaccctggagccagccaccagccccctggtggtgacagaagtcccggaagagcccagccagagagccaccaccgtctccactaccatggctaccactgctgccacaagcacaggggacccgactgtggccacagtgcctgccacagtggccaccgccacccccagcacccctgcagcacccccttttacggccaccactgctgttataaggaccactggcgtacggaggcttctgcctctcccactgaccacagtggctacggcacgggccactacccccgaggcgccctccccgcccaccacggcggctgtcttggacaccgaggccccaacacccaggctggtcagcacagctacctcccggccaagagcccttcccaggccggccaccacccaggagcctgacatccctgagaggagcaccctgcccctggggaccactgcccctggacccacagaggtggctcagaccccaactccagagaccttcctgaccacaatccggaatgagccagaggttccggtgagtggggggcccagtggagacttcgagctgccagaagaagagaccacacaaccagacacagccaatgaggtggtagctgtgggaggggctgcggccaaggcatcatctccacctgggacactgcccaagggtgcccgcccgggccctggcctcctggacaatgccatcgactcgggcagctcagctgctcagctgcctcagaagagtatcctggagcggaaggaggtgctcgtagctgtgattgtgggcggggtggtgggcgccctctttgctgccttcttggtcacactgctcatctatcgtatgaagaaaaaggatgagggcagctacacgctggaggaacccaagcaggcgagcgtcacataccagaagcctgacaagcaggaggagttctatgcctagtggagccacagtgcctccctgcagcctcaacaccaccctgctgtccagtccccagcctggccccaccagcccaagctcct

SEQ ID NO: 9833 - protein, 384 aa, Homo sapiens
  ref <308>: DATABASE ACCESSION NUMBER: SWISS-Prot / O75056
  ref <309>: DATABASE ENTRY DATE: 2002-06-15
MAIAYLGSSCPSQPPSSLALSLSPTPSDFEQESGIETAMRFSPDVALAVSTTPAVLPTTNIQPVGTPFEELPSERPTLEPATSPLVVTEVPEEPSQRATTVSTTMATTAATSTGDPTVATVPATVATATPSTPAAPPFTATTAVIRTTGVRRLLPLPLTTVATARATTPEAPSPPTTAAVLDTEAPTPRLVSTATSRPRALPRPATTQEPDIPERSTLPLGTTAPGPTEVAQTPTPETFLTTIRDEPEVPVSGGPSGDFELPEEETTQPDTANEVVAVGGAAAKASSPPGTLPKGARPGPGLLDNAIDSGSSAAQLPQKSILERKEVLVAVIVGGVVGALFAAFLVTLLIYRMKKKDEGSYTLEEPKQASVTYQKPDKQEEFYA

SEQ ID NO: 9834 - DNA, 1890 bp, Rattus norvegicus
  ref <308>: DATABASE ACCESSION NUMBER: EMBL / X63375
  ref <309>: DATABASE ENTRY DATE: 1992-05-06
gaattctacagtatagggtaggggtgcccccagtgagatataacaataagccaacgggaagaccagccacagacctgggctgggagagtcttaggtggctgggtcacgtgcataaattgttccccggggtctagactggcaggagccacaaccggttaccagctacagcccagggtgggtttggcaattgtccggattgaggtggttcaagccgcccacaagaagcacagaccaggagtcaggaaccgaggctgcccgctgggctggcctgcaggagagggacgggccggaactgcaaccgcagtggcagagagtgcgagggggcggcaggtgcacaagcagagaggcggagcagagctgggcagagtcactagcgtcctggagtgaccttcccccacctagccagggcctagggaaggtggacttgcagtaaacccaaaccaggagtacgggggtaagaccaataggaggaagggattggggtctccgaggctcccagagagcgacgcaggtggaggccacagcatcggcgcccgcacggggggcaagggtgggttgtccaggcacagcttggggcggagagagggccagcagagcttcgggagcactactcactcaccccaagtccctctccgcaccactgctgctgtgccagcccctctagcctagccggctcctttgtgccggccccacgcccgccccttcgggctcaggcccgccttctcggcaccggcgattggcctgcggtgccgccggtaggcggagctacggatggtggaggcgcggtatatagtaaaggtagggcgtgcgccctcagccaatttctcctgctgctggcctgcgcgcccgcgtgccgagcccgcgctccactcctttcgtccttcccggtgactttccctccttgtccctggtccatctcgccagaggtcatagcaggcagagtggtgcagctacagcttgaagcagcagctgcggggttcgctgagccccccgggaggcgatcggagcgcggggagagcaggagtgcggccacgcgcccacctctaggtgcggggctcggagccgcccagcccgcgcgcgccctcctccctcctccctcctccctccgcccccgccgcacctccccctcctcccgctctgcttaggctgctccgcggcgcgcctcgcactcggagagccgcagcggcagcggcgcgtctcgcctttggagacagagccgggccgcggggacaccgagcagtcgccgcgaggacgccagggcgcgcgcagcactcgctttccctcggcctcggccgccactgctgagcagacaccatggcccgcggaaaagccaaggaggaaggcagctggaagaaattcatctggaactcggagaagaaggagtttttgggcaggaccggtggtagttggtgtaagtaagcgctcccggctttcgccgtcggcccttggctttttctaggaggcgcatccgtgtacgcgacactgcggacagttcggcgcccacgggctgtccagggtgttggggattggtggtaggcgctgctaggagcgcgcggcctgggcttggcatccagtgacaaatgcagggggtcctcagaatgcggcttgggttgggagctgaagctagctagactgaaggttttgcgatggtagggaatcttcggtcaggttcctccctctccatccccaaagaccttagaaaaatgagatttggggctgtgagcagaactcatgagcttacctgttctaatgcagacgatgctgcgatagcatcattctcccagcctagaactgtatctagaatggagaggaacggggaggagaaatgcacccacactgcaatcctcatacactgcaatcttcgcagcccagaaatggcccagtgagctc

SEQ ID NO: 9835 - protein, 304 aa, Rattus norvegicus
  ref <308>: DATABASE ACCESSION NUMBER: SWISS-Prot / AAA40780
  ref <309>: DATABASE ENTRY DATE: 2001-10-16
MARGKAKEEGSWKKFIWNSEKKEFLGRTGGSWFKILLFYVIFYGCLAGIFIGTIQVMLLTISELKPTYQDRVAPPGLTQIPQIQKTEISFRPNDPKSYEAYVLNIIRFLEKYKDSAQKDDMIFEDCGSMPSEPKERGEFNHERGERKVCRFKLDWLGNCSGLNDESYGYKEGKPCIIIKLNRVLGFKPKPPKNESLETYPLTMKYNPNVLPVQCTGKRDEDKDKVGNIEYFGMGGFYGFPLQYYPYYGKLLQPKYLQPLLAVQFTNLTLDTEIRIECKAYGENIGYSEKDRFQGRFDVKIEVKS

SEQ ID NO: 9836 - DNA, 2208 bp, Homo sapiens
  ref <308>: DATABASE ACCESSION NUMBER: Refseq / NM_001677
  ref <309>: DATABASE ENTRY DATE: 2000-10-31
gaattcatgctaaattgctggaaggctgcgtctctgctgtggtgtcagttccggatgcctcatcgccaggggcgcgccgcagccacccaccctccggaccgcggcagctgctgacccgccatcgccatggcccgcgggaaagccaaggaggagggcagctggaagaaattcatctggaactcagagaagaaggagtttctgggcaggaccggtggcagttggtttaagatccttctattctacgtaatattttatggctgcctggctggcatcttcatcggaaccatccaagtgatgctgctcaccatcagtgaatttaagcccacatatcaggaccgagtggccccgccaggattaacacagattcctcagatccagaagactgaaatttcctttcgtcctaatgatcccaagagctatgaggcatatgtactgaacatagttaggttcctggaaaagtacaaagattcagcccagagggatgacatgatttttgaagattgtggcgatgtgcccagtgaaccgaaagaacgaggagactttaatcatgaacgaggagagcgaaaggtctgcagattcaagcttgaatggctgggaaattgctctggattaaatgatgaaacttatggctacaaagagggcaaaccgtgcattattataaagctcaaccgagttctaggcttcaaacctaagcctcccaagaatgagtccttggagacttacccagtgatgaagtataacccaaatgtccttcccgttcagtgcactggcaagcgagatgaagataaggataaagttggaaatgtggagtattttggactgggcaactcccctggttttcctctgcagtattatccgtactatggcaaactcctgcagcccaaatacctgcagcccctgctggccgtacagttcaccaatcttaccatggacactgaaattcgcatagagtgtaaggcgtacggtgagaacattgggtacagtgagaaagaccgttttcagggacgttttgatgtaaaaattgaagttaagagctgatcacaagcacaaatctttcccactagccatttaataagttaaaaaaagatacaaaaacaaaaacctactagtcttgaacaaactgtcatacgtatgggacctacacttaatctatatgctttacactagctttctgcatttaataggttagaatgtaaattaaagtgtagcaatagcaacaaaatatttattctactgtaaatgacaaaagaaaaagaaaaattgagccttgggacgtgcccatttttactgtaaattatgattccgtaactgaccttgtagtaagcagtgtttctggcccctaagtattgctgccttgtgtattttatttagtgtacagtactacaggtgcatactctggtcatttttcaagccatgttttattgtatctgttttctactttatgtgagcaaggtttgctgtccaaggtgtaaatattcaacgggaataaaactggcatggtaattttttttttttgtttgttttttgttttttggctctttcaaaggtaatggcccatcgatgagcatttttaacatactccatagtcttttcctgtggtgttaggtctttatttttatttttttcctgggggctggggtgggggtttgtcatgggggaactgccctttaaattttaagtgacactacagaaaaacacaaaaaggtgatgggttgtgttatgcttgtattgaatgctgtcttgacatctcttgccttgtcctccggtatgttctaaagctgtgtctgagatctggatctgcccatcactttggcctagggacagggctaattaatttgctttatacattttcttttactttccttttttcctttctggaggcatcacatgctggtgctgtgtctttatgaatgttttaaccattttcatggtggaagaattttatatttatgcagttgtacaattttatttttttctgcaagaaaaagtgtaatgtatgaaataaaccaaagtcacttgtttgaaaataaatctttattttgaactttataaaagcaatgcagtaccccatagactggtgttaaatgttgtctacagtgcaaaatccatgttctaacatatgtaataattgccaggagtacagtgctcttgttgatcttgtattcagtcaggttaaaacaacggacaataaaagaatgaaccgaattc

SEQ ID NO: 9837 - protein, 303 aa, Homo sapiens
  ref <308>: DATABASE ACCESSION NUMBER: SWISS-Prot / P05026
  ref <309>: DATABASE ENTRY DATE: 2001-10-16
MARGKAKEEGSWKKFIWNSEKKEFLGRTGGSWFKILLFYVIFYGCLAGIFIGTIQVMLLTISEFKPTYQDRVAPPGLTQIPQIQKTEISFRPNDPKSYEAYVLNIVRFLEKYKDSAQRDDMIFEDCGDVPSEPKERGDFNHERGERKVCRFKLEWLGNCSGLNDETYGYKEGKPCIIIKLNRVLGFKPKPPKNESLETYPVMKYNPNVLPVQCTGKRDEDKDKVGNVEYFGLGNSPGFPLQYYPYYGKLLQPKYLQPLLAVQFTNLTMDTEIRIECKAYGENIGYSEKDRFQGRFDVKIEVKS

SEQ ID NO: 9838 - DNA, 1890 bp, Rattus norvegicus; identical to SEQ ID NO: 9834
  ref <308>: DATABASE ACCESSION NUMBER: EMBL / X63375
  ref <309>: DATABASE ENTRY DATE: 1992-05-06

SEQ ID NO: 9839 - protein, 304 aa, Rattus norvegicus; identical to SEQ ID NO: 9835
  ref <308>: DATABASE ACCESSION NUMBER: SWISS-Prot / AAA40780
  ref <309>: DATABASE ENTRY DATE: 2001-10-16

SEQ ID NO: 9840 - DNA, 2208 bp, Homo sapiens; identical to SEQ ID NO: 9836
  ref <308>: DATABASE ACCESSION NUMBER: Refseq / NM_001677
  ref <309>: DATABASE ENTRY DATE: 2000-10-31

SEQ ID NO: 9841 - protein, 303 aa, Homo sapiens; identical to SEQ ID NO: 9837
  ref <308>: DATABASE ACCESSION NUMBER: SWISS-Prot / P05026
  ref <309>: DATABASE ENTRY DATE: 2001-10-16

SEQ ID NO: 9842 - DNA, 1508 bp, Rattus norvegicus
  ref <308>: DATABASE ACCESSION NUMBER: EMBL / X63594
  ref <309>: DATABASE ENTRY DATE: 1992-02-10
cccaactgccagcagcctgcaccctgcacccgctcagctccgcacagccatgtttcagccagctgggcacggccaggactgggccatggagggcccgcgggacggcctcaagaaggagcggttggtggacgaccgccacgacagcggcttggactccatgaaggacgaggattacgagcagatggtgaaggagctgcgggagatccgcctgcagccgcaggaggcgcctctggctgccgagccctggaagcaacagctcacggaggacggagactcgttcctgcacttggcaatcatccatgaagagaagacactgaccatggaagtgattggtcaggtgaagggagacctggccttcctcaacttccagaacaacctgcagcagactccactccacttggctgtgatcaccaaccagccaggaattgctgaggcacttctgaaagctggctgtgatcctgagctccgagactttcgaggaaatacccctctccatcttgcctgtgagcagggctgcctggccagtgtagcagtcttgactcagacctgtacgccccagcatctccactccgtcctgcaggccaccaactacaacggccacacgtgtctacacttagcctctatccatggctacctgggcatcgtggagcacttggtgactttgggtgctgatgtcaacgctcaggagccctgtaatggccggacagccctccaccttgcagtggacctgcagaatcctgacctggtctcgctcctgttgaagtgtggggctgatgtcaacagagtaacctaccagggctactccccctaccagcttacgtggggccgcccaagtacccggatacagcagcagctgggccagctgaccctggaaaatcttcagacgctgcccgagagtgaggatgaggagagctatgacacggagtcagaattcacggaagatgagttgccctacgatgactgtgtgtttggaggccagcgtctgacgttataagaggaaagtggccaaaggaacgtggacttgtatatttgtacaaatagagttttatttttctaaaaaaaaaaaaaaaaaagaaaaagaaaaaaaataagaaaggatacttagcaccacagcacacagcgcctagccccgagcattctattgtggtgattcagctgttgttcttctcaaatttggggaaacagatcattgaaattcaaaggaaatgtctcctaaggttcatgtttgtgggattttttttttttttttgaggtgattttccagaatctgataaaaggaccacatttaatttatgtgcttttggttgaaccgccatagacgtagctgaccccagttgccctctacgtaagaaccaggtcgatagtggtatgtgcttaagcaccccagctgagatttgtaccactttcttgtaaatgttgtatatggatgtattttgttggtaattatttttggtacttctaagatgtatatttattaaacagatttttacagtatcaaaaaaaaaaaa

SEQ ID NO: 9843 - protein, 314 aa, Rattus norvegicus
  ref <308>: DATABASE ACCESSION NUMBER: SWISS-Prot / CAA45138
  ref <309>: DATABASE ENTRY DATE: 2002-06-15
MFQPAGHGQDWAMEGPRDGLKKERLVDDRHDSGLDSMKDEDYEQMVKELREIRLQPQEAPLAAEPWKQQLTEDGDSFLHLAIIHEEKTLTMEVIGQVKGDLAFLNFQNNLQQTPLHLAVITNQPGIAEALLKAGCDPELRDFRGNTPLHLACEQGCLASVAVLTQTCTPQHLHSVLQATNYNGHTCLHLASIHGYLGIVEHLVTLGADVNAQEPCNGRTALHLAVDLQNPDLVSLLLKCGADVNRVTYQGYSPYQLTWGRPSTRIQQQLGQLTLENLQTLPESEDEESYDTESEFTEDELPYDDCVFGGQRLTL

SEQ ID NO: 9844 - DNA, 1550 bp, Homo sapiens
  ref <308>: DATABASE ACCESSION NUMBER: Refseq / NM_020529
  ref <309>: DATABASE ENTRY DATE: 2000-11-02
tgccgccgtcccgcccgccagcgccccagcgaggaagcagcgcgcagcccgcggcccagcgcacccgcagcagcgcccgcagctcgtccgcgccatgttccaggcggccgagcgcccccaggagtgggccatggagggcccccgcgacgggctgaagaaggagcggctactggacgaccgccacgacagcggcctggactccatgaaagacgaggagtacgagcagatggtcaaggagctgcaggagatccgcctcgagccgcaggaggtgccgcgcggctcggagccctggaagcagcagctcaccgaggacggggactcgttcctgcacttggccatcatccatgaagaaaaggcactgaccatggaagtgatccgccaggtgaagggagacctggctttcctcaacttccagaacaacctgcagcagactccactccacttggctgtgatcaccaaccagccagaaattgctgaggcacttctgggagctggctgtgatcctgagctccgagactttcgaggaaatacccccctacaccttgcctgtgagcagggctgcctggccagcgtgggagtcctgactcagtcctgcaccaccccgcacctccactccatcctgaaggctaccaactacaatggccacacgtgtctacacttagcctctatccatggctacctgggcatcgtggagcttttggtgtccttgggtgctgatgtcaatgctcaggagccctgtaatggccggactgcccttcacctcgcagtggacctgcaaaatcctgacctggtgtcactcctgttgaagtgtggggctgatgtcaacagagttacctaccagggctattctccctaccagctcacctggggccgcccaagcacccggatacagcagcagctgggccagctgacactagaaaaccttcagatgctgccagagagtgaggatgaggagagctatgacacagagtcagagttcacggagttcacagaggacgagctgccctatgatgactgtgtgtttggaggccagcgtctgacgttatgagtgcaaaggggctgaaagaacatggacttgtatatttgtacaaaaaaaaagttttatttttctaaaaaaagaaaaaagaagaaaaaatttaaagggtgtacttatatccacactgcacactgcctagcccaaaacgtcttattgtggtaggatcagccctcattttgttgcttttgtgaactttttgtaggggacgagaaagatcattgaaattctgagaaaacttcttttaaacctcacctttgtggggtttttggagaaggttatcaaaaatttcatggaaggaccacattttatatttattgtgcttcgagtgactgaccccagtggtatcctgtgacatgtaacagccaggagtgttaagcgttcagtgatgtggggtgaaaagttactacctgtcaaggtttgtgttaccctcctgtaaatggtgtacataatgtattgttggtaattattttggtacttttatgatgtatatttattaaagagatttttacaaatg

SEQ ID NO: 9845 - protein, 317 aa, Homo sapiens
  ref <308>: DATABASE ACCESSION NUMBER: SWISS-Prot / P25963
  ref <309>: DATABASE ENTRY DATE: 2002-06-15
MFQAAERPQEWAMEGPRDGLKKERLLDDRHDSGLDSMKDEEYEQMVKELQEIRLEPQEVPRGSEPWKQQLTEDGDSFLHLAIIHEEKALTMEVIRQVKGDLAFLNFQNNLQQTPLHLAVITNQPEIAEALLGAGCDPELRDFRGNTPLHLACEQGCLASVGVLTQSCTTPHLHSILKATNYNGHTCLHLASIHGYLGIVELLVSLGADVNAQEPCNGRTALHLAVDLQNPDLVSLLLKCGADVNRVTYQGYSPYQLTWGRPSTRIQQQLGQLTLENLQMLPESEDEESYDTESEFTEFTEDELPYDDCVFGGQRLTL

SEQ ID NO: 9846 - DNA, 1508 bp, Rattus norvegicus; identical to SEQ ID NO: 9842
  ref <308>: DATABASE ACCESSION NUMBER: EMBL / X63594
  ref <309>: DATABASE ENTRY DATE: 1992-02-10

SEQ ID NO: 9847 - protein, 314 aa, Rattus norvegicus; identical to SEQ ID NO: 9843
  ref <308>: DATABASE ACCESSION NUMBER: SWISS-Prot / CAA45138
  ref <309>: DATABASE ENTRY DATE: 2002-06-15

SEQ ID NO: 9848 - DNA, 1550 bp, Homo sapiens; identical to SEQ ID NO: 9844
  ref <308>: DATABASE ACCESSION NUMBER: Refseq / NM_020529
  ref <309>: DATABASE ENTRY DATE: 2000-11-02

SEQ ID NO: 9849 - protein, 317 aa, Homo sapiens; identical to SEQ ID NO: 9845
  ref <308>: DATABASE ACCESSION NUMBER: SWISS-Prot / P25963
  ref <309>: DATABASE ENTRY DATE: 2002-06-15

SEQ ID NO: 9850 - DNA, 1508 bp, Rattus norvegicus; identical to SEQ ID NO: 9842
  ref <308>: DATABASE ACCESSION NUMBER: EMBL / X63594
  ref <309>: DATABASE ENTRY DATE: 1992-02-10

SEQ ID NO: 9851 - protein, 314 aa, Rattus norvegicus; identical to SEQ ID NO: 9843
  ref <308>: DATABASE ACCESSION NUMBER: SWISS-Prot / CAA45138
  ref <309>: DATABASE ENTRY DATE: 2002-06-15

SEQ ID NO: 9852 - DNA, 1550 bp, Homo sapiens; identical to SEQ ID NO: 9844
  ref <308>: DATABASE ACCESSION NUMBER: Refseq / NM_020529
  ref <309>: DATABASE ENTRY DATE: 2000-11-02

SEQ ID NO: 9853 - protein, 317 aa, Homo sapiens; identical to SEQ ID NO: 9845
  ref <308>: DATABASE ACCESSION NUMBER: SWISS-Prot / P25963
  ref <309>: DATABASE ENTRY DATE: 2002-06-15

SEQ ID NO: 9854 - DNA, 1508 bp, Rattus norvegicus; identical to SEQ ID NO: 9842
  ref <308>: DATABASE ACCESSION NUMBER: EMBL / X63594
  ref <309>: DATABASE ENTRY DATE: 1992-02-10

SEQ ID NO: 9855 - protein, 314 aa, Rattus norvegicus; identical to SEQ ID NO: 9843
  ref <308>: DATABASE ACCESSION NUMBER: SWISS-Prot / CAA45138
  ref <309>: DATABASE ENTRY DATE: 2002-06-15

SEQ ID NO: 9856 - DNA, 1550 bp, Homo sapiens; identical to SEQ ID NO: 9844
  ref <308>: DATABASE ACCESSION NUMBER: Refseq / NM_020529
  ref <309>: DATABASE ENTRY DATE: 2000-11-02

SEQ ID NO: 9857 - protein, 317 aa, Homo sapiens; identical to SEQ ID NO: 9845
  ref <308>: DATABASE ACCESSION NUMBER: SWISS-Prot / P25963
  ref <309>: DATABASE ENTRY DATE: 2002-06-15

SEQ ID NO: 9858 - DNA, 2446 bp, Rattus norvegicus
  ref <308>: DATABASE ACCESSION NUMBER: EMBL / X63854
  ref <309>: DATABASE ENTRY DATE: 1992-05-13
cgtcgctgcgcacccagaagacccagtttgggaggaagcagatttcagaagctctcctgaggtgccgctccgcagccgcagaccccaccatggcgctgtcccacccgaggccctgggcctctctgctgctggtggacctggctttacttgggttgctacaaagctctctgggaactctgcttcccccggggctgccaggactatggctggagggcaccctgcgacttggagtgctgtggggactgctaaaagtgggagggctgctgagactcgtggggacctttctgcccttgctctgcctgactaaccccctgtttttctcgctgagagccctggtgggaagcaccatgagcacctcagtagtcagagtggcttctgcctcttggggctggctgcttgctgactatggagccgtggcgttgagccttgccgtgtgggctgtgctgagccccgctggagcacaggagaaggaaccaggccaggagaataacagagcactcatgatacggttgctgaggctgtccaagccggatctgcctttcctcatcgttgccttcatctttcttgcgatggctgtgtggtgggagatgttcatccctcattattcgggtcgtgtgattgacatcctgggaggtgattttgacccagacgcctttgcgagcgccatctttttcatgtgcttattctctgttgggagctccctctctgcaggctgccgaggaggctccttcctctttgccgagtccaggatcaacctgcgcatacgagagcagcttttctcatctttgttgcgccaagaccttgcattcttccaggagaccaagacaggggagctgaactcacggctgagctcggacacctccctgatgagccagtggctctctttaaatgccaatatcctgctgcggagcctggtgaaggtggtggggctgtactacttcatgctccaggtctccccgagacttaccttcctctccctgctggacctgcccctcacaatagcagccgagaaggtgtacaacccccgccatcaggctgtgctaaaggagatccaggatgcagtggcgaaggcagggcaggtggtgcgtgaggccgtaggaggcctgcagaccgtgagaagctttggggcggaggagcaggaagtcagacgctacaaggaggccctggagcgatgtcgacagctgtggtggcgccgagacctggaaaaaagcttgtatttagttatacagagggtaatggccttgggcatgcaggtgctgattctgaacgtcggtgtgcagcagatcctggctggggaggtcacccggggcggcctgctctccttcctgctgtatcaggaggaagtggggcaccatgtccagaacctggtatacatgtatggggatatgctgagcaacgtgggtgctgcggaaaaggttttttcctacttggaccgaaggccaaatctgccgaatcctgggaccctggcccctcccaggctggaggggcgcgtggaatttcaagatgtctccttctcgtaccccagtcgccccgagaagcctgtgctccagggcctgacgttcaccctgcatcctggaaaggtgacggctttggtgggacccaatgggtcagggaagagcaccgtggccgccctgctgcagaacctgtaccagcccaccgggggccagctgctgctggatggcgagcccctggtccagtacgatcatcactacctgcaccgccaggtggttctggtggggcaggagcctgtgctgttctccggttctgtcaaggacaatattgcctatggcctgagggactgtgaggacgctcaagtgatggctgctgcccaggcggcctgtgcagacgacttcataggggaaatgacgaatggaataaacacagaaatcggggagaaagggagccagttagctgtgggacagaaacaacgtctggccattgcccgggcccttgtgcggaacccgcgggtcctcatcctggatgaggctaccagtgccctggacgccgagtgcgagcaggcccttcagacctggagatcgcaggaggacaggacgatgctggtcattgctcaccggctgcacacggttcagaatgctgaccaagttctggtgctcaagcaggggcagctggtggagcacgaccagctcagggatgagcaggatgtctacgctcacttggtacagcagcggctggaggcgtgaggcctccagacactgagccctctcaggactgtggccaggatctgacccacagggactgtgctggaggctagcgtcaggataaagattgggaccctttggactttgtttattttggtgggcttggtgggtgagggccaggggatgggatggttgctgggtggggtgggtggtttaaacattatttttttctaaatataaaaataataaatatatatataatactttaaaaaaaaaaaaaaaaaaaa

SEQ ID NO: 9859 - protein, 703 aa, Rattus norvegicus
  ref <308>: DATABASE ACCESSION NUMBER: SWISS-Prot / P36372
  ref <309>: DATABASE ENTRY DATE: 2002-06-15
MALSHPRPWASLLLVDLALLGLLQSSLGTLLPPGLPGLWLEGTLRLGVLWGLLKVGGLLRLVGTFLPLLCLTNPLFFSLRALVGSTMSTSVVRVASASWGWLLADYGAVALSLAVWAVLSPAGAQEKEPGQENNRALMIRLLRLSKPDLPFLIVAFIFLAMAVWWEMFIPHYSGRVIDILGGDFDPDAFASAIFFMCLFSVGSSLSAGCRGGSFLFAESRINLRIREQLFSSLLRQDLAFFQETKTGELNSRLSSDTSLMSQWLSLNANILLRSLVKVVGLYYFMLQVSPRLTFLSLLDLPLTIAAEKVYNPRHQAVLKEIQDAVAKAGQVVREAVGGLQTVRSFGAEEQEVRRYKEALERCRQLWWRRDLEKSLYLVIQRVMALGMQVLILNVGVQQILAGEVTRGGLLSFLLYQEEVGHHVQNLVYMYGDMLSNVGAAEKVFSYLDRRPNLPNPGTLAPPRLEGRVEFQDVSFSYPSRPEKPVLQGLTFTLHPGKVTALVGPNGSGKSTVAALLQNLYQPTGGQLLLDGEPLVQYDHHYLHRQVVLVGQEPVLFSGSVKDNIAYGLRDCEDAQVMAAAQAACADDFIGEMTNGINTEIGEKGSQLAVGQKQRLAIARALVRNPRVLILDEATSALDAECEQALQTWRSQEDRTMLVIAHRLHTVQNADQVLVLKQGQLVEHDQLRDEQDVYAHLVQQRLEA

SEQ ID NO: 9860 - DNA, 2824 bp, Homo sapiens
  ref <308>: DATABASE ACCESSION NUMBER: EMBL / X57522
  ref <309>: DATABASE ENTRY DATE: 1992-07-01
gcggccgctttcgatttcgctttcccctaaatggctgagcttctcgccagcgcaggatcagcctgttcctgggactttccgagagccccgccctcgttccctcccccagccgccagtaggggaggactcggcggtacccggagcttcaggccccaccggggcgcggagagtcccagacccggccgggaccgggacggcgtccgagtgccaatggctagctctaggtgtcccgctccccgcgggtgccgctgcctccccggagcttctctcgcatggctggggacagtactgctacttctcgccgactgggtgctgctccggaccgcgctgccccgcatattctccctgctggtgcccaccgcgctgccactgctccgggtctgggcggtgggcctgagccgctgggccgtgctctggctgggggcctgcggggtcctcagggcaacggttggctccaagagcgaaaacgcaggtgcccagggctggctggctgctttgaagccattagctgcggcactgggcttggccctgccgggacttgccttgttccgagagctgatctcatggggagcccccgggtccgcggatagcaccaggctactgcactggggaagtcaccctaccgccttcgttgtcagttatgcagcggcactgcccgcagcagccctgtggcacaaactcgggagcctctgggtgcccggcggtcagggcggctctggaaaccctgtgcgtcggcttctaggctgcctgggctcggagacgcgccgcctctcgctgttcctggtcctggtggtcctctcctctcttggggagatggccattccattctttacgggccgcctcactgactggattctacaagatggctcagccgataccttcactcgaaacttaactctcatgtccattctcaccatagccagtgcagtgctggagttcgtgggtgacgggatctataacaacaccatgggccacgtgcacagccacttgcagggagaggtgtttggggctgtcctgcgccaggagacggagtttttccaacagaaccagacaggtaacatcatgtctcgggtaacagaggacacgtccaccctgagtgattctctgagtgagaatctgagcttatttctgtggtacctggtgcgaggcctatgtctcttggggatcatgctctggggatcagtgtccctcaccatggtcaccctgatcaccctgcctctgcttttccttctgcccaagaaggtgggaaaatggtaccagttgctggaagtgcaggtgcgggaatctctggcaaagtccagccaggtggccattgaggctctgtcggccatgcctacagttcgaagctttgccaacgaggagggcgaagcccagaagtttagggaaaagctgcaagaaataaagacactcaaccagaaggaggctgtggcctatgcagtcaactcctggaccactagtatttcaggtatgctgctgaaagtgggaatcctctacattggtgggcagctggtgaccagtggggctgtaagcagtgggaaccttgtcacatttgttctctaccagatgcagttcacccaggctgtggaggtactgctctccatctaccccagagtacagaaggctgtgggctcctcagagaaaatatttgagtacctggaccgcacccctcgctgcccacccagtggtctgttgactcccttacacttggagggccttgtccagttccaagatgtctcctttgcctacccaaaccgcccagatgtcttagtgctacaggggctgacattcaccctacgccctggcgaggtgacggcgctggtgggacccaatgggtctgggaagagcacagtggctgccctgctgcagaatctgtaccagcccaccgggggacagctgctgttggatgggaagccccttccccaatatgagcaccgctacctgcacaggcaggtggctgcagtgggacaagagccacaggtatttggaagaagtcttcaagaaaatattgcctatggcctgacccagaagccaactatggaggaaatcacagctgctgcagtaaagtctggggcccatagtttcatctctggactccctcagggctatgacacagaggtagacgaggctgggagccagctgtcagggggtcagcgacaggcagtggcgttggcccgagcattgatccggaaaccgtgtgtacttatcctggatgatgccaccagtgccctggatgcaaacagccagttacaggtggagcagctcctgtacgaaagccctgagcggtactcccgctcagtgcttctcatcacccagcacctcagcctggtggagcaggctgaccacatcctctttctggaaggaggcgctatccgggaggggggaacccaccagcagctcatggagaaaaaggggtgctactgggccatggtgcaggctcctgcagatgctccagaatgaaagccttctcagacctgcgcactccatctccctcccttttcttctctctgtggtggagaaccacagctgcagagtagcagctgcctccaggatgagttacttgaaatttgccttgagtgtgttacctcctttccaagctcctcgtgataatgcagacttcctggagtacaaacacaggatttgtaattcctactgtaacggagtttagagccagggctgatgctttggtgtggccagcactctgaaactgagaaatgttcagaatgtacggaaagatgatcagctattttcaacataactgaaggcatatgctggcccataaacaccctgtaggttcttgatatttataataaaattggtgttttgt

SEQ ID NO: 9861 - protein, 748 aa, Homo sapiens
  ref <308>: DATABASE ACCESSION NUMBER: SWISS-Prot / Q03518
  ref <309>: DATABASE ENTRY DATE: 2002-06-15
MASSRCPAPRGCRCLPGASLAWLGTVLLLLADWVLLRTALPRIFSLLVPTALPLLRVWAVGLSRWAVLWLGACGVLRATVGSKSENAGAQGWLAALKPLAAALGLALPGLALFRELISWGAPGSADSTRLLHWGSHPTAFVVSYAAALPAAALWHKLGSLWVPGGQGGSGNPVRRLLGCLGSETRRLSLFLVLVVLSSLGEMAIPFFTGRLTDWILQDGSADTFTRNLTLMSILTIASAVLEFVGDGIYNNTMGHVHSHLQGEVFGAVLRQETEFFQQNQTGNIMSRVTEDTSTLSDSLSENLSLFLWYLVRGLCLLGIMLWGSVSLTMVTLITLPLLFLLPKKVGKWYQLLEVQVRESLAKSSQVAIEALSAMPTVRSFANEEGEAQKFREKLQEIKTLNQKEAVAYAVNSWTTSISGMLLKVGILYIGGQLVTSGAVSSGNLVTFVLYQMQFTQAVEVLLSIYPRVQKAVGSSEKIFEYLDRTPRCPPSGLLTPLHLEGLVQFQDVSFAYPNRPDVLVLQGLTFTLRPGEVTALVGPNGSGKSTVAALLQNLYQPTGGQLLLDGKPLPQYEHRYLHRQVAAVGQEPQVFGRSLQENIAYGLTQKPTMEEITAAAVKSGAHSFISGLPQGYDTEVDEAGSQLSGGQRQAVALARALIRKPCVLILDDATSALDANSQLQVEQLLYESPERYSRSVLLITQHLSLVEQADHILFLEGGAIREGGTHQQLMEKKGCYWAMVQAPADAPE

SEQ ID NO: 9862 - DNA, 1607 bp, Rattus norvegicus
  ref <308>: DATABASE ACCESSION NUMBER: EMBL / X64401
  ref <309>: DATABASE ENTRY DATE: 1997-02-25
ggatgcagagcatcagaggcccagctagagggacaacacagaggagtaatttgctgacagacctgcagggatggacctgctttcagctctcacactggaaacctgggtcctcctggcagtcgtcctggtgctcctctacggatttgggacccgcacacatggacttttcaagaaacaggggattcctgggcccaaacctctgcctttttttggcactgtgctgaattactatatgggtttatggaaattcgatgtggagtgccataaaaagtatggaaaaatatgggggttgtttgatggtcaaatgcctctgtttgccatcacggacacagaaatgatcaagaatgtgctagtgaaggaatgcttttctgtcttcacaaaccggcgggattttggcccagtggggattatggggaaagctgtctctgtagctaaggatgaggagtggaagagatatagagccttgctgtcccccacgttcaccagtggaagactcaaggagatgttccccatcattgaacagtatggagacattttggtaaagtacttgaagcaagaggcggagacaggcaagcctgtcaccatgaaaaaagtgtttggtgcctacagcatggatgtgatcaccagcacatcatttggagtgaacgtcgattcccttaacaacccaaaggatccttttgtggagaaagccaagaagctcttaagaattgatttttttgatccgttgttcttgtcagtagtactctttccattcctcacgccagtatatgagatgttaaacatctgcatgttcccaaaagattcaatagaatttttcaaaaaatttgtgtacagaatgaaggaaacccgcctggattctgtgcagaagcatcgagtggattttcttcagctgatgatgaatgctcataatgattctaaagacaaagaatctcatacagccctatccgatatggagatcacagcccagtcaatcatttttatttttgctggatatgaacccaccagcagcacactttcctttgtcctgcattccctggccactcacccagatacacagaagaaactgcaggaggagatcgacagggctctgcccaataaggcacctcccacctatgatactgtgatggaaatggaatacctggatatggtgttgaatgaaaccctcagattgtatccaattggtaatagacttgagagagtctgtaaaaaagatgttgaaatcaatggtgtgtttatgcccaaagggtcagtggtcatgattccatcttatgctcttcaccgtgatccacagcactggccagagcctgaggaatttcgcccagaaaggttcagcaaggagaacaagggcagcattgatccttatgtatatctgccctttggaaatggacccaggaactgcattggcatgaggtttgctctcatgaatatgaaactcgctctcactaaagttctgcaaaacttctccttccagccttgtaaggaaacacagatacctctgaaattaagcagacaaggacttcttcaaccaacaaaacccattattctaaaggttgtgccacgggatgaaatcataactggatcatgattttccctcaaggagttctgct

SEQ ID NO: 9863 - protein, 504 aa, Rattus norvegicus; identical to SEQ ID NO: 3045
  ref <308>: DATABASE ACCESSION NUMBER: SWISS-Prot / P04800
  ref <309>: DATABASE ENTRY DATE: 2002-06-15

SEQ ID NO: 9864 - DNA, 1707 bp, Homo sapiens; identical to SEQ ID NO: 3046
  ref <308>: DATABASE ACCESSION NUMBER: EMBL / J04813
  ref <309>: DATABASE ENTRY DATE: 2002-06-08

SEQ ID NO: 9865 - protein, 502 aa, Homo sapiens; identical to SEQ ID NO: 3047
  ref <308>: DATABASE ACCESSION NUMBER: SWISS-Prot / P20815
  ref <309>: DATABASE ENTRY DATE: 2002-06-15

SEQ ID NO: 9866 - DNA, 1430 bp, Rattus norvegicus
  ref <308>: DATABASE ACCESSION NUMBER: EMBL / X64403
  ref <309>: DATABASE ENTRY DATE: 1993-06-30
ggccgcggtggcggaacgggcggaggctgccggtttcgtaaccgtcgctcctcctcgccgactcgcaggctgcgaggcctgggtagggtcggaccgcgccgcgcggggccgctcggagtggaggccgtctgggggcgggcgggccggccggaggcgcaggtacatgtgaagattttttggcagttgagtgtggccttctcggatcacactgctctgatttctacgtgttctgtgttggtggaggaacgggcccaaatgagcaagctgtcgcagccagcctcgactgcaggagtgaacgggatcagtgtcattcacactcaggcacatgccagcggcttacagcaggttcctcagctggtgcccgctgggcctgggggaggaggcaaagctgtgcctccaagcaagcaaagcaagaagagctcacccatggatcgaaatagcgatgagtaccgccagcgcagagagcggaacaatatggctgtgaaaaagagccggttaaaaagcaagcagaaagctcaagatacactgcagagagtaaaccagctcaaggaggagaacgagcggctggaagccaaaattaagttgctgacaaaggaattaagtgtactgaaagacttgtttcttgagcatgcgcacaacctcgcagacaatgtgcagcccatcagcacggaaactacggtggcaaattctgataacacagggcagtagatctccttccaggcgccacagccttgtgacttgaacatgagaggtgtgaccaccctgcaccccttggttcagtggctgagctcggtcttgttccattggaggttattttttaggctcagcactggacagctggttagccatgtaatttatctggtcttaaatgataatggatttttgaagcactaaaagaaaacttagggtttatggttaaaataaaattcctggcctttaatattcttaataaatcctcacttccccagaaatgcttcttttgtaggaaggggaaaatggaaggtcatattgaaggttctgggttctaatgagataataccttggactaggaaaagctgaattccatctgtgttcttcaatttgtgattttattctaaattgtgtatgataaattctagggctatagaaaccagccataataatttggcccaattttatagatgtataaacctgtgttagcataatcagcatcgttttttccaacacatacacattttaaaaaatgaccttaggtgaagtaaagaaatcccatcaggtcacgtcgagaggtggttaaaaatacaagttgtgtttaggaaggaaagaggtggttttgtgcttttcccccttgtttgttttaaagggcatagagtgtgattgaactttggggggccttctgcttattggatgagcattatctgtatcctaaaagacagtagccaccgtgtact

SEQ ID NO: 9867 - protein, 150 aa, Rattus norvegicus
  ref <308>: DATABASE ACCESSION NUMBER: SWISS-Prot / P26801
  ref <309>: DATABASE ENTRY DATE: 1996-10-01
MSKLSQPASTAGVNGISVIHTQAHASGLQQVPQLVPAGPGGGGKAVPPSKQSKKSSPMDRNSDEYRQRRERNNMAVKKSRLKSKQKAQDTLQRVNQLKEENERLEAKIKLLTKELSVLKDLFLEHAHNLADNVQPISTETTVANSDNTGQ

SEQ ID NO: 9868 - DNA, 1001 bp, Homo sapiens
  ref <308>: DATABASE ACCESSION NUMBER: EMBL / U20240
  ref <309>: DATABASE ENTRY DATE: 1999-06-30
gccgcggctgcggaacgggcggaggctgccggtttcgtaaccgtcgctcctcctcgctgactcgcgggctgtgaggcctgggtcggctcgggccgcaccgcgcggggccgctcggagtggaggccgcctgggggcaggcgggctagaggagcaggtacatgtgaagattttttggcagcttagcgtggaaaccattgatcaccctgctctcatttctacctgttctgtgttggcaagggagagtgcccaaatgagcaagatatcgcagcaaaacagcactccaggggtgaacggaattagtgttatccatacccaggcacatgccagcggcttacagcaggttcctcagctggtgcctgctggccctgggggaggaggcaaagctgtggctcccagcaagcagagcaaaaagagttcgcccatggatcgaaacagtgacgagtatcggcaacgccgagagaggaacaacatggctgtgaaaaagagccggttgaaaagcaagcagaaagcacaagacacactgcagagagtcaatcagctcaaagaagagaatgaacggttggaagcaaaaatcaaattgctgaccaaggaattaagtgtactcaaagatttgtttcttgagcatgcacacaaccttgcagacaacgtacagtccattagcactgaaaatacgacagcagatggcgacaatgcaggacagtagacctcaccctttccagactttagagcttgtggcttgaatgttaaaggtgtgaccaccgacaccactcatgtcaatggctgaaagttgtccatttccatgactcaaagacccattggaggctattttctgggatcagcactgaagagttgattagctaaaaatgttagccttgtaattcgaatatctggttttaaatgatagaggtttttgtgggaatcaaaatcccccaaatgttaaggtatatggtaaaaaaagaaatatctgggatcccgatgttcttaataaatcctgacttccc

SEQ ID NO: 9869 - protein, 150 aa, Homo sapiens
  ref <308>: DATABASE ACCESSION NUMBER: SWISS-Prot / P53567
  ref <309>: DATABASE ENTRY DATE: 2002-06-15
MSKISQQNSTPGVNGISVIHTQAHASGLQQVPQLVPAGPGGGGKAVAPSKQSKKSSPMDRNSDEYRQRRERNNMAVKKSRLKSKQKAQDTLQRVNQLKEENERLEAKIKLLTKELSVLKDLFLEHAHNLADNVQSISTENTTADGDNAGQ

SEQ ID NO: 9870 - DNA, 534 bp, Rattus norvegicus
  ref <308>: DATABASE ACCESSION NUMBER: EMBL / X65228
  ref <309>: DATABASE ENTRY DATE: 1996-10-07
ccttttttcgccaagatggcgccgaaagcgaagaaggaagctcctgcccctcccaaagccgaagccaaagcgaaggccttgaaagctaagaaggcagtgctgaaaggtgtccacagtcacaaaaagaagaagatccgaacgtcacccactttccggcggcccaagaccctgcggctccggaggcagccaaaatatcctcgaaagagtgcacccaggagaaacaagcttgaccactatgctatcatcaaattcccactgaccaccgagtcagctatgaagaaaatagaggacaacaacacgcttgtgttcattgtggatgttaaggccaacaagcaccagatcaaacaggccgtgaaaaaactctatgatatagatgtggccaaagtcaatactctgatacggcctgacggagagaagaaggcatatgttcgcttggctcctgattatgatgctctagatgttgccaacaagattgggatcatctaaagtgagtccagatggttaattctaaatatatactttttttccaccata

SEQ ID NO: 9871 - protein, 156 aa, Rattus norvegicus [sequence omitted]

SEQ ID NO: 9872 - DNA, 546 bp, Homo sapiens
  ref <308>: DATABASE ACCESSION NUMBER: Refseq / NM_000984
  ref <309>: DATABASE ENTRY DATE: 2001-11-27
attggagacccttttcacaagatggcgccgaaagcgaagaaggaagctcctgcccctcctaaagctgaagccaaagcgaaggctttaaaggccaagaaggcagtgttgaaaggtgtccacagccacaaaaagaagaagatccgcacgtcacccaccttccggcggccgaagacactgcgactccggagacagcccaaatatcctcggaagagcgctcccaggagaaacaagcttgaccactatgctatcatcaagtttccgctgaccactgagtctgccatgaagaagatagaagacaacaacacacttgtgttcattgtggatgttaaagccaacaagcaccagattaaacaggctgtgaagaagctgtatgacattgatgtggccaaggtcaacaccctgattcggcctgatggagagaagaaggcatatgttcgactggctcctgattacgatgctttggatgttgccaacaaaattgggatcatctaaactgagtccagctgcctaattctgaatatatatatatatatatcttttcaccat

SEQ ID NO: 9873 - protein, 156 aa, Homo sapiens [sequence omitted]

SEQ ID NO: 9874 - DNA, 1407 bp, Rattus norvegicus
  ref <308>: DATABASE ACCESSION NUMBER: EMBL / X65454
  ref <309>: DATABASE ENTRY DATE: 1996-08-09
gaattccccggaggacctgatgcctctggccacggcctacggccacgctctggagcagtatgaaggggagagctggcgcgagagcgcgcgctacctggaggcggcgctgcggctgcatcggctgctgcgcgacagtgaggccttctgccacgccaactgcagcggccccgccacctcgcagccccggcccgctcccggccccgacggcgacaacgagggtgatggcgaggattgggcgcgcgagctgcggctcttcggccacgtcctggagcgtgccgcctgtttgcggcgctgcaagcggactctgcccgccttccaagtcccctacccgtcgcggcagctactgcgcgacttccagaaccgcctgccctaccagtacctgcactacgcgcacttcaaggcgaaccgactagagaaggcggtggctgcagcctacaccttcctccagaggaaccccaagcacgagctgaccgccaagtatctcaactactacaggggaatgctggatatcggagatgagtccctcactgatctggaggcccagccctacgaggctgtgttccttcaggctgtgaagctctacaacagcggggactttcgcagcagcacagaacacatggagcgggccttggctgattatatgaccgtctttgctcggtgtctagctggctgtgaaggggcccacgagcaggtagacttcaaggacttctacccagccatagcagatctcttcgcagaatccctgcagtgcaaggtggattgtgaagccaatctcacccccaacgtaggtggcttctttgtggacaagttcgtggccaccatgtatcactacctgcagtttgcctactacaaattgaacgatgtgcaccaggctgcccgcagcgctgctagctacatgctctttgaccccaaggacagtgtcatgcagcagaacctggtatattaccgcttccaccgggctcgctggggccttgaagaggaggacttccagccccgggaggaagctgtgctctaccacaaccagacctctgaacttcgggagttgctagacttcacacacatgtaccttcagtcagatgatgagatggaactggaggagacggaatcacttccggagcctgaaaaacctctgtctgatgccgagttcgaaggcgagggcgactatgaggagggcctctatgcggactggtgcaggagccggatgccaagggtgatgaggatgaggctgagccagagcctgaactggcctaagacagtgacatggtgcactcttcaagctcaggacacctggctgggggcaggaactatttattaaaacttaaaatcggggttggggatttagctcagtggtagagcacttgcctagcaaccacaaggccctgggttcggtccctagctccggaattc

SEQ ID NO: 9875 - protein, 431 aa, Rattus norvegicus
  ref <308>: DATABASE ACCESSION NUMBER: SWISS-Prot / Q64375
  ref <309>: DATABASE ENTRY DATE: 2001-10-16
MPLATAYGHALEQYEGESWRESARYLEAALRLHRLLRDSEAFCHANCSGPATSQPRPAPGPDGDNEGDGEDWARELRLFGHVLERAACLRRCKRTLPAFQVPYPSRQLLRDFQNRLPYQYLHYAHFKANRLEKAVAAAYTFLQRNPKHELTAKYLNYYRGMLDIGDESLTDLEAQPYEAVFLQAVKLYNSGDFRSSTEHMERALADYMTVFARCLAGCEGAHEQVDFKDFYPAIADLFAESLQCKVDCEANLTPNVGGFFVDKFVATMYHYLQFAYYKLNDVHQAARSAASYMLFDPKDSVMQQNLVYYRFHRARWGLEEEDFQPREEAVLYHNQTSELRELLDFTHMYLQSDDEMELEETESLPEPEKPLSDAEFEGEGDYEEGLYADWCRSRMPRVMRMRLSQSLNWPKTVTWCTLQAQDTWLGAGTIY

SEQ ID NO: 9876 - DNA, 2347 bp, Homo sapiens
  ref <308>: DATABASE ACCESSION NUMBER: EMBL / U47621
  ref <309>: DATABASE ENTRY DATE: 1999-07-01
gcgcggcgggcatggctcgggtggcgtgggggctgctgtggttgctgctgggcagcgccggggcgcagtacgagaagtacagcttccggggcttcccgcccgaggacctgatgccgctggccgcggcgtacgggcacgctctggagcagtacgagggagagagctggcgcgagagcgcgcgctacctggaggcggcgctgcggctgcaccggctcctgcgcgacagcgaggccttctgccacgccaactgcagcggccccgcgcccgcggccaagcccgatcccgacggcggccgcgcagacgagtgggcctgcgagctgcggctcttcggccgcgtcctggagcgagccgcctgcctgcggcgctgcaagcggacgctgcccgccttccaggtgccctacccgccgcggcagctgctgcgtgacttccagagccgcctgccctaccagtacctgcactacgcgctgttcaaggctaaccggctggagaaggcggtggcggcggcctacaccttcctccagaggaacccgaagcacgagctgaccgccaagtatctcaactactatcaggggatgctggacgtcgccgacgagtccctcacggacctagaggcccagccctacgaggccgtgttcctccgggctgtgaagctctacaacagcggggatttccgcagcagcacggaggacatggagcgggccttgtcagagtacctggcagtctttgcccggtgcctggccggctgtgaaggggcccatgagcaggtggacttcaaggacttctacccggccatagcagatctctttgcagagtccctgcagtgcaaggtggactgtgaggccaatttgacccccaatgtgggtggctacttcgtggacaagttcgtggccaccatgtaccactacctgcagtttgcctactataagttgaatgatgtgcgccaggctgcccgcagcgccgccagctacatgctcttcgaccccaaggacagcgtcatgcagcagaacctggtgtattaccggttccaccgggctcgctggggcctggaagaggaggacttccagccccgggaggaggccatgctctaccacaaccagaccgccgagctgcgggagctgctggagttcacccacatgtacctgcagtcagatgatgagatggagctggaggagacagaaccgcccctggagcctgaggatgccctatctgacgccgagtttgagggggagggtgactacgaggagggcatgtatgctgactggtggcaggagccggatgccaagggtgacgaggccgaggctgagccagagcctgaactcgcatgagaaggggacaccccacaccgctcaagcttgggaagcctggtgccgatggccccaccctcaccagcctgggcagcagcaagaactatttattaaaaacttaagatgggccaggtgcggtggctcacacctgtaatcccagcattttgggaggccaaggtgggtggatcacttgaggccaggagttcaagaccagcctggccaacatgatgagacctccgtctctactaaaatacataaattagccgggtgtggtggcaggcgcctgaaatcccagctactcaagaggctgaggcaggagaatcgcttgaacctgggaggcaaaggttgcggtgaactgagattgcgccaccgcactccagcctgggcgacagagcgagactccatctttaaaaaaaaacaagacgggccggcacggtggctcacgcctgtaatcccagcactgagaggccgatcacttgaggtcaggagttcaagacctgcctggccaacatggtgaaaccccatctctactaaaaaatacaaaaattagccaggcatggtggcacacacctgtaatcgtagctgaggcaggagaatcgcctgaacccaggaggcggagcttgcagtgagccgagatcgtgccactgcactccagcctgggcgacagagtgagactccatctcaaaaaaaaaaaaaaaaaacttaagatggacacagctgactggacccccatcctgcctcacccatgggtgctgcaccccagacccatcctgccacttctatgtctctggaccacaggatggtggtggcattgcaggttggcaagtgggctgatggggtccgccctcctcactgctgagctcctcacctggacagtctcctggacaaggagtttccagctgctggctggagtctcaggccaaattgcagagggtcctccagggtcctgaagagcactggactaagagtctagtggttccagggccctgaccagtaggtgctcaataaatgtttgttgttgaatgaaaaaaaaaaaaaaaaaa

SEQ ID NO: 9877 - protein, 437 aa, Homo sapiens
  ref <308>: DATABASE ACCESSION NUMBER: SWISS-Prot / Q92791
  ref <309>: DATABASE ENTRY DATE: 2002-06-15
MARVAWGLLWLLLGSAGAQYEKYSFRGFPPEDLMPLAAAYGHALEQYEGESWRESARYLEAALRLHRLLRDSEAFCHANCSGPAPAAKPDPDGGRADEWACELRLFGRVLERAACLRRCKRTLPAFQVPYPPRQLLRDFQSRLPYQYLHYALFKANRLEKAVAAAYTFLQRNPKHELTAKYLNYYQGMLDVADESLTDLEAQPYEAVFLRAVKLYNSGDFRSSTEDMERALSEYLAVFARCLAGCEGAHEQVDFKDFYPAIADLFAESLQCKVDCEANLTPNVGGYFVDKFVATMYHYLQFAYYKLNDVRQAARSAASYMLFDPKDSVMQQNLVYYRFHRARWGLEEEDFQPREEAMLYHNQTAELRELLEFTHMYLQSDDEMELEETEPPLEPEDALSDAEFEGEGDYEEGMYADWWQEPDAKGDEAEAEPEPELA

SEQ ID NO: 9878 - DNA, 1407 bp, Rattus norvegicus; identical to SEQ ID NO: 9874
  ref <308>: DATABASE ACCESSION NUMBER: EMBL / X65454
  ref <309>: DATABASE ENTRY DATE: 1996-08-09

SEQ ID NO: 9879 - protein, 431 aa, Rattus norvegicus; identical to SEQ ID NO: 9875
  ref <308>: DATABASE ACCESSION NUMBER: SWISS-Prot / Q64375
  ref <309>: DATABASE ENTRY DATE: 2001-10-16

SEQ ID NO: 9880 - DNA, 2347 bp, Homo sapiens; identical to SEQ ID NO: 9876
  ref <308>: DATABASE ACCESSION NUMBER: EMBL / U47621
  ref <309>: DATABASE ENTRY DATE: 1999-07-01

SEQ ID NO: 9881 - protein, 437 aa, Homo sapiens; identical to SEQ ID NO: 9877
  ref <308>: DATABASE ACCESSION NUMBER: SWISS-Prot / Q92791
  ref <309>: DATABASE ENTRY DATE: 2002-06-15

SEQ ID NO: 9882 - DNA, 1407 bp, Rattus norvegicus; identical to SEQ ID NO: 9874
  ref <308>: DATABASE ACCESSION NUMBER: EMBL / X65454
  ref <309>: DATABASE ENTRY DATE: 1996-08-09

SEQ ID NO: 9883 - protein, 431 aa, Rattus norvegicus; identical to SEQ ID NO: 9875
  ref <308>: DATABASE ACCESSION NUMBER: SWISS-Prot / Q64375
  ref <309>: DATABASE ENTRY DATE: 2001-10-16

SEQ ID NO: 9884 - DNA, 2347 bp, Homo sapiens; identical to SEQ ID NO: 9876
  ref <308>: DATABASE ACCESSION NUMBER: EMBL / U47621
  ref <309>: DATABASE ENTRY DATE: 1999-07-01

SEQ ID NO: 9885 - protein, 437 aa, Homo sapiens; identical to SEQ ID NO: 9877
  ref <308>: DATABASE ACCESSION NUMBER: SWISS-Prot / Q92791
  ref <309>: DATABASE ENTRY DATE: 2002-06-15

SEQ ID NO: 9886 - DNA, 1407 bp, Rattus norvegicus; identical to SEQ ID NO: 9874
  ref <308>: DATABASE ACCESSION NUMBER: EMBL / X65454
  ref <309>: DATABASE ENTRY DATE: 1996-08-09

SEQ ID NO: 9887 - protein, 431 aa, Rattus norvegicus; identical to SEQ ID NO: 9875
  ref <308>: DATABASE ACCESSION NUMBER: SWISS-Prot / Q64375
  ref <309>: DATABASE ENTRY DATE: 2001-10-16

SEQ ID NO: 9888 - DNA, 2347 bp, Homo sapiens; identical to SEQ ID NO: 9876
  ref <308>: DATABASE ACCESSION NUMBER: EMBL / U47621
  ref <309>: DATABASE ENTRY DATE: 1999-07-01

SEQ ID NO: 9889 - protein, 437 aa, Homo sapiens; identical to SEQ ID NO: 9877
  ref <308>: DATABASE ACCESSION NUMBER: SWISS-Prot / Q92791
  ref <309>: DATABASE ENTRY DATE: 2002-06-15

SEQ ID NO: 9890 - DNA, 1227 bp, Rattus norvegicus
  ref <308>: DATABASE ACCESSION NUMBER: EMBL / X65948
  ref <309>: DATABASE ENTRY DATE: 1992-06-16
cgcggccgccttgaagatggcgtcgaccagccgtttggatgctctcccacgagtcacatgtcccaatcatccagatgcgattttagttgaggactacagagctggcgacatgatctgtcccgaatgcggcctagttgtaggggaccgggttattgatgtggggtctgaatggagaactttcagcaatgacaaagcaacgaaagacccatctcgagttggagactctcagaatcctcttctgagtgatggagatttgtccaccatgattggcaagggtacaggagcggcaagttttgatgaatttggcaattctaagtatcagaaccggagaacaatgagcagctctgatagagctatgatgaacgcattcaaggagatcacgaccatggcagacagaatcaacctcccacgcaatatagttgatcgaacaaataatttattcaagcaagtatatgagcagaagagcctgaagggaagagctaatgatgcgatagcttctgcttgtctgtacatcgcttgtagacaagaaggcgttcccaggacatttaaagaaatatgtgctgtgtctcgaatctctaagaaagaaattggccgttgttttaaactgattttgaaagctttggagacgagcgtggatctgatcacaactggggacttcatgtccaggttctgctccaacctttgcctccccaagcaagtgcagatggcagctacacacatagcccgcaaggctgtggagctggacttggttcctggcaggagtcctatctctgtggcggcagcagctatttacatggcctcccaggcttcagctgagaagcgaacacagaaagaaatcggggatattgctggtgttgctgatgttacaatccgacagtcctacagactgatctaccctcgggctccagatctcttcccttcagacttcaagtttgacaccccagtggacaaattaccccagctataagctgaggcaactaagtgtcacactcttaatgtacatggaactttgtgcatagccacacagtgctggttgagcctttaatgaggaaaaaggagatggtacgcattccacagctaagtattattgcttagtcttctgtatgtatatagtagtgcgacatatttaatgacttaaatttcttactgattctgctttcttttttagtgatctaggaaacagtattttggaagatattaaaatatgtaattctcaaataaaatttt

SEQ ID NO: 9891 - protein, 316 aa, Rattus norvegicus
  ref <308>: DATABASE ACCESSION NUMBER: SWISS-Prot / P29053
  ref <309>: DATABASE ENTRY DATE: 2002-06-15
MASTSRLDALPRVTCPNHPDAILVEDYRAGDMICPECGLVVGDRVIDVGSEWRTFSNDKATKDPSRVGDSQNPLLSDGDLSTMIGKGTGAASFDEFGNSKYQNRRTMSSSDRAMMNAFKEITTMADRINLPRNIVDRTNNLFKQVYEQKSLKGRANDAIASACLYIACRQEGVPRTFKEICAVSRISKKEIGRCFKLILKALETSVDLITTGDFMSRFCSNLCLPKQVQMAATHIARKAVELDLVPGRSPISVAAAAIYMASQASAEKRTQKEIGDIAGVADVTIRQSYRLIYPRAPDLFPSDFKFDTPVDKLPQL

SEQ ID NO: 9892 - DNA, 1268 bp, Homo sapiens
  ref <308>: DATABASE ACCESSION NUMBER: EMBL / M76766
  ref <309>: DATABASE ENTRY DATE: 2000-03-04
tgttgtgtcttgttgcgggcaccgcagtcgccgtgaagatggcgtctaccagccgtttggatgctcttccaagagtcacatgtccaaaccatccagatgcgattttagtggaggactacagagccggtgatatgatctgtcctgaatgtggcttggttgtaggtgaccgggttattgatgtgggatctgaatggcgaactttcagcaatgacaaagcaacaaaagatccatctcgagttggagattctcagaatcctcttctgagtgatggagatttgtctaccatgattggcaagggcacaggagctgcaagttttgacgaatttggcaattctaagtaccagaatcggagaacaatgagcagttctgatcgggcaatgatgaatgcattcaaagaaatcactaccatggcagacagaatcaatctacctcgaaatatagttgatcgaacaaataatttattcaagcaagtatatgaacagaagagcctgaagggaagagctaatgatgctatagcttctgcttgtctctatattgcctgtagacaagaaggggttcctaggacatttaaagaaatatgtgccgtatcacgaatttctaagaaagaaattggtcggtgttttaaacttattttgaaagcgctagaaaccagtgtggatttgattacaactggggacttcatgtccaggttctgttccaacctttgtcttcctaaacaagtacagatggcagctacacatatagcccgtaaagctgtggaattggacttggttcctgggaggagccccatctctgtggcagcggcagctatttacatggcctcacaggcatcagctgaaaagaggacccaaaaagaaattggagatattgctggtgttgctgatgttacaatcagacagtcctatagactgatctatcctcgagccccagatctgtttcctacagacttcaaatttgacaccccagtggacaaactaccacagctataaattgaggcagctaacgtcaaattcttgaatacaaaactttgcctgttgtacatagcctatacaaaatgctgggttgagcctttcatgaggaaaaacaaaagacatggtacgcattccagggctgaatactattgcttggcattctgtatgtatatactagtgaaacatatttaatgatttaaatttcttatcaaatttcttttgtagcaatctaggaaactgtattttggaagatatttgaaattatgtaattcttgaataaaacatttttcaaaactc

SEQ ID NO: 9893 - protein, 316 aa, Homo sapiens
  ref <308>: DATABASE ACCESSION NUMBER: SWISS-Prot / Q00403
  ref <309>: DATABASE ENTRY DATE: 2002-06-15
MASTSRLDALPRVTCPNHPDAILVEDYRAGDMICPECGLVVGDRVIDVGSEWRTFSNDKATKDPSRVGDSQNPLLSDGDLSTMIGKGTGAASFDEFGNSKYQNRRTMSSSDRAMMNAFKEITTMADRINLPRNIVDRTNNLFKQVYEQKSLKGRANDAIASACLYIACRQEGVPRTFKEICAVSRISKKEIGRCFKLILKALETSVDLITTGDFMSRFCSNLCLPKQVQMAATHIARKAVELDLVPGRSPISVAAAAIYMASQASAEKRTQKEIGDIAGVADVTIRQSYRLIYPRAPDLFPTDFKFDTPVDKLPQL

SEQ ID NO: 9894 - DNA, 3233 bp, Rattus norvegicus
  ref <308>: DATABASE ACCESSION NUMBER: EMBL / X66022
  ref <309>: DATABASE ENTRY DATE: 1997-02-17
tgggaggaccgacccggcagggacctgctgggggcaggacccggggagcaagatggccacggtcatccccagccccctgaggtggtgcgggcgtgcgcgaggcgggggagtcagcgcgggcgagtctgtgtggctgcgagtgcgtgtgtgtgtatgtgtgcggccgctgggggtggggctggtggggtgtcagggggctgtcaccgcgtgcgggggtgcgagggtatgtgactgtgggtgtctggcaagaatggtgtacgacgcgttgctcctggacgggtggagggcgtgggggaggggtctccaaggatttttaggggaaaggggtcatgtcccctcccagggatgctagggtttgagagagggtaaatgatttagagaagatggggcctgggtacactcgagtcgaacccacgctacctttgtcttggggtgtggagtgtgttgtgagacttatacattgctttttgttttgtagctgaatgtgtgggtatgtataggatttcttttattctgcactacctatctgagtatttgggtctctaagtgtgtgcacatgtctggtgaaactgcaccatttatgttccgtgtctctggatagggagctgtagggataggtctaaatatttgcacgaacagaggcagaccggactgtccctctgtttccaaggggtgtacctgtgtttgtgaatgtattttaaatttgggtttgtttttccccggagggtgcgaatgtgtgtatgtgtacctgtataaatctctgtgatgtctttgtattgtgtgtttggctgaagtgtctctggatgaatatgtaagcgcatatgtaaatgattctagggtccctatcttttgacaacgtgtgactgttgggatgagtgttgtgtggtgtgtttccatgttgtggggctttgtggataatcttcctctggacacatctggggtctctggatacatggcattcatagccttggcgaggacttctaccgggaggccatcgagcactgccgcagctacaacgcgcgcctgtgtgccgagcgcagcctgcgcctgcccttcctcgactctcagaccggcgtggctcagaacaactgctacatctggatggagaagacccaccgcgggcctggtttggccccaggacagatctacacttaccccgcccgctgttggaggaagaaacggagactcaacatcctggaggaccccaggctccggccctgcgagtacaagatcgattgtgaggcacctctgaagaaggagggtggcctcccggaagggccagtccttgaggctctgctgtgcgctgagactggagagaagaaagtggagttgaaggaggaggagaccattatggactgtcagaaacagcagttgctggagtttccgcatgatctcgaggtagaagacttggaggaagacattcccaggaggaagaacagggccaaaggaaaggcgtatggcattggaggtctccggaaacgccaggacaacgcatccttggaggaccgagacaagccgtacgtctgtgatatctgtgggaagaggtataagaaccggccagggcttagctaccactacacccacacccacctggctgaggaggagggggaggagcacactgagcgccacgccctgcctttccaccggaaaaacaaccataaacagttttacaaagaattggcctgggtccccgaggcacagaggaaacacacagccaagaaagcaccagatggcactgtcatccccaatggctactgtgacttttgcctggggggctccaagaagactggatgtcctgaggacctcatctcctgtgcggactgcgggcgatcaggacatccctcgtgtttacagttcacggtgaacatgaccgcagccgtgcggacctaccgctggcagtgtatcgaatgcaagtcctgcagcctgtgtggcacctcggagaatgacggtgccagctgggcgggtctcaccccccaggaccagctgctgttctgtgacgactgcgatcggggttaccacatgtactgcctgagccctcccatggcggagcccccggaagggagctggagttgccacctctgtctccggcacttgaaagaaaaggcctccgcttacatcaccctgacttagacctggctctgcttctccaggacctttgggtggtgctatcctcggcctcttggagctcctgacttttcccgcctggtgtccccagtggaagggatagggtgaagcccagagaggggccaaggcggtctccctctgcaagtggaatgttaccctgagggagggtgggtccagcagggtccctcctgtcccccatcttcattccttgacaagtgggcaccaggcttctgctcccctcaaagccataccgcctctgggcgggcatagaggggtagtggatgccagccagtggcacggaaaaagcctttttctaaagaaaaagacaaaacgtgaaaaaaaaaaaaggaaaaaaaaaaagaaattaatatatacaaagattcctctaagcctggctgggtggggggccactgagtgtctgctgggacctgactttaccagtttcctgaatggcccctccccaccccatttctggagttgcaattgtctcaactcccatctgaggtgggtaccacaccttcctcacagccaggccaggtgggcatggtgcccacacactgccccctcccggtacccaccgtggatactgcatgatgtgaaccatggttttgaactcttcctgcccctcctttgagagccccgccctgcgcccacccggtgcctgccagacctggggcttgcagctgggggaggccggtggggtgaggcaggcaggcaggcagccagcccgctgcaatgagaagaagcacagattgcaatggactcagttgttttttgttttttgtttttgtttttgtttttttttctttctttctcccttctcaaccctttccttccctacccagccaggctgggctgcctccttccccccatcgctagccattttgggggtggcaaggaggtgtggtcgtttctcgtggttgtgtgtgtttgttgttcgggttttaaaaaagggaaattgagactgcaagtggggggaggtggagggtctgggggagtctgccccccaacccaggagtaccccccttgccaccaagtctcctttattgcctgcctctgctgtgaattaacttgttctgtgtattaaactgggccggacccctctgccc

SEQ ID NO: 9895 - protein, 397 aa, Rattus norvegicus
  ref <308>: DATABASE ACCESSION NUMBER: SWISS-Prot / P56163
  ref <309>: DATABASE ENTRY DATE: 2002-06-15
MATVIPSPLSLGEDFYREAIEHCRSYNARLCAERSLRLPFLDSQTGVAQNNCYIWMEKTHRGPGLAPGQIYTYPARCWRKKRRLNILEDPRLRPCEYKIDCEAPLKKEGGLPEGPVLEALLCAETGEKKVELKEEETIMDCQKQQLLEFPHDLEVEDLEEDIPRRKNRAKGKAYGIGGLRKRQDNASLEDRDKPYVCDICGKRYKNRPGLSYHYTHTHLAEEEGEEHTERHALPFHRKNNHKQFYKELAWVPEAQRKHTAKKAPDGTVIPNGYCDFCLGGSKKTGCPEDLISCADCGRSGHPSCLQFTVNMTAAVRTYRWQCIECKSCSLCGTSENDGASWAGLTPQDQLLFCDDCDRGYHMYCLSPPMAEPPEGSWSCHLCLRHLKEKASAYITLT

SEQ ID NO: 9896 - DNA, 1421 bp, Homo sapiens
  ref <308>: DATABASE ACCESSION NUMBER: EMBL / U43843
  ref <309>: DATABASE ENTRY DATE: 1999-07-01
agcaagatggccacggtcatccccagccccctgagcctaggcgaggacttctaccgcgaggccatcgagcactgccgcagttacaacgcgcgcctgtgcgccgagcgcagcctgcgactgcccttcctcgactcgcagaccggcgtggcccagaacaactgctacatctggatggagaagacccaccgcgggccgggtttggccccgggacagatttacacgtaccccgcccgctgttggaggaagaaacggagactcaacatcctggaggaccccagactcaggccctgcgagtacaagatcgactgtgaagcacccctgaagaaggagggtggcctcccggaagggccggtcctcgaggctctactgtgtgcagagacgggggagaagaagattgagctgaaggaggaggagaccattatggactgtcagaaacagcagttgctggagtttccgcatgacctcgaggtggaagacttggaggatgacattcccaggaggaagaacagggccaaaggaaaggcatatggcatcgggggtctccggaaacgccaggacaccgcttccctggaggaccgagacaagccgtatgtctgtgataagttttacaaagaattggcctgggtccctgaggcacaaaggaaacacacagccaagaaggcgcccgacggcactgtcatccccaacggctactgtgacttctgcctggggggctccaagaagacggggtgtcccgaggacctcatctcctgtgcggactgtgggcgatcaggacacccctcgtgtttacaattcacggtgaacatgacggcagccgtgcggacctaccgctggcagtgcatcgagtgcaaatcctgcagcctgtgcggaacctccgagaacgacggtgccagctgggcgggtctcaccccccaggaccagctgctgttttgtgatgactgcgatcggggttaccacatgtactgcctgagtccccccatggcggagcccccggaagggagctggagctgtcacctctgtctccggcacctgaaggaaaaggcttctgcttacatcaccctcacctaggccggctcggctcgccgcgactctggggtggtgctcgcctacctgcctctccgagctcctcaattctcccccaccctgaacatcccgcagggggagggggagagggggaagccgagagggggctgggccaccccctcccctctgtgcaagtggaatgtctgccctgtgggtgggtgggcccggccagggcctctccctccctccctccctctctgtcccttggcaaatggacaccaggggcttctcccctcaaagccatacgcctctgggcgggcatggggggtggtgggtgccagccaggggcatggacagagcctttttctaaagaaaaagacaaaaagttaaaaaaaaaa

SEQ ID NO: 9897 - protein, 353 aa, Homo sapiens
  ref <308>: DATABASE ACCESSION NUMBER: SWISS-Prot / Q92782
  ref <309>: DATABASE ENTRY DATE: 2002-06-15
MATVIPSPLSLGEDFYREAIEHCRSYNARLCAERSLRLPFLDSQTGVAQNNCYIWMEKTHRGPGLAPGQIYTYPARCWRKKRRLNILEDPRLRPCEYKIDCEAPLKKEGGLPEGPVLEALLCAETGEKKIELKEEETIMDCQKQQLLEFPHDLEVEDLEDDIPRRKNRAKGKAYGIGGLRKRQDTASLEDRDKPYVCDKFYKELAWVPEAQRKHTAKKAPDGTVIPNGYCDFCLGGSKKTGCPEDLISCADCGRSGHPSCLQFTVNMTAAVRTYRWQCIECKSCSLCGTSENDGASWAGLTPQDQLLFCDDCDRGYHMYCLSPPMAEPPEGSWSCHLCLRHLKEKASAYITLT

SEQ ID NO: 9898 - DNA, 3586 bp, Rattus norvegicus
  ref <308>: DATABASE ACCESSION NUMBER: EMBL / X66140
  ref <309>: DATABASE ENTRY DATE: 1992-09-29
caagaacaaggagtagggtgaagcttttctcagataacccttcagaatgtttcccacaggtatatttttgatgagtgtccttatttctcagatgcaaggaagagggattgttggagtagagggtcaagaactggttcatcctaaaaagctatccctgctacagaaacgggatcttgaacgcatccatgactctgatacaccggaggaatatgaagaagaattgttgtatgaaataaaattggggagaaaaactttaacccttcaccttctgaaagcaagggaattcctcgctctaaattacagtgaaacatactacaacataaagagagaaatggtcaccaggcatccacagatcttggatcactgtttttaccaaggctccatcatacatgaatttgattctgcggcaagcatcagcacttgtaatggtctgagaggcttcttcagggtaaatgaccagcggtacctcattgaaccagtaaaatactcagatgagggagatcatttggtgttcaaatacaatgtcaaggcaccttatgctaccaattactcctgtgaagggctgaattttaccaagaagtctactctgatagatgctaagattatagaagagcataaagtagaagactatcacaaagaaaagttcattgaattgtttgttgttgctgatgaatttgtgtaccgcaggaacagtaaaccccaaaacaagttaagaaaacgaatttgggggatggtcaattttgtcaacatgatttataaagccttgaacattcgtgtgactttgactggcatggaaatatggtcggctggagatgagatagaaatagtgtccaatctagaaagtaccttattgcatttttcgacttggcaagaaacagttctcaaaaagaggaaggactttgatcatgtgattttactgagtgggaagtggctctacacatctatgcaaggaattgcttacccaggagggatatgtcagacccttcgttcatgcagtgttgttaaggatcttctgccagatgtaaatataattggcaacaggatggcacatcagctgggacacagcctgggcatgcggcatgatgactttccatgcacctgtcctttggggaaatgtgtgatgggtgcaggaagcatccctgcaataaaattcagcaaatgcagccaaacccaataccagcaatttctgaagaatcagaaaccagcatgcatactcaacaacccacttccggaagaattcaatgattatccgttctgtgggaacaagaaggtggatgagggagaagagtgtgactgtgggccagttcaggaatgcaccaatccttgctgtgatgcacacaaatgtgtcctgaagccaggattcacttgtgtagaaggagagtgctgtgaatcatgtcagatgaagaaggaaggggttatatgcagaccagcaaagaatgaatgtgatatttcggaagtgtgtactggctactcccctgagtgtcctaaagacgagtcccaagccaacgggtttccttgcaagaatggagaaggctactgctttatggggctgtgtcccactcgggatgaccagtgcgcagagttgttcagtggtggagctgaagagagtcacagcctttgctacaggatgaatcaaaagggaaacagatttggatactgcaaaaataaggacaacacgtttgttccctgtgaagagaaagatctcaaatgtggaaagatatactgcaccggaggccggcgttcagcacaccttggagaggataaaacctataaccttaagaatgtgaagcagaatatctccatcaaatgcaaaaccatgtttttataccacaattctagagacatgggcctggtgaattctggaacaaaatgtggtgagggaatggtttgcagcaatggcgaatgtatagaaatggagaaggcctacaactcaaccatctgctcttccctgtgtgatgaaaatgatgtggatgacaatgaacctgactgccagtgtgaagaaggaccaataattacagagtggggagaagccttaaaccttaccagtgtctccatcatggtcgttgtgcttgtcatggttattattggtgttggacttgtcatattactaatccgttaccagaaatgcattaagatgaagcaagttcaaagctcttctagagaaatacggggcatagagaataaagtatactttcctgatgagcatcagacgaggagtgagccaatcttcacagatatctatcccctacataatacggcagagtcattggaaagagttccttccaccttttcaagtcctcactacatcaccctgaaatctgtcagcaaggacccaagaggaattgcagaccctaagcaaaatgataacatgaatttgaacctggatagccaaagcgactgcacaagactgggctaaagatcccccatgcagatcatcactgccttggtgtctgctaaacagatttcagttgtttgccaaatatcccttacctggatagaaaatgttcaagagaaatagtttcttcctgtcaatattaagtcatagaacccacaatctatagcacacacataatccccacaaaaaatgaatatgaaatttccaatgggctttaatttaatgcccaaataggaagtctctctgctctagtaatttcctatgtaatattaatcttgtaattttataataatcaaagcttgtgatcatttagagtttcacatacaaggaacagataaggctagtggttggttactttgttaagatcattttaaaagcacttactttcaggtcagatgttgtggcccagacctataatccctagaggttgagataggaggatcacaggttcagggtctacatgggctgcagagaaagatcatgtcaagtctggacaacttggtgagaactctttaaaaaaaatcataaaatttaaaattgcaccagaaatgttaaggaacagctgttggtggagcagaatgggagacaccctgggttcaaccccgagaattaaaaaaacaaaacaaaacaaagcaaacaaacaaaacagaaagatcaaaacagatgacagtgtgcctactttgatttgcaaactatatcactgaagtctgctttcaatgaaattatcttctatggaagggccaaggaggttagggcagggcagagagttatagtagctgattagaagagggaggaacaaaagaatggcctcctagactatagcaccagcactgtcacaaagcatctcatccattgcccagggtgtagaggcctgtgcaagctttgggttcctaggcctgcctttctagatttctataataagtcaagaaaatgacagggcttttaaaatattcactccacttccttgtgagtcctcaggaaacacagatgggggtgtgcttagtgttcattttctttactgcagaacactgcattcccatggatttgttgccttgcgttgggttgtttccttatacagatgtctgtgggtggaagcactctctctcactgactctgttttcttaatgggagctgttaagtcttttaaatctatagataattttcccccatccttaaataaagatctcaaac

SEQ ID NO: 9899 - protein, 789 aa, Rattus norvegicus
  ref <308>: DATABASE ACCESSION NUMBER: SWISS-Prot / Q63180
  ref <309>: DATABASE ENTRY DATE: 2002-06-15
MFPTGIFLMSVLISQMQGRGIVGVEGQELVHPKKLSLLQKRDLERIHDSDTPEEYEEELLYEIKLGRKTLTLHLLKAREFLALNYSETYYNIKREMVTRHPQILDHCFYQGSIIHEFDSAASISTCNGLRGFFRVNDQRYLIEPVKYSDEGDHLVFKYNVKAPYATNYSCEGLNFTKKSTLIDAKIIEEHKVEDYHKEKFIELFVVADEFVYRRNSKPQNKLRKRIWGMVNFVNMIYKALNIRVTLTGMEIWSAGDEIEIVSNLESTLLHFSTWQETVLKKRKDFDHVILLSGKWLYTSMQGIAYPGGICQTLRSCSVVKDLLPDVNIIGNRMAHQLGHSLGMRHDDFPCTCPLGKCVMGAGSIPAIKFSKCSQTQYQQFLKNQKPACILNNPLPEEFNDYPFCGNKKVDEGEECDCGPVQECTNPCCDAHKCVLKPGFTCVEGECCESCQMKKEGVICRPAKNECDISEVCTGYSPECPKDESQANGFPCKNGEGYCFMGLCPTRDDQCAELFSGGAEESHSLCYRMNQKGNRFGYCKNKDNTFVPCEEKDLKCGKIYCTGGRRSAHLGEDKTYNLKNVKQNISIKCKTMFLYHNSRDMGLVNSGTKCGEGMVCSNGECIEMEKAYNSTICSSLCDENDVDDNEPDCQCEEGPIITEWGEALNLTSVSIMVVVLVMVIIGVGLVILLIRYQKCIKMKQVQSSSREIRGIENKVYFPDEHQTRSEPIFTDIYPLHNTAESLERVPSTFSSPHYITLKSVSKDPRGIADPKQNDNMNLNLDSQSDCTRLG

SEQ ID NO: 9900 - DNA, 2583 bp, Homo sapiens
  ref <308>: DATABASE ACCESSION NUMBER: EMBL / AF215824
  ref <309>: DATABASE ENTRY DATE: 2001-01-02
gatccctgcagtggaagtgaggaggaagaaaggtgaactccttttctcaagcacttctgctctcctctaccagaatcactcagaatgcttcccgggtgtatattcttgatgattttactcattcctcaggttaaagaaaagttcatccttggagtagagggtcaacaactggttcgtcctaaaaagcttcctctgatacagaagcgagatactggacacacccatgatgatgacatactgaaaacgtatgaagaagaattgttgtatgaaataaaactaaatagaaaaaccttagtccttcatcttctaagatccagggagttcctaggctcaaattacagtgaaacattctactccatgaaaggaggagcgttcaccaggcatcctcagatcatggatcattgtttttaccaaggatccatagtacacgaatatgattcagctgccagtatcagtacgtgtaatggtctaaggggattcttcagaataaacgaccaaagatacctcattgaaccagtgaaatactcagatgagggagaacatttggtgttcaaatataacctgagggtgccgtatggtgccaattattcctgtacagagcttaattttaccagaaaaactgttccaggggataatgaatctgaagaagactccaaaataaaaggcatccatgatgaaaagtatgttgaattgttcattgttgctgatgatactgtgtatcgcagaaatggtcatcctcacaataaactaaggaaccgaatttggggaatggtcaattttgtcaacatgatttataaaaccttaaacatccatgtgacgttggttggcattgaaatatggacacatgaagataaaatagaactatattcaaatatagaaactaccttattgcgtttttcattttggcaagaaaagatccttaaaacacggaaggattttgatcatgttgtattactcagtgggaagtggctctactcacatgtgcaaggaatttcttatccagggggtatgtgcctgccctattattccaccagtatcattaaggatcttttacctgacacaaacataattgcaaacagaatggcacatcaactggggcataaccttgggatgcagcatgacgagttcccatgcacctgtccttcaggaaaatgcgtgatggacagtgatggaagcattcctgcactgaaattcagtaaatgcagccaaaaccaataccaccagtacttgaaggattataagccaacatgcatgctcaacattccatttccttacaattttcatgatttccaattttgtggaaacaagaagttggatgagggtgaagagtgtgactgtggccctgctcaggagtgtactaatccttgctgtgatgcacacacatgtgtactgaagccaggatttacttgtgcagaaggagaatgctgtgaatcttgtcagataaaaaaagcagggtccatatgcagaccggcgaaagatgaatgtgattttcctgagatgtgcactggccactcgcctgcctgtcctaaggaccagttcagggtcaatggatttccttgcaagaactcagaaggctactgtttcatggggaaatgtccaactcgtgaggatcagtgctctgaactatttgatgatgatgcaatagagagtcatgatatctgctacaagatgaatacaaaaggaaataaatttggatactgcaaaaacaaggaaaacagatttcttccctgtgaggagaaagatgtcagatgtggaaagatctactgcactggaggggagctttcctctctccttggagaagacaagacttatcaccttaaggatccccagaagaatgctactgtcaaatgcaaaactatttttttataccatgattctacagacattggcctggtggcgtcaggaacaaaatgtggagagggaatggtgtgcaacaatggtgaatgtctaaacatggaaaaggtctatatctcaaccaattgcccctctcagtgcaatgaaaatcctgtggatggccacggactccagtgccactgtgaggaaggacaggcacctgtagcctgtgaagaaaccttacatgttaccaatatcaccatcttggttgttgtgcttgtcctggttattgtcggtatcggagttcttatactattagttcgttaccgaaaatgtatcaagttgaagcaagttcagagcccacctacagaaaccctgggagtggagaacaaaggatactttggtgatgagcagcagataaggactgagccaatcctgccagaaattcatttcctaaataaacctgcaagtaaagattcaagaggaatcgcagatcccaatcaaagtgccaagtgagcttgaagttggatatccaaaatggccgtgcaagcttaggctggggattctggatgcaacgtctttacaaccttacctagatatctgctactcacatttttggtagtgtttcaaacgttctttatccagacagacaatgtttaagagaaacaacttatttctgttaatatttaccggtagaattcacaccctctatcataaacatatgctgcagaaaaaaaaaaaaaaaaaaaa

SEQ ID NO: 9901 - protein, 754 aa, Homo sapiens [sequence omitted]

SEQ ID NO: 9902 - DNA, 3392 bp, Rattus norvegicus
  ref <308>: DATABASE ACCESSION NUMBER: EMBL / X66366
  ref <309>: DATABASE ENTRY DATE: 1993-06-30
agaacataattcaatccggtcagcacctcctctttctgcattcacagcagactccaccgaatccacgcacacttccataagaaatccatttcctgctcccgccttccccgacgatatccacgcctgtttccgctcggccccctccttcccgctcgcctcgcgctccccgggcgccctcgttctcgcgctctccaaggcaagcgcgctcccggccggcgcgtccgggctccgcttctcccggctcctgtcagtgcggtgattgcgctgggaaacatggcgaccgagggaatgatcctcacaaaccacgaccatcaaatccgtgtcggagtcctcacagtgagtgatagctgcttcaggaatcttgcagaagaccgcagtgggataaatctaaaagatctcgtccaggatccttctttgttgggtgggactatatcagcatacaagatagtaccagatgaaatagaagaaatcaaggaaacactcatagactggtgtgatgagaaggaacttaatttgatattaacaactggcggaacagggtttgcaccacgagatgtcactccagaggccacaaaagaagtaatagaacgggaagcgccagggatggccctggcaatgctgatgggatcacttaatgttacacctctgggcatgctctctagaccagtgtgtggaataagagggaaaactctgataattaacctgcctggtagcaagaaaggatctcaggaatgctttcagttcatactgccagctctacctcatgccattgaccttttacgtgatgccattgtaaaagtaaaggaggtgcatgatgaacttgaagatttaccttccccaccacctcctctttctccacctcctacaactagcccacataagcagacagaagacaaaggagttcagtgtgaagaggaggaagaagaaaagaaagacagtggtgtagcttcgacagaagatagttcctcatcacatattactgcagcagctcttgctcgaaagattccagactccatcatttctcgtggcgttcaggtgctcccacgagacacagcctcccttagcactactccttcagagtcgccccgtgcccaggctacatctcgcctctctacagcttcttgtccaacaccaaaagtccagtccaggtgcagcagcaaggagaacattctaagagccagtcacagtgctgtagatatcaccaaggtggctagaagacatcgcatgtctccttttcctctgacgtctatggacaaagccttcattacagttctggagatgactccggtgcttggtacagaaatcatcaattaccgagatggaatggggcgagtccttgctcaagatgtgtatgcaaaagacaacctacccccattcccagcatcagtaaaagatggctatgctgttcgagctgctgatggtccaggagatcgtttcatcattggggaatcccaagctggtgaacagccaactcagacagtaatgcccggacaagtgatgcgggttacaacaggtgctccaatcccctgcggtgctgatgcagtagtgcaagttgaagatactgaactcatcagggaatcagatgatggtactgaagaacttgaagtgcgaattctggtgcaagctcggccaggccaagacatcagacccatcggccacgacattaaaagaggggagtgtgttttggcaaaaggaacccatatgggcccttcagaaattggtctccttgcaactgtaggtgtcacagaagttgaagttaataagtttccagtggttgccgttatgtcaacagggaatgagctactaaatcctgaagatgacctcttaccaggaaagattcgggacagcaatcgatcaacacttctagcaacaattcaggaacatggttacccaacaatcaacttgggaattgtaggagacaacccagatgacttactcaatgccttgaatgagggtatcagccgtgctgatgtcatcatcacgtcaggaggtgtatccatgggggaaaaggactatctcaagcaggtgctggacatcgatcttcatgctcagatccattttggcagggtttttatgaagccaggcttgccaacaacatttgcaactttggatattgatggtgtaagaaaaattatttttgcactaccagggaatcctgtatcagctgtggtcacctgcaacctctttgttgtacccgcactgagaaaaatgcagggtatcttggatcctcggccaaccatcatcaaagctaggttatcatgtgacgtaaagctggaccctcgcccagaataccaccggtgtatactgacttggcatcaccaagaaccactgccctgggcccagagtacaggtaatcagatgagcagccgtctgatgagcatgcgcagtgccaatggattgctgatgctacctccaaagacagagcagtatgtggaacttcacaaaggcgaggtggtggacgtcatggtcatcggacggctatgatggtgaccaacaggagaaagtttcgatgcatgtccacatatcattgactgtatcctgtcatatgcaacggcacagctagtttttctgatctggataaaagttgatctgtatagtcaacatcttgaactatatttcaaatgaatttaaataccttttaaagaaaaaacacacctaagaataaatctcaacagacaactctattctggttatatcaaagcaaaattttcctttcttgcaaattgctttgtgtgttcaatgctaggtctgatagcgatagctttagtagacagcggtaggtgcctgcagaacttgtgtttttctcatctttaaatacaactacttatgctcttaatcaaggctgtctgcttctttatactagtgtaggcaacacttggatttcccttcttagtatgcttcataactgctttacagagagcttttgcttgttctttctcatgtatctcgtgtttatgtgcaccatgccaaaagacgagtgactgcgcggaggccccgctctgcctcaagagccttccctgctgagcacccagggaagctctcaccctcgcagcctctggcacacacagtactagcaggcagtaactggataccttttatttgaacaaacaaacggggtggggggaaatgcttccttaagtgctgacagcctttttaaccaacacatttaaaattgtacagaacaaaaataaaatcaaagactgatcttgtacagatattagtgttaccagcattcatgtggaatcaagagcaaaaataaaataatgttaaacaactctgtaccataacattttctgtaatgataatgaaacttaatgaataaaaaaaaatccttgatcattatttaaaaaaaaaaaaaaaaaaaaaaaaaaaaaaaaaaaaaaaaaaaaaaa

SEQ ID NO: 9903 - protein, 736 aa, Rattus norvegicus
  ref <308>: DATABASE ACCESSION NUMBER: SWISS-Prot / Q03555
  ref <309>: DATABASE ENTRY DATE: 2002-06-15
MATEGMILTNHDHQIRVGVLTVSDSCFRNLAEDRSGINLKDLVQDPSLLGGTISAYKIVPDEIEEIKETLIDWCDEKELNLILTTGGTGFAPRDVTPEATKEVIEREAPGMALAMLMGSLNVTPLGMLSRPVCGIRGKTLIINLPGSKKGSQECFQFILPALPHAIDLLRDAIVKVKEVHDELEDLPSPPPPLSPPPTTSPHKQTEDKGVQCEEEEEEKKDSGVASTEDSSSSHITAAALARKIPDSIISRGVQVLPRDTASLSTTPSESPRAQATSRLSTASCPTPKVQSRCSSKENILRASHSAVDITKVARRHRMSPFPLTSMDKAFITVLEMTPVLGTEIINYRDGMGRVLAQDVYAKDNLPPFPASVKDGYAVRAADGPGDRFIIGESQAGEQPTQTVMPGQVMRVTTGAPIPCGADAVVQVEDTELIRESDDGTEELEVRILVQARPGQDIRPIGHDIKRGECVLAKGTHMGPSEIGLLATVGVTEVEVNKFPVVAVMSTGNELLNPEDDLLPGKIRDSNRSTLLATIQEHGYPTINLGIVGDNPDDLLNALNEGISRADVIITSGGVSMGEKDYLKQVLDIDLHAQIHFGRVFMKPGLPTTFATLDIDGVRKIIFALPGNPVSAVVTCNLFVVPALRKMQGILDPRPTIIKARLSCDVKLDPRPEYHRCILTWHHQEPLPWAQSTGNQMSSRLMSMRSANGLLMLPPKTEQYVELHKGEVVDVMVIGRL

SEQ ID NO: 9904 - DNA, 1727 bp, Homo sapiens
  ref <308>: DATABASE ACCESSION NUMBER: EMBL / AK025169
  ref <309>: DATABASE ENTRY DATE: 2000-09-29
gtgtgctatcctttcctctcagtcctgccatctagctgccttgggtctcgcgctccgcagagcgttccgacactctccggcctcgttctgccgcctccgcgcgctctccccgtgcggccaccgcgccccccaagcttgcctccttcttgccggacttggggccgcgcgccctgactccttcccctcccgcggacccgcgcactcccggcgcggcctctcccccacgcaggccaccgtgcactctgtggcctccccctccttccccgctctcctcgcgcttctctggctccctagctgtcgcgctctcctcggcgagcgcgctcccggcccgcgcgctccgggctccggtttctcccggctcctgtcagtgcggtgactgcgctgggaaacatggcgaccgagggaatgatccttactaaccacgaccatcaaatccgtgtcggagtccttacagtgagtgatagttgcttcaggaatcttgcagaagaccgcagtgggataaatctcaaagatctcgtacaagatccttctttgttgggtgggactatatcagcatacaagatagtaccagatgaaatagaagaaatcaagaaattcccaacattcccattttgtgggctccagaaaggggccacaaaagaagtaatagaacgggaagcaccagggatggccctggcaatgctgatgggatcacttaatgttacacctctgggcatgctctctaggcctgtatgtggaatcagagggaaaacgctcatcattaacctgccaggtagcaagaaaggatctcaggaatgctttcaattcatactgccagctctacctcatgccattgaccttttacgtgatgccattgtaaaagtaaaggaggtgcatgatgaacttgaagatttgccttccccacctccccctctttcccctcctcctactaccagcccccataaacagacagaagacaaaggagatcaatgtgaggaagaggaagaagagaagaaagacagtggtgttgcttcaacagaagatagttcctcatcacatataactgcagcagccattgctgccaagaagcatccattctacaccagtcctgctgttgtcatggcacacggtgaacagcccatccctggtctcatcaattattcccatcattcaacagatgaacggattccagactccatcatttctcgtggtgttcaggtgctcccacgagacacagcctccctcagcactactccttcagaatcgcctcgtgctcaggctacatctcgcctctctacagcttcctgcccaacaccaaaagtccagtccaggtgcagcagcaaggagaacattctcagagccagtcacagtgctgtcgatatcaccaaggtggctagaagacatcgcatgtctccttttcctctgacatctatggacaaagcctttatcacagtcctggagatgactccggtgcttgggacagaaatcatcaattaccgaggtactattatatttgaccattgccctttcttttcttcatttttttccaaataagattcatgtaacattaatgcacagttttcctgaaaaagaaagattattaaccattattacagttatcatcattctttttttttcttatttctactcaataagaaaaaggctaagggttcagccttaacagtatacagggtaaaatccatgaaactgccttttcattaaaaaaaggaaaaaaaaaaaaaaaaaaa

SEQ ID NO: 9905 - protein, 736 aa, Homo sapiens
  ref <308>: DATABASE ACCESSION NUMBER: SWISS-Prot / Q9NQX3
  ref <309>: DATABASE ENTRY DATE: 2002-06-15
MATEGMILTNHDHQIRVGVLTVSDSCFRNLAEDRSGINLKDLVQDPSLLGGTISAYKIVPDEIEEIKETLIDWCDEKELNLILTTGGTGFAPRDVTPEATKEVIEREAPGMALAMLMGSLNVTPLGMLSRPVCGIRGKTLIINLPGSKKGSQECFQFILPALPHAIDLLRDAIVKVKEVHDELEDLPSPPPPLSPPPTTSPHKQTEDKGVQCEEEEEEKKDSGVASTEDSSSSHITAAAIAAKIPDSIISRGVQVLPRDTASLSTTPSESPRAQATSRLSTASCPTPKVQSRCSSKENILRASHSAVDITKVARRHRMSPFPLTSMDKAFITVLEMTPVLGTEIINYRDGMGRVLAQDVYAKDNLPPFPASVKDGYAVRAADGPGDRFIIGESQAGEQPTQTVMPGQVMRVTTGAPIPCGADAVVQVEDTELIRESDDGTEELEVRILVQARPGQDIRPIGHDIKRGECVLAKGTHMGPSEIGLLATVGVTEVEVNKFPVVAVMSTGNELLNPEDDLLPGKIRDSNRSTLLATIQEHGYPTINLGIVGDNPDDLLNALNEGISRADVIITSGGVSMGEKDYLKQVLDIDLHAQIHFGRVFMKPGLPTTFATLDIDGVRKIIFALPGNPVSAVVTCNLFVVPALRKMQGILDPRPTIIKARLSCDVKLDPRPEYHRCILTWHHQEPLPWAQSTGNQMSSRLMSMRSANGLLMLPPKTEQYVELHKGEVVDVMVIGRL

SEQ ID NO: 9906 - DNA, 3392 bp, Rattus norvegicus; identical to SEQ ID NO: 9902
  ref <308>: DATABASE ACCESSION NUMBER: EMBL / X66366
  ref <309>: DATABASE ENTRY DATE: 1993-06-30

SEQ ID NO: 9907 - protein, 736 aa, Rattus norvegicus; identical to SEQ ID NO: 9903
  ref <308>: DATABASE ACCESSION NUMBER: SWISS-Prot / Q03555
  ref <309>: DATABASE ENTRY DATE: 2002-06-15

SEQ ID NO: 9908 - DNA, 1727 bp, Homo sapiens; identical to SEQ ID NO: 9904
  ref <308>: DATABASE ACCESSION NUMBER: EMBL / AK025169
  ref <309>: DATABASE ENTRY DATE: 2000-09-29

SEQ ID NO: 9909 - protein, 736 aa, Homo sapiens; identical to SEQ ID NO: 9905
  ref <308>: DATABASE ACCESSION NUMBER: SWISS-Prot / Q9NQX3
  ref <309>: DATABASE ENTRY DATE: 2002-06-15

SEQ ID NO: 9910 - DNA, 3972 bp, Rattus norvegicus
  ref <308>: DATABASE ACCESSION NUMBER: EMBL / X66494
  ref <309>: DATABASE ENTRY DATE: 1993-11-29
gggagttaccacacggtcttccaagggcactgccaaggatggagtttctaggacggtcagggtagcatttgcggaaacagagccagctgagttctgggcagtgcagctgtagacccccatgtcgtcgactttcacatcagtgatgaagaacacatcgtcatctggcataacgtgcatgcgtcgctctcgagctgcagggaaatcggtgcctccatccttctgccaggcaatctgagggttagggtggcccgtggcagcacactcgaggcgtgctgtggtgcccgtccgaatggcaatgtcatggggtattttggtgaatgaaggcaacacattcacagtgagcctggctttgtgtgagtatgtggagccgaagtggtttgtgatgacacactggtagcggccctcgtgtccaaacgtgacgtgacggaggtgcaggatggtggtgtactccatcacttcgccgtcccgcacccctcccgcccgcccgtcgccccgtcccccggcccggccgcccccgaggcccccgggcgggcccgcgctttcggggccctttctccaggtgccaccggagccccttgcccgctcgccaccctcgagacgccgcgacccctggcctggcctcgcggcccaggggccatggcgaagaagagcgctgaaaacggtatctatagcgtgtctggagacgagaagaagggtcctctcatcgtgtccgggcccgatggtgccccgtccaagggcgatggccctgcgggcctgggggcgcccagcagccgccttgctgtgccgccgcgagagacttggacacgccagatggacttcatcatgtcgtgcgtgggcttcgccgtgggcctcggtaacgtgtggcgcttcccctacctgtgctacaagaacggcggaggtgtgttccttattccctatgtcctgattgccctggttggaggaatccccattttcttcctggaaatctcactgggccagttcatgaaggccggcagcatcaatgtctggaacatctgtcccctattcaaaggtctgggctatgcctccatggtgattgtcttctactgcaacacttactacatcatggtgctggcctggggcttctattacctggtcaagtcctttactaccactttgccatgggctacgtgtggccacacctggaacactcctgactgtgtagagatctttcgccatgaagactgtgccaatgccagcttggccaacctcacatgtgaccagcttgctgaccgacggtcccctgtcatcgagttctgggagaacaaagtcttgaggctctccacagggctggaggttccaggagccctcaactgggaagtgaccctgtgcctgctggcctgctgggtgctggtctacttctgtgtgtggaagggggtcaagtcaacaggaaagatcgtgtacttcactgctacattcccctacgtggtcctcgttgtgctgctggtgcgaggggtgctgctgcctggagccctggatggtatcatctactatctcaagcctgactggtcaaagctagggtcccctcaggtatggatagatgctgggacccagattttcttctcttatgccatcggcctgggggccctcacagccctaggcagctacaatcgcttcaacaacaactgctacaaggatgccatcatcctggcactcatcaacagcgggaccagcttctttgctggctttgtggtcttctccatcctgggcttcatggccacagagcagggtgtgcatatctccaaggtggcagaatcagggcctggtctagccttcattgcctacccacgggctgtcacactgatgcctgtggccccactctgggctgccttgttcttcttcatgctgctgctgctcggtctggacagccagtttgtaggtgtggagggcttcatcactgggctcctggatctcctcccggcctcctactacttccgttttcaaagggagatctccgtggccctctgttgtgccctctgctttgtcatcgatctctccatggtgactgatggcgggatgtacgtcttccagctgtttgactactactcagctagtggcactaccctgctttggcaagccttttgggagtgtgtggtggtggcttgggtttatggagctgaccgcttcatggacgatattgcctgtatgattgggtaccgaccttgcccttggatgaaatggtgctggtccttcttcaccccactggtctgcatgggcatcttcatcttcaatgttgtgtactacaagccactggtctacaacaatacctacgtgtacccatggtggggtgaagctatgggctgggcctttgcactctcttctatgctctgtgtgcccctccacctcctgggctgtctcctcagggcaaaaggaaccatggcagagcgatggcagcacctgacccagcctatctggggcctccatcacttggaatacagagctcaggatgcagatgtcaggggcctgaccaccctgactcccgtgtccgagagcagcaaggtcgtcgtggtggagagtgtcatgtgacaggcacccccagctcacatcaccagctcatcctttggtagccatagcagccccagctttagcccccacccatccctcgggggcttgcctttccttgacagtttggggatctgcctggggaaagggaggaagcaccatgagtgctaacaaaaacaactttttccatttttaataaaacgccaaaaacatcacaacccaccaaaaatagatgcctctcctccccaccccacaactacgctggtattttcgttgcttccagtccccacctcctttccttcttcccagtgcccaggacccatctcctagccttgccaagcccatctgcctgcctcccaagctctgctctgtaacacacctttgccctagaaccaacagtggcagcttggggaacaggagaggagggaaaataacagtaggacaggaggggaggcaagagagggacagtggaaccaaggtgaatatttcagctcaattagaactcttcccgcccctattctagaagctagagagccagtcagcaatggaaccttgtgttcctgcgccaattgccaccaatattaattgtgtgagcttgggtctgagtgcacgtctgtctctgtgtgatgtgtgtgtgtgtgtgtgtgtgtgtgtgtgtgtgtgtgtgtgtgtgtgtgtgtagatctcttatctcttagtgaaggtgaataccagaagtaaacagagcctctgggcaaaggaggcttatattttgcacattttataagaaaaaaaaacttgagagtgagacttctgcttgtatatttctaaaaagcccccaccatcccccatttccactcctttccttgacatccccaccttctctgaccctagccaaggagtgtgaatttatagacttaattttcataggcaaaacaaaagcttcaggctgttgaatatgtgagtctgtttgtgtggatgttctgtatggtctccagccagagactggagtaggaaggtgggagcctcaatggtgtccccacactgttcctttgcctctaagtctgtggggtagaaggctgtaacattatcccagggaatctgggtctgctcacctgacatgctcagacttgcccacacccagctccctgggctgggcatgattgcagggatttcccatggacatagcccagggaagggatcctgggtatggcttccacttccaagctaaaggctgatgtgctttcgacatctcaagtcttccgtgtagcagcttaaacccacatctgtgtcccatcaagcctgaaacagccaagtagccattagaaaggctttcttcacacagagctggactaagccagggaggtggggctgggtaagggtgcaagcctttggggacattcttactgtgctaaaaaagccactgcaaacatagcaataaaaacacttccattttccaaaaaaaaaaaaaaa

SEQ ID NO: 9911 - protein, 635 aa, Rattus norvegicus
  ref <308>: DATABASE ACCESSION NUMBER: SWISS-Prot / P28570
  ref <309>: DATABASE ENTRY DATE: 2001-10-16
MAKKSAENGIYSVSGDEKKGPLIVSGPDGAPSKGDGPAGLGAPSSRLAVPPRETWTRQMDFIMSCVGFAVGLGNVWRFPYLCYKNGGGVFLIPYVLIALVGGIPIFFLEISLGQFMKAGSINVWNICPLFKGLGYASMVIVFYCNTYYIMVLAWGFYYLVKSFTTTLPWATCGHTWNTPDCVEIFRHEDCANASLANLTCDQLADRRSPVIEFWENKVLRLSTGLEVPGALNWEVTLCLLACWVLVYFCVWKGVKSTGKIVYFTATFPYVVLVVLLVRGVLLPGALDGIIYYLKPDWSKLGSPQVWIDAGTQIFFSYAIGLGALTALGSYNRFNNNCYKDAIILALINSGTSFFAGFVVFSILGFMATEQGVHISKVAESGPGLAFIAYPRAVTLMPVAPLWAALFFFMLLLLGLDSQFVGVEGFITGLLDLLPASYYFRFQREISVALCCALCFVIDLSMVTDGGMYVFQLFDYYSASGTTLLWQAFWECVVVAWVYGADRFMDDIACMIGYRPCPWMKWCWSFFTPLVCMGIFIFNVVYYKPLVYNNTYVYPWWGEAMGWAFALSSMLCVPLHLLGCLLRAKGTMAERWQHLTQPIWGLHHLEYRAQDADVRGLTTLTPVSESSKVVVVESVM

SEQ ID NO: 9912 - DNA, 2283 bp, Homo sapiens
  ref <308>: DATABASE ACCESSION NUMBER: EMBL / S74039
  ref <309>: DATABASE ENTRY DATE: 2000-03-04
ctcgcggccccaggggccatggcgaagaagagcgctgaaaacggtatctatagcgtgtctggagacgagaagaagggtcctctcatcgtgtccgggcccgatggtgccccgtccaagggcgatggccctgcgggcctgggggcgcccagcagccgccttgctgtgccgccgcgagagacttggacacgccagatggacttcatcatgtcgtgcgtgggcttcgccgtgggcctcggtaacgtgtggcgcttcccctacctgtgctacaagaacggcggaggtgtgttccttattccctatgtcctgattgccctggttggaggaatccccattttcttcctggaaatctcactgggccagttcatgaaggccggcagcatcaatgtctggaacatctgtcccctattcaaaggtctgggctatgcctccatggtgattgtcttctactgcaacacttactacatcatggtgctggcctggggcttctattacctggtcaagtcctttactaccactttgccatgggctacgtgtggccacacctggaacactcctgactgtgtagagatctttcgacatgaagactgtgccaatgacagcttggccaacctcacatgtgaccagcttgctgaccggcggtcccctgtcatcgagttctgggagaacaaagtcttgaggctctccacagggctggaggttccaggagccctcaactgggaggtgaccctgtgtctgctggcctgctgggtgctggtctacttctgtgtctggaagggggtcaaatccacgggaaagatcgtgtacttcactgctacattcccctacgtggtcctggtcgtgctgctggtgcgtggagtgctgctgcctggcgccctggatggcatcatttactatctcaagcctgactggtcaaagctggggtcccctcaggtgtggatagatgcggggacccagattttcttctcttatgccatcggcctgggggccctcacagccctgggcagctacaatcgcttcaacaacaactgctacaaggatgccatcatcctggcactcatcaacagcgggaccagcttctttgctggctttgtggtcttctccatcctgggcttcatggccacagagcagggtgtgcatatctccaaggtggcagaatcagggcctggtctagccttcattgcctacccacgggctgtcacactgatgcctgtggccccactctgggctgccttgttcttcttcatgctgctgctgctcggtctggacagccagtttgtaggtgtggagggcttcatcactgggctcctggatctcctcccggcctcctactacttccgttttcaaagggagatctccgtggccctctgttgtgccctctgctttgtcatcgatctctccatggtgactgatggcgggatgtacgtcttccagctgtttgactactactcagctagtggcactaccctgctctggcaggccttttgggagtgcgtggtggtggcctgggtgtacggagctgaccgcttcatggacgacattgcctgtatgatcgggtaccgaccttgcccctggatgaaatggtgctggtccttcttcaccccgctggtctgcatgggcatcttcatcttcaacgttgtgtactacgagccgctggtctacaacaacacctacgtgtacccgtggtggggtgaggccatgggctgggccttcgccctgtcctccatgctgtgcgtgccgctgcacctcctgggctgcctcctcagggccaagggcaccatggctgagcgctggcagcacctgacccagcccatctggggcctccaccacttggagtaccgagctcaggacgcagatgtcaggggcctgaccaccctgaccccagtgtccgagagcagcaaggtcgtcgtggtggagagtgtcatgtgacaactcagctcacatcaccagctcacctctggtagccatagcagcccctgcttcagccccaccgcacccctccagggggcctgcctttccctgacacttttggggtctgcctgggggaggaggggagaaagcaccatgagtgctcactaaaacaactttttccatttttaataaaacgccaaaaatatcacaacccaccaaaaatagatgcctctccccctccagccctagccgagctggtctcgatatcaagcttatcgataccgtcgacctcggaggggggggccggtacccaattcgccctatagtgagtcggttttacaaattcaattggccgtcggttttacaacggtcggt

SEQ ID NO: 9913 - protein, 635 aa, Homo sapiens
  ref <308>: DATABASE ACCESSION NUMBER: SWISS-Prot / P48029
  ref <309>: DATABASE ENTRY DATE: 2002-06-15
MAKKSAENGIYSVSGDEKKGPLIAPGPDGAPAKGDGPVGLGTPGGRLAVPPRETWTRQMDFIMSCVGFAVGLGNVWRFPYLCYKNGGGVFLIPYVLIALVGGIPIFFLEISLGQFMKAGSINVWNICPLFKGLGYASMVIVFYCNTYYIMVLAWGFYYLVKSFTTTLPWATCGHTWNTPDCVEIFRHEDCANASLANLTCDQLADRRSPVIEFWENKVLRLSGGLEVPGALNWEVTLCLLACWVLVYFCVWKGVKSTGKIVYFTATFPYVVLVVLLVRGVLLPGALDGIIYYLKPDWSKLGSPQVWIDAGTQIFFSYAIGLGALTALGSYNRFNNNCYKDAIILALINSGTSFFAGFVVFSILGFMAAEQGVHISKVAESGPGLAFIAYPRAVTLMPVAPLWAALFFFMLLLLGLDSQFVGVEGFITGLLDLLPASYYFRFQREISVALCCALCFVIDLSMVTDGGMYVFQLFDYYSASGTTLLWQAFWECVVVAWVYGADRFMDDIACMIGYRPCPWMKWCWSFFTPLVCMGIFIFNVVYYEPLVYNNTYVYPWWGEAMGWAFALSSMLCVPLHLLGCLLRAKGTMAERWQHLTQPIWGLHHLEYRAQDADVRGLTTLTPVSESSKVVVVESVM

SEQ ID NO: 9914 - DNA, 2658 bp, Rattus norvegicus
  ref <308>: DATABASE ACCESSION NUMBER: EMBL / X66845
  ref <309>: DATABASE ENTRY DATE: 1992-10-01
ccaagctcaggagagaggaagtgatcgctccgggaggagctagcctagccgcgcagtgagacagcacatcctgctggcgcgggcccgctgctccccgtcctcccgcgcctcctccaccacctcagtgagcctccgcagacagcatccaggaagcaaatatgtctgacaagagcgacctaaaagctgagctggagcgcaaaaagcagcgcttagcgcagataagagaggagaagaaacggaaggaagaggagaggaaaaagaaagaggcagatatgcagcagaagaaagagcccgttccagatgactccgatctggaccgcaaacgacgagagacagaagctttgcttcagagcatcggcatatcgccggagccccctctagtgcagccgctgcattttttaacatgggatacctgttattttcattatttagtcccaacccctatgtctccctcttcgaaatcagtgagcactcccagtgaagctggaagccaagacgatctggggccattaacaaggaccctgcagtgggacacagacccctcagtgctccagctgcagtcagactcagaacttgggagaagactgaacaagctgggcgtgtcaaaggttacccaggtggatttcctgcctagggaggtggtatcctactccaaggagacacagactcctcttgcaactcatcagtcagaagaggatgaggaagatgaggagatggttgagcccaaagttggtcatgattctgaactggaaaatcaagacaaaaagcaggagacaaaggaagcccctccaagagagctgacggaagaagaaaaacagcagatcctgcactcagaggaattcctcatcttctttgaccgaacgatccgagtgattgaacgagctctggctgaggactctgacatcttttttgactacagcggccgagagctggaggagaaagatggggatgtacaggctggagccaacctttctttcaaccgtcagttctatgatgagcattggtctaagcaccgggtggtcacatgtatggactggtctctccagtaccctgagctgatggttgcttcttatagcaacaatgaagatgctccccatgaaccagatggagtggccttggtttggaacatgaagttcaagaaaaccacaccagaatatgtcttccactgtcagtcctctgtgatgtcagtctgctttgcccgtttccatcctaatttggtggttggtggcacctattcaggccagattgtcctctgggacaatcgcagtcatcgaagaacccctgtccagaggacccccttgtcagccgctgcacacacacatcctgtgtactgtgtcaatgttgttgggacccagaatgctcacaacctgatcactgtctctaccgatggcaaaatgtgttcctggagcctggacatgctctcaaccccacaggagagcatggagctggtgtacaacaagtccaagcctgtggctgttacaggaatggccttcccgacgggagatgtcaacaacttcgtggtcggcagtgaggaaggtaccgtctacacagcttgtcgtcatggaagcaaagcaggcattggtgaggtctttgaaggtcaccaagggccagtgacaggcattaactgccacatggcagtgggtcccatcgacttttctcatctgtttgtcacatcatcatttgactggactgtcaaactgtggaccacaaagcacaacaagccgctctactcctttgaagacaatgcagactatgtgtacgatgtcatgtggtcccccgtgcatcccgcgctctttgcctgcgtggacgggatggggcgcttggacctctggaacctcaacagtgacaccgaggtgccaacagcaagtgtggctattgagggggcttatgccctaaaccgggttcgttgggcacaaggtggtaaggaagttgcagtaggtgactcagaaggccgcatctggatctacgatgttggagagcttgcggttccccacaatgatgaatggacgcgatttgcccggaccctggtggagatccgcgccaatagggctgacagcgaggaggaaggtgcggttgagttagctgcctaaatgtgagcccagtctgcacgctgtggctcccatccttccattctagaactcagtctgcagccaaggcccctgtgcagtgtttggtgtcctttccgtatcggtgtccccgtggcaacttgggtgccatattgtgcagtgtttccccatatcctccccatgtaccctactcacccgaaatccaccacagcatttctacctttgtgtccctgtctcaagaaacaaaatgggggagggaacccttaggggtttagttgttgccttttaactacttggtagctgtatttaatagctggaaacctctggttgaatttgtgcttacatgtacttctggcgtagtcctattaaatccatatgaagccagatatgattgggtgcagatgtggcgtgcctcgtgatacggtgcagggccaaagacttgagatgtggtgttttacatggtgattcacattatgaatggatttactacaagaacattgctgctccttatttattgtaacgtgctgcatggaacatatttatttgaaagcattaaaataaacgatcttagagcaaaaaaaaaaaaaaaaaa

SEQ ID NO: 9915 - protein, 643 aa, Rattus norvegicus
  ref <308>: DATABASE ACCESSION NUMBER: SWISS-Prot / Q63100
  ref <309>: DATABASE ENTRY DATE: 2001-10-16
MSDKSDLKAELERKKQRLAQIREEKKRKEEERKKKEADMQQKKEPVPDDSDLDRKRRETEALLQSIGISPEPPLVQPLHFLTWDTCYFHYLVPTPMSPSSKSVSTPSEAGSQDDLGPLTRTLQWDTDPSVLQLQSDSELGRRLNKLGVSKVTQVDFLPREVVSYSKETQTPLATHQSEEDEEDEEMVEPKVGHDSELENQDKKQETKEAPPRELTEEEKQQILHSEEFLIFFDRTIRVIERALAEDSDIFFDYSGRELEEKDGDVQAGANLSFNRQFYDEHWSKHRVVTCMDWSLQYPELMVASYSNNEDAPHEPDGVALVWNMKFKKTTPEYVFHCQSSVMSVCFARFHPNLVVGGTYSGQIVLWDNRSHRRTPVQRTPLSAAAHTHPVYCVNVVGTQNAHNLITVSTDGKMCSWSLDMLSTPQESMELVYNKSKPVAVTGMAFPTGDVNNFVVGSEEGTVYTACRHGSKAGIGEVFEGHQGPVTGINCHMAVGPIDFSHLFVTSSFDWTVKLWTTKHNKPLYSFEDNADYVYDVMWSPVHPALFACVDGMGRLDLWNLNSDTEVPTASVAIEGAYALNRVRWAQGGKEVAVGDSEGRIWIYDVGELAVPHNDEWTRFARTLVEIRANRADSEEEGAVELAA

SEQ ID NO: 9916 - DNA, 2950 bp, Homo sapiens
  ref <308>: DATABASE ACCESSION NUMBER: EMBL / AF063228
  ref <309>: DATABASE ENTRY DATE: 1999-07-05
cctgggagagaggaagtgatcgctcccggagagccgagccgagcgccggcgcacggtgagacagcacatcctgcccgcgccggccccgcaccttcgggagccgcctgcaccaacgctgccgccgccaggagccgccgccgctcggggagccagttccgccgctgccgagcgcgtccaggaaaccaacatgtctgacaaaagtgacttaaaagctgagctagagcgcaaaaagcagcgcttagcacagataagagaagagaagaaacggaaggaagaggagaggaaaaagaaagaggctgatatgcagcagaagaaagaacccgttcaggacgactctgatctggatcgcaaacgacgagagacagaggctttgctgcaaagcattggtatctcaccggagccgcctctagtgcagccgctgcattttttaacatgggatacctgttattttcattatttagtcccaacccctatgtctccctcctcgaaatcagtgagcactcccagtgaagctggaagccaagactcaggcgatctggggccattaacaaggaccctgcagtgggacacagacccctcagtgctccagctgcagtcagactcagaacttggaagaagactgcataaactgggcgtgtcaaaggtcacccaagtggatttcctgccaagggaagtagtgtcctactcaaaggagacccagactcctcttgccacgcatcagtctgaagaggatgaggaagatgaggaaatggtggaatctaaagttggccaggactcagaactggaaaatcaggacaaaaaacaggaagtgaaggaagcccctccaagagagttgacagaggaagaaaaacagcagatccttcattcagaggaatttctcatcttttttgaccggacaatacgggtaattgaaagagccctggctgaagattccgacatcttttttgactacagcggccgagagttagaggaaaaagatggggatgttcaggctggagccaatctttctttcaatcgtcagttctatgatgaacattggtccaagcatcgagtggtcacttgtatggactggtccctccagtaccctgagctgatggtggcttcttacaacaacaatgaagatgctccccatgaaccagatggagtggccttggtttggaacatgaagtttaagaaaaccacaccagaatacgtcttccactgtcagtcctctgtgatgtcggtctgcttcgcccgtttccatcctaacttggtggttggtgggacttactcgggccagattgtcctctgggacaatcgcagtcatcgaaggactccagtgcagcggacacccttatcagctgctgcacacacgcatcccgtgtactgtgtaaatgttgttgggacccagaatgctcataacctcatcactgtctccactgatggcaaaatgtgttcctggagcctggacatgctctcaactccacaggagagcatggagctggtgtacaataagtccaagcctgtcgctgttaccggaatggctttcccaacgggagacgtcaataacttcgtggttggcagtgaggaaggtacagtctacacggcttgtcgtcatggaagcaaagcaggtattggtgaggtctttgaaggtcaccaagggccagtgacaggaattaactgccacatggcagtgggaccaatcgacttttctcacctgtttgtcacatcatcatttgactggactgtcaaactgtggaccaccaagcacaacaagccgctctactcctttgaagacaatgcagactatgtgtacgatgtcatgtggtcccccgtgcatcctgcgctttttgcctgcgtggacgggatggggcgcttggacctctggaacctcaacaatgacaccgaggtgccaacagcaagtgtggccattgagggggcatccgccctaaaccgtgttcgttgggcccaagctggcaaagaagttgctgttggggactcggaaggccgtatttgggtctatgacgttggagagcttgcagttccccacaatgatgaatggacccgatttgccaggacccttgtggaaattcgtgctaacagagctgatagcgaggaggaaggcactgttgagttatctgcctagtggaaatgagccacccccactgcagcccccacctttgtgtcctagagctcagcgtctgcagtcaagtctcttgtattcggtgtccattcagtatcagtattgctgtgacattttgggtgccatattgtgccagctttgctccaagtattctaaatgtgtcccatcatgctttccactgacccaaaattcaccacagcatttctatctttattatttctgtctcaaaaatgaagagaagggggttatgggttaagttgctgccttttaactactttgtagctgtatttaatagctggaaacctctggttgaatttgtgcttacatgcactcctggcatagtcctattaaatccatatgaagccagatatgattgggtgcagatgtggtgttcctcatattatggtacagggccaaagacttgagacgtggtgttttacatggtgactcacattatgaatggatttactagaagaacattgctgctccttatttattgtagtgtgctgcatggaacgtatttatttgaaagcattaaaataaatgatcctagagcatgtgcataatgagaggactgtattctctctgctgctgttgaggttatattaagttccacatagcaattacagtatgccagttccactgaagacatgaaatctttagaggtttcttgcagtgaacgaaatgaattttaagtccttattatcgggtactttaacaatatttcaaatatcattgaccactaatacttctcactgaagctaacacagtctgagaaaagtctatggttcctaaatatgacatcagtgttgccaataaaaccaaaaa

SEQ ID NO: 9917 - protein, 645 aa, Homo sapiens
  ref <308>: DATABASE ACCESSION NUMBER: SWISS-Prot / O14576
  ref <309>: DATABASE ENTRY DATE: 2002-06-15
MSDKSDLKAELERKKQRLAQIREEKKRKEEERKKKEADMQQKKEPVQDDSDLDRKRRETEALLQSIGISPEPPLVQPLHFLTWDTCYFHYLVPTPMSPSSKSVSTPSEAGSQDSGDLGPLTRTLQWDTDPSVLQLQSDSELGRRLHKLGVSKVTQVDFLPREVVSYSKETQTPLATHQSEEDEEDEEMVESKVGQDSELENQDKKQEVKEAPPRELTEEEKQQILHSEEFLIFFDRTIRVIERALAEDSDIFFDYSGRELEEKDGDVQAGANLSFNRQFYDEHWSKHRVVTCMDWSLQYPELMVASYNNNEDAPHEPDGVALVWNMKFKKTTPEYVFHCQSSVMSVCFARFHPNLVVGGTYSGQIVLWDNRSHRRTPVQRTPLSAAAHTHPVYCVNVVGTQNAHNLITVSTDGKMCSWSLDMLSTPQESMELVYNKSKPVAVTGMAFPTGDVNNFVVGSEEGTVYTACRHGSKAGIGEVFEGHQGPVTGINCHMAVGPIDFSHLFVTSSFDWTVKLWTTKHNKPLYSFEDNADYVYDVMWSPVHPALFACVDGMGRLDLWNLNNDTEVPTASVAIEGASALNRVRWAQAGKEVAVGDSEGRIWVYDVGELAVPHNDEWTRFARTLVEIRANRADSEEEGTVELSA

SEQ ID NO: 9918 - DNA, 3091 bp, Rattus norvegicus
  ref <308>: DATABASE ACCESSION NUMBER: EMBL / X66870
  ref <309>: DATABASE ENTRY DATE: 1993-11-30
gccaacccagatcccgaggtgcgccacgcccagcccagatctccacgcctgccaggagcgagcttcgccggctcgctgtcccccgagcagcctctgtccttctgtccgagtcccgcgcccttctcgggacccctgcccagcggcagcactgccaccctgccggccatggagaccccgtctcagcggcggcccacccgcagtggggcgcaggccagctctacccctggtcgcccactcggatcacacggctgcaggagaaggaggacctgcaggagctcaatgaccgtctggccgtgtacatcgatcgcgtgcgctccctggagacggagaacgcggggctgcgccttcgcatcactgagtctgaagaggtggtcagccgagaggtgtccggcatcaaggcggcctacgagcgagctgggggatgcccgcaagaccctcgactctgtggccaaggagcgcgcccgcctccagttggagctgagcaaagtgcgtgaggagttcaaggagctgaaggcgcgcaataccaagaaggagggggatttgttggctgcgcaggcccggctcaaggacctggaggctcttctcaactccaaggaggctgccctgagcactgctctcagtgagaaacgcacgttggaaggcgagctccatgatctgcgggggcaggtagccaagcttgaggcagccctgggtgaggctaagaagcaactccaggatgagatgctgaggcgagtggatgctgagaacaggctacagaccctgaaggaggagctggatttccagaagaacatttacagtgaggaactgcgtgagaccaagcgccggcacgagacccggctggtggagattgataatgggaagcagcgagagtttgagagccggctggcagatgctctgcaggagctgcgggcccagcatgaggaccaggtggagcagtacaagaaggagctagaaaagacatactctgccaagctggataatgcccggcagtctgccgagaggaacagcaacctcgtgggagctgcccatgaggagctccagcagtctcgaatccgcattgacagcctctcagcccagctcagccagctccagaagcagttggcagccaaggaggccaagctgcgtgacctggaggactccctggcccgtgagcgggataccagccggcgcctgctggctgaaaaagagcgggagatggctgagatgcgggcaaggatgcagcagcagctggatgagtaccaggaattgctggacatcaagctggccctggacatggagatccatgcctaccgaaagctgctggagggcgaggaggagaggctacgcctgtcccccagccctacctcgcagcgcagccgtggccgcgcctcctcccactcctcccagtctcagggtggaggcagcgtcaccaaaaagcgcaagctggagtcttctgagagccggagcagcttctcgcagcatgctcgcactagcggccgtgtggccgtagaggaagtagatgaagagggcaagttcgtgcggctgcgcaacaagtccaacgaggaccagtccatgggcaactggcagatcaggcgtcagaatggtgatgatcctttgatgacttatcgcttcccaccgaagttcaccctaaaggccgggcaggtggtgacgatctgggcttcaggagctggggccacccatagcccccctactgacttggtgtggaaggcacagaacacttggggctgtgggagcagccttcgcacggctctcatcaacgccactggagaagaagtggccatgcgcaagctggtgcgctcactgaccatggttgaggacaatgacgatgaggaagaggatggagatgagctgctccatcaccaccgtggctcccactgcagcagctcgggggaccccgctgagtacaacctgccgtcagcaccgtgctgtgcgggacatgtgggcagcctgctgacaaggctgccagtggctcaggaccgcaggtgggcggatccatctcctctggctcttctgcctccagtgtcacagtcactcgaagcttccgcagtgtggggggcagtgggggtggcagcttcggggacaacctagtcacccgctcctacctcctgggcaactccagtccccggacccagagctcccagaactgcagcatcatgtaatctgggacctgccaggcgagggtgggggcagaggccacctgctccctcttcaccacatgccacctcctgccctgttccttatgagagcaggtctgaagccaaagaaaactatcccctgcctttgggtgtttttcttttttccttctattttttttctaagagaagttattttctacagtggttttatactgaaggaaaaacacaagcaaaaaaaaaaaagtgtctttatctcaatccttagtccttcccttttccctgtatctgccttaaaccaaagggcttctcataggagcccagggaaaggactgcttttgtagtctagatttttgtcctgctgccttgcgtttgccctcatcccaggaccctgtgacacggtgcctgagaggcaggcatggagttctctttaccggcctcctccacagctggcccactgccatgccagctgcaaagaaaaggggtgcagagagaatgactgaaaggtcaagcccctcctggctcactacacttggccgagactcctctgcctgccttaccctcctgccttcccgagcctgggacgagtggattcccagaggcaaatctgccatgcttgcttttttctatattgtattcagacaagagatgggaaagatggggaaggagaagggacggtcagtttgaacctacctttcccccgtgcgtacagcctgctggtgggctctgtctgtcggtggagggcagtattaagtgggattggggagagagtgagggaaaggctcctggagattgggagaacctgctggggccagtgagaagactagagggtgtggtgattggtggctacagcaaacactaaggaacccttcattcccacttcccatctgcacctctgctctccccccaaatcaatacactagttgtttccatcccgaaaaaaaaaaaaaaaaaaaaaa

SEQ ID NO: 9919 - protein, 665 aa, Rattus norvegicus
  ref <308>: DATABASE ACCESSION NUMBER: SWISS-Prot / P48679
  ref <309>: DATABASE ENTRY DATE: 2001-10-16
METPSQRRPTRSGAQASSTPLSPTRITRLQEKEDLQELNDRLAVYIDRVRSLETENAGLRLRITESEEVVSREVSGIKAAYEAELGDARKTLDSVAKERARLQLELSKVREEFKELKARNTKKEGDLLAAQARLKDLEALLNSKEAALSTALSEKRTLEGELHDLRGQVAKLEAALGEAKKQLQDEMLRRVDAENRLQTLKEELDFQKNIYSEELRETKRRHETRLVEIDNGKQREFESRLADALQELRAQHEDQVEQYKKELEKTYSAKLDNARQSAERNSNLVGAAHEELQQSRIRIDSLSAQLSQLQKQLAAKEAKLRDLEDSLARERDTSRRLLAEKEREMAEMRARMQQQLDEYQELLDIKLALDMEIHAYRKLLEGEEERLRLSPSPTSQRSRGRASSHSSQSQGGGSVTKKRKLESSESRSSFSQHARTSGRVAVEEVDEEGKFVRLRNKSNEDQSMGNWQIKRQNGDDPLMTYRFPPKFTLKAGQVVTIWASGAGATHSPPTDLVWKAQNTWGCGTSLRTALINATGEEVAMRKLVRSLTMVEDNDDEEEDGDELLHHHRGSHCSSSGDPAEYNLRSRTVLCGTCGQPADKAASGSGAQVGGSISSGSSASSVTVTRSFRSVGGSGGGSFGDNLVTRSYLLGNSSPRTQSSQNCSIM

SEQ ID NO: 9920 - DNA, 848 bp, Homo sapiens
  ref <308>: DATABASE ACCESSION NUMBER: EMBL / AF381029
  ref <309>: DATABASE ENTRY DATE: 2001-06-08
gcctaccgcaagctcttggagggcgaggaggagaggctacgcctgtcccccagccctacctcgcagcgcagccgtggccgtgcttcctctcactcatcccagacacagggtgggggcagcgtcaccaaaaagcgcaaactggagtccactgagagccgcagcagcttctcacagcacgcacgcactagcgggcgcgtggccgtggaggaggtggatgaggagggcaagtttgtccggctgcgcaacaagtccaatgaggaccagtccatgggcaattggcagatcaagcgccagaatggagatgatcccttgctgacttaccggttcccaccaaagttcaccctgaaggctgggcaggtggtgacgatctgggctgcaggagctggggccacccacagcccccctaccgacctggtgtggaaggcacagaacacctggggctgcgggaacagcctgcgtacggctctcatcaactccactggggaaggctcccactgcagcagctcgggggaccccgctgagtacaacctgcgctcgcgcaccgtgctgtgcgggacctgcgggcagcctgccgacaaggcatctgccagcggctcaggagcccaggtgggcggacccatctcctctggctcttctgcctccagtgtcacggtcactcgcagctaccgcagtgtggggggcagtgggggtggcagcttcggggacaatctggtcacccgctcctacctcctgggcaactccagcccccgaacccagagcccccagaactgcagcatcatgtaatctgggacctgccaggcaggggtgggggtggaggcttcctgcgtcctcctcacctcatgcccacc

SEQ ID NO: 9921 - protein, 664 aa, Homo sapiens
  ref <308>: DATABASE ACCESSION NUMBER: SWISS-Prot / P02545
  ref <309>: DATABASE ENTRY DATE: 2002-06-15
METPSQRRATRSGAQASSTPLSPTRITRLQEKEDLQELNDRLAVYIDRVRSLETENAGLRLRITESEEVVSREVSGIKAAYEAELGDARKTLDSVAKERARLQLELSKVREEFKELKARNTKKEGDLIAAQARLKDLEALLNSKEAALSTALSEKRTLEGELHDLRGQVAKLEAALGEAKKQLQDEMLRRVDAENRLQTMKEELDFQKNIYSEELRETKRRHETRLVEIDNGKQREFESRLADALQELRAQHEDQVEQYKKELEKTYSAKLDNARQSAERNSNLVGAAHEELQQSRIRIDSLSAQLSQLQKQLAAKEAKLRDLEDSLARERDTSRRLLAEKEREMAEMRARMQQQLDEYQELLDIKLALDMEIHAYRKLLEGEEERLRLSPSPTSQRSRGRASSHSSQTQGGGSVTKKRKLESTESRSSFSQHARTSGRVAVEEVDEEGKFVRLRNKSNEDQSMGNWQIKRQNGDDPLLTYRFPPKFTLKAGQVVTIWAAGAGATHSPPTDLVWKAQNTWGCGNSLRTALINSTGEEVAMRKLVRSVTVVEDDEDEDGDDLLHHHHGSHCSSSGDPAEYNLRSRTVLCGTCGQPADKASASGSGAQVGGPISSGSSASSVTVTRSYRSVGGSGGGSFGDNLVTRSYLLGNSSPRTQSPQNCSIM

SEQ ID NO: 9922 - DNA, 1449 bp, Rattus norvegicus
  ref <308>: DATABASE ACCESSION NUMBER: EMBL / X66974
  ref <309>: DATABASE ENTRY DATE: 1998-01-26
gggcggcaccgagtgacagcgctgagaggcttaagatctccggagccgctcgccatggctggcccgcagcagcagcccccttacctgcacctggccgagctgactgcatcccagttcctggaaatctggaagcactttgatgctgacggaaatgggtacattgaaggtaaagagctagaaaacttcttccaggagctggagaaggcaaggaaaggttctggcatgatgtccaagagcgacaattttggagagaagatgaaggagttcatgcagaagtatgataagaactcagatgggaaaattgagatggcagagctggcgcagatcctgccaaccgaagagaatttccttttgtgcttcaggcagcacgtgggctccagcgctgagtttatggaggcttggcggaagtatgacacagacagaagtggctacatcgaagcaaatgagctcaagggatttctgtccgacctcctgaagaaggccaaccgtccctatgatgaacctaagctccaggagtacacccaaaccatactacgcatgtttgacttaaatggagacggcaaattgggtctctcagagatgtctagactcttgcctgtacaagaaaacttcctgctgaaatttcagggtatgaagctgacctcagaagagttcaatgccatcttcacattctatgacaaggatggaagcggctacatcgatgagaacgagctggacgccctcctgaaggatctgtatgagaagaacaagaaggagatgaatatccagcagctcaccacctacaggaagagcgtcatgtccttggccgaggcagggaaactctacagaaaggacctggagattgtgctttgcagtgagccccccatgtaaaggggtgaagggacaggggctgcttctgcacctcccctaaaccctgccccccactgccctgactctcttgaaactccttcccagacctctccacccctgcaacctgcacacaccagcctgtggggcaggaaaggagagatggaaagagggtggctggtagcattcctttgagctgcaccagcccaaccctggcctgacagacagctgtgcctgtggtgggtgggtcacacggttggtgggtaggggcacaggtggggcttccctagtctctttgctgtgatgcatgagctcctcgctgtatgattagcttccgagtccaacagagtgcactccttcctcttgctgcaccagcctccttctccccaggccccccactgacccccgcaattccaggttctgtccaccggcttgctaatgatataactgtcttctcagagctactgtggagggtcattgccctcttcttgtgttcttgacttgtgtgttccttttattttggggtttccctgtcttctcgtttaccaaagaagagtttacagagaataaagtggaaatgtcctgccgtgaaaaaaaaaaaaa

SEQ ID NO: 9923 - protein, 271 aa, Rattus norvegicus
  ref <308>: DATABASE ACCESSION NUMBER: SWISS-Prot / P47728
  ref <309>: DATABASE ENTRY DATE: 2002-06-15
MAGPQQQPPYLHLAELTASQFLEIWKHFDADGNGYIEGKELENFFQELEKARKGSGMMSKSDNFGEKMKEFMQKYDKNSDGKIEMAELAQILPTEENFLLCFRQHVGSSAEFMEAWRKYDTDRSGYIEANELKGFLSDLLKKANRPYDEPKLQEYTQTILRMFDLNGDGKLGLSEMSRLLPVQENFLLKFQGMKLTSEEFNAIFTFYDKDGSGYIDENELDALLKDLYEKNKKEMNIQQLTTYRKSVMSLAEAGKLYRKDLEIVLCSEPPM

SEQ ID NO: 9924 - DNA, 1413 bp, Homo sapiens
  ref <308>: DATABASE ACCESSION NUMBER: Refseq / NM_007087
  ref <309>: DATABASE ENTRY DATE: 2002-11-05
agcgcgagtgccagagcccagccggcgcggagcgggagcggtgcaggctgaggtctccgagcggctcgccatggctggcccgcagcagcagcccccttacctgcacctggccgagctgacggcgtcccagttcctggaaatatggaagcactttgacgcagacggaaatgggtatattgaaggtaaagagctagaaaactttttccaagagctggagaaggcaaggaaaggctctggcatgatgtcaaagagtgacaactttggagaaaagatgaaggagttcatgcagaagtatgataaaaactcagatgggaaaatcgagatggcagagctggcgcagatcctgccaaccgaagagaacttccttctgtgcttcaggcagcacgtgggctccagcgccgagtttatggaggcttggcggaagtacgacacagacaggagtggctacatcgaagccaatgagctcaagggattcctgtcagacctgctgaagaaggcgaaccggccgtacgatgagcccaagctccaggaatacacccaaaccatactacggatgtttgacttgaacggggatggcaaattgggcctctcagagatgtcccgggcatgaagctgacctcagaggagtttaacgcgatcttcacattttacgacaaggatagaagcggctacattgacgagcatgagctggatgcccttttgaaggatctgtacgagaaaaacaaaaaggaaatcaatattcaacagctcaccaactacagaaagagcgtcatgtccttggcagaggcagggaagctctaccgcaaggacctggagattgtgctctgcagcgagccccccatgtaaagtggggacgggggctgcttctccacctcccccaaaccctgcttctgctgccctgatgcgtctacccagactcagagaccgtgagcgccccgcccccacccctacagcctgcacacacctgcctgcagagcaggaaacgagagatagaggatgggcagctggggggctgtcctgagccccctgcacccacccctgcccaggcagtctttgctcagtggatcacacacatggaaggtgatgggggcatgggtggagggtccctaattctcttcgctgtgatgcatgagctccctcgctgtatgatttaggcttctatgtccaacagagtggactcttccctctcgctcccctctgccggtcccccatgccaccacccaccccaaacttccaggttccatccaccaccttgccaatggtgtagctgtcctctcagaactcctgtgtgtggaaggcacccgccctttccttgccttctttactcggcgtgctccttttctctttgggtttcttgtttaccaaagaagagtttacagacaataaaatggaaaggtcctgctgtggaaactt

SEQ ID NO: 9925 - protein, 271 aa, Homo sapiens
  ref <308>: DATABASE ACCESSION NUMBER: SWISS-Prot / P22676
  ref <309>: DATABASE ENTRY DATE: 2002-06-15
MAGPQQQPPYLHLAELTASQFLEIWKHFDADGNGYIEGKELENFFQELEKARKGSGMMSKSDNFGEKMKEFMQKYDKNSDGKIEMAELAQILPTEENFLLCFRQHVGSSAEFMEAWRKYDTDRSGYIEANELKGFLSDLLKKANRPYDEPKLQEYTQTILRMFDLNGDGKLGLSEMSRLLPVQENFLLKFQGMKLTSEEFNAIFTFYDKDRSGYIDEHELDALLKDLYEKNKKEINIQQLTNYRKSVMSLAEAGKLYRKDLEIVLCSEPPM

SEQ ID NO: 9926 - DNA, 1449 bp, Rattus norvegicus; identical to SEQ ID NO: 9922
  ref <308>: DATABASE ACCESSION NUMBER: EMBL / X66974
  ref <309>: DATABASE ENTRY DATE: 1998-01-26

SEQ ID NO: 9927 - protein, 271 aa, Rattus norvegicus; identical to SEQ ID NO: 9923
  ref <308>: DATABASE ACCESSION NUMBER: SWISS-Prot / P47728
  ref <309>: DATABASE ENTRY DATE: 2002-06-15

SEQ ID NO: 9928 - DNA, 1413 bp, Homo sapiens; identical to SEQ ID NO: 9924
  ref <308>: DATABASE ACCESSION NUMBER: Refseq / NM_007087
  ref <309>: DATABASE ENTRY DATE: 2002-11-05

SEQ ID NO: 9929 - protein, 271 aa, Homo sapiens; identical to SEQ ID NO: 9925
  ref <308>: DATABASE ACCESSION NUMBER: SWISS-Prot / P22676
  ref <309>: DATABASE ENTRY DATE: 2002-06-15

SEQ ID NO: 9930 - DNA, 1489 bp, Rattus norvegicus
  ref <308>: DATABASE ACCESSION NUMBER: EMBL / X67788
  ref <309>: DATABASE ENTRY DATE: 1995-10-24
caagattgccctgctggaggaggcacggaggcgcaaggaggacgaggtggaggagtggcagcaccgggctaaagaggcccaggacgacctggtgaagaccaaagaggagctgcacctggtgatgacggctcccccgcccccacccccgcccgtgtacgagcccgtgaattaccacgtgcaggaggggctgcaggatgagggagcagagcccatgggctacagtgccgagctctccagcgagggcatcctggacgaccgtaacgaggagaagcggatcaccgaggcagagaagaacgagcgcgtgcagcggcagccgttgactctgagcaatgagttgtcccaggcccgggatgagaataagaggacccacaatgacatcatccacaatgagaacatgcggcaaggccgggacaagtataagacgctgcggcagatcaggcagggcaacaccaagcagcgcatcgacgagtttgaggccatgtagaggccaggccgggaccaagggcggagggcacctcacagcaggcaggtgtcactcttggctctttagtactctataagtctagaaacccccttgccgtgttccagtcccttaaagagcaggtaccgggcgatgttctgccccaagacccagtggaatcctccctggttgcttccaatagtatcacatagtgccaaacaggccagatttttatgacagttgccgaatcacttcccgttcggagcagggattcggagggctggcccgaatgacgcgattcagtgtcactggggataataatagcactgtggctcacacacgggtgccatactttctctagttttacaatgagctcaaatcgattttgttcttgatttctatgaaggatccatctctgtgtgttgaggggtgaaaatgattttgaaatttgagtcttaagacgccccacacagtctccttcctccagaccgctggcagagtctcctgcggtccctcagagtgtacggtacaggactctccgatacaaaattctcatgcttaccctgttagcattcattgttggactgatacacctaatgatcttctatagagaatagtatttatatataagcgataatatgggtttgtaacattagttttaaaaagggaaagttttgttctgtatattttgttaccttttacagaataaaagaattcaacattaagaaccagtaatcacgacacttgatctgacacgggggcaggtgggagaccgatgaccggaatcgccgctgtacaaaaatgttagtgggttttgtgcatgtaaaacgcacacttcaacttcctgtcagttcttcactgagagcagtcagactctagcccgaagggactcaggcctgtttattgtgaacaacttgttcctgttttcagtttgtcttccttccttgagccggactgtcctttttggttgtgatgtcctgtgcaggtcactccgcaccagatttacacacaataaaagttctccaaggc

SEQ ID NO: 9931 - protein, 160 aa, Rattus norvegicus; identical to SEQ ID NO: 414
  ref <308>: DATABASE ACCESSION NUMBER: SWISS-Prot / P31977
  ref <309>: DATABASE ENTRY DATE: 2001-10-16

SEQ ID NO: 9932 - DNA, 3044 bp, Homo sapiens
  misc_feature (1)..(3044): n=a, c, g or t
  ref <308>: DATABASE ACCESSION NUMBER: EMBL / X51521
  ref <309>: DATABASE ENTRY DATE: 1993-09-12
aggcagggcgggcgggcgctctaagggttctgctctgactccaggttgggacagcgtcttcgctgctgctggatagtcgtgttttcggggatcgaggatactcaccagaaaccgaaaatgccgaaaccaatcaatgtccgagttaccaccatggatgcagagctggagtttgcaatccagccaaatacaactggaaaacagctttttgatcaggtggtaaagactatcggcctccgggaagtgtggtactttggcctccactatgtggataataaaggatttcctacctggctgaagctggataagaaggtgtctgcccaggaggtcaggaaggagaatcccctccagttcaagttccgggccaagttctaccctgaagatgtggctgaggagctcatccaggacatcacccagaaacttttcttcctccaagtgaaggaaggaatccttagcgatgagatctactgcccccctgagactgccgtgctcttggggtcctacgctgtgcaggccaagtttggggactacaacaaagaagtgcacaagtctgggtacctcagctctgagcggctgatccctcaaagagtgatggaccagcacaaacttaccagggaccagtgggaggaccggatccaggtgtggcatgcggaacaccgtgggatgctcaaagataatgctatgttggaatacctgaagattgctcaggacctggaaatgtatggaatcaactatttcgagataaaaaacaagaaaggaacagacctttggcttggagttgatgcccttggactgaatatttatgagaaagatgataagttaaccccaaagattggctttccttggagtgaaatcaggaacatctctttcaatgacaaaaagtttgtcattaaacccatcgacaagaaggcacctgactttgtgttttatgccccacgtctgagaatcaacaagcggatcctgcagctctgcatgggcaaccatgagttgtatatgcgccgcaggaagcctgacaccatcgaggtgcagcagatgaaggcccaggcccgggaggagaagcatcagaagcagctggagcggcaacagctggaaacagagaagaaaaggagagaaaccgtggagagagagaaagagcagatgatgcgcgagaaggaggagttgatgctgcggctgcaggactatgaggagaagacaaagaaggcagagagagagctctcggagcagattcagagggccctgcagctggaggaggagaggaagcgggcacaggaggaggccgagcgcctagaggctgaccgtatggctgcactgcgggctaaggaggagctggagagacaggcggtggatcagataaagagccaggagcagctggctgcggagcttgcagaatacacagccaagattgccctcctggaagaggcgcggaggcgcaaggaggatgaagttgaagagtggcagcacagggccaaagaagcccaggatgacctggtgaagaccaaggaggagctgcacctggtgatgacagcacccccgcccccaccaccccccgtgtacgagccggtgagctaccatgtccaggagagcttgcaggatgagggcgcagagcccacgggctacagcgcggagctgtctagtgagggcatccgggatgaccgcaatgaggagaagcgcatcactgaggcagagaagaacgagcgtgtgcagcggcagctcgtgacgctgagcagcgagctgtcccaggcccgagatgagaataagaggacccacaatgacatcatccacaacgagaacatgaggcaaggccgggacaagtacaagacgctgcggcagatccggcagggcaacaccaagcagcgcatcgacgagttcgaggccctgtaacagccaggccaggaccaagggcagaggggtgctcatagcgggcgctgccagccccgccacgcttgtctttagtgctccaagtctaggaactccctcagatcccagttcctttagaaagcagttacccaacagaaacattctgggctgggaaccagggaggcgccctggtttgttttccccagttgtaatagtgccaagcaggcctgattctcgcgattattctcgaatcacctcctgtgttgtgctgggagcaggactgattgaattacggaaaatgcctgtaaagtctgagtaagaaacttcatgctggcctgtgtgatacaagagtcagcatcattaaaggaaacgtggcaggacttccatctgtgccatacttgttctgtattcgaaatgagctcaaattgatttttttaatttctatgaaggatccatctttgtatatttacatgcttagaggggtgaaaattattttggaaattgagtctgaagcactctcgcacacacagtgattccctcctcccgtcactccacgcagctggcagagagcacagtgatcaccagcgtgagtggtggaggaggacacttggatatttttttagttcttttttttttggcttaacagttttagaatacattgtacttatacaccttattaatgatcagctatatactatttatatacaagtgataatacagatttgtaacattagttttaaaaagggaaagttttgttctgtatattttgttaccttttacagaataaaagaattacatatgaaaaaccctctaaaccatggcacttgatgtgatgtggcaggagggnagtggtggagctggacctgcctgctgcagctgcagtcacgtgtaaacaggattattattagtgttttatgcatgtaatggactatgcacacttttaattttgtcagattcacacatgccactatgagctttcagactccagctgtgaagagactctgtctgcttgtgtttgtttgcagtctctctctgccatggccttggcaggctgctggaaggcagcttgtggaggccgttggttccgcccactcattccttctcgtgcactgctttctccttcacagctaagatgccatgtgcaggtggattccatgccgcagacatgaaataaaagctttgcaaaggca

SEQ ID NO: 9933 - protein, 585 aa, Homo sapiens
  ref <308>: DATABASE ACCESSION NUMBER: SWISS-Prot / P15311
  ref <309>: DATABASE ENTRY DATE: 2002-06-15
PKPINVRVTTMDAELEFAIQPNTTGKQLFDQVVKTIGLREVWYFGLHYVDNKGFPTWLKLDKKVSAQEVRKENPLQFKFRAKFYPEDVAEELIQDITQKLFFLQVKEGILSDEIYCPPETAVLLGSYAVQAKFGDYNKEVHKSGYLSSERLIPQRVMDQHKLTRDQWEDRIQVWHAEHRGMLKDNAMLEYLKIAQDLEMYGINYFEIKNKKGTDLWLGVDALGLNIYEKDDKLTPKIGFPWSEIRNISFNDKKFVIKPIDKKAPDFVFYAPRLRINKRILQLCMGNHELYMRRRKPDTIEVQQMKAQAREEKHQKQLERQQLETEKKRRETVEREKEQMMREKEELMLRLQDYEEKTKKAERELSEQIQRALQLEEERKRAQEEAERLEADRMAALRAKEELERQAVDQIKSQEQLAAELAEYTAKIALLEEARRRKEDEVEEWQHRAKEAQDDLVKTKEELHLVMTAPPPPPPPVYEPVSYHVQESLQDEGAEPTGYSAELSSEGIRDDRNEEKRITEAEKNERVQRQLVTLSSELSQARDENKRTHNDIIHNENMRQGRDKYKTLRQIRQGNTKQRIDEFEAL

SEQ ID NO: 9934 - DNA, 1521 bp, Rattus norvegicus
  ref <308>: DATABASE ACCESSION NUMBER: EMBL / X67859
  ref <309>: DATABASE ENTRY DATE: 1992-08-06
gaatctttgagtgtgagaaactttacagatagccacaatggctgaaaatggagataacgaaaaaatggctgctctggaggccaaaatctgtcatcaaattgagtattattttggagacttcaatttgccacgagacaagtttttaaaagaacagatcaaattggatgaaggctgggtacctttggaaacaatgataaaattcaacaggctaaaccgactgacaacagactttaatgtaatcgtgcaagcattgagcaaatctaaggcaaatctcatggaagtgagtgcagacaaaactaaaattagaagatcaccaagcagaccactccctgaagtgacggatgagtataagaatgatgtgaaaaatagatctgtttatattaaaggcttcccaactgatgccacccttgatgatataaaagaatggctagatgataaaggccaaatactgaatattcagatgagaagaacattgcacaaaacatttaaggggtcaatatttgctgtgtttgatagtattcagtctgcaaagaagtttgtggacacccccggccagaagtacaaagacactaatctgctaatactcttcaaggaagattactttgcaaaaaaaaatgaagaaagaaagcagagcaaagtggaagctaaattaaaagctaaacaagaacatgaaggacgacacaaaccaggaagtactgaaacaagagctctagaaggaaaaatgggatgcttactgaagttttcaggtgacttggatgaccagacctgtagagaagatttccacttccttttctcaaatcatggtgaaataaaatggattgactttgtcagaggagcaaaagagggaataattctcttcaaagaaaaggctaaggacgcacttgagaaagccagaagtgcaaataatggtaacctactgttaaggaacaaaaaagtgacttggaaagtactagaaggacatgcagaaaaagatgcaatgaaaaaaatcacagatgatcaacaagaatctctgaacaaatggaagtcaaaaggaggtcatgcagcccgcagatttaaaggaagtcatgtttttacagcagctcgcagatttaaaggaagagggaaaggtaatagacctgcttatgctggggcacccaaaggaagaggacagtttcaaggaaggaggacaagatttgatgatgatgatcatcgtcgtggaccagtgaaaagaggaatagacggaagagacagagaagaacccgcatcaaagcataagaaaagagagaatggtgctagagacaagtagtttatttagtaagcagtgtttttattccttagttaggttttaagctgctttttgtcttcagaagcttttaaaagaaaagcgaattaggccacttcaatgtccacctgtataaaaggaaaagttttttgttttacttgtctttttgttgttatccaaatgaaagttttttaaaatgtatagttctgtttgtgtttggatgattaaaatatgaaaaggaaaaaaaaaaaaaaaaaaaa

SEQ ID NO: 9935 - protein, 415 aa, Rattus norvegicus
  ref <308>: DATABASE ACCESSION NUMBER: SWISS-Prot / P38656
  ref <309>: DATABASE ENTRY DATE: 2001-10-16
MAENGDNEKMAALEAKICHQIEYYFGDFNLPRDKFLKEQIKLDEGWVPLETMIKFNRLNRLTTDFNVIVQALSKSKANLMEVSADKTKIRRSPSRPLPEVTDEYKNDVKNRSVYIKGFPTDATLDDIKEWLDDKGQILNIQMRRTLHKTFKGSIFAVFDSIQSAKKFVDTPGQKYKDTNLLILFKEDYFAKKNEERKQSKVEAKLKAKQEHEGRHKPGSTETRALEGKMGCLLKFSGDLDDQTCREDFHFLFSNHGEIKWIDFVRGAKEGIILFKEKAKDALEKARSANNGNLLLRNKKVTWKVLEGHAEKDAMKKITDDQQESLNKWKSKGGHAARRFKGSHVFTAARRFKGRGKGNRPAYAGAPKGRGQFQGRRTRFDDDDHRRGPVKRGIDGRDREEPASKHKKRENGARDK

SEQ ID NO: 9936 - DNA, 1619 bp, Homo sapiens
  ref <308>: DATABASE ACCESSION NUMBER: Refseq / NM_003142
  ref <309>: DATABASE ENTRY DATE: 2001-12-10
ggagtcgttgttgttgctgtttgtgagcctgtgcggcggcttctgtgggccggaaccttaaagatagccgcaatggctgaaaatggtgataatgaaaagatggctgccctggaggccaaaatctgtcatcaaattgagtattattttggcgacttcaatttgccacgggacaagtttctaaaggaacagataaaactggatgaaggctgggtacctttggagataatgataaaattcaacaggttgaaccgtctaacaacagactttaatgtaattgtggaagcattgagcaaatccaaggcagaactcatggaaatcagtgaagataaaactaaaatcagaaggtctccaagcaaacccctacctgaagtgactgatgagtataaaaatgatgtaaaaaacagatctgtttatattaaaggcttcccaactgatgcaactcttgatgacataaaagaatggttagaagataaaggtcaagtactaaatattcagatgagaagaacattgcataaagcatttaagggatcaatttttgttgtgtttgatagcattgaatctgctaagaaatttgtagagacccctggccagaagtacaaagaaacagacctgctaatacttttcaaggacgattactttgccaaaaaaaatgaagaaagaaaacaaaataaagtggaagctaaattaagagctaaacaggagcaagaagcaaaacaaaagttagaagaagatgctgaaatgaaatctctagaagaaaagattggatgcttgctgaaattttcgggtgatttagatgatcagacctgtagagaagatttacacatacttttctcaaatcatggtgaaataaaatggatagacttcgtcagaggagcaaaagaggggataattctatttaaagaaaaagccaaggaagcattgggtaaagccaaagatgcaaataatggtaacctacaattaaggaacaaagaagtgacttgggaagtactagaaggagaggtggaaaaagaagcactgaagaaaataatagaagaccaacaagaatccctaaacaaatggaagtcaaaaggtcgtagatttaaaggaaaaggaaagggtaataaagctgcccagcctgggtctggtaaaggaaaagtacagtttcagggcaagaaaacgaaatttgctagtgatgatgaacatgatgaacatgatgaaaatggtgcaactggacctgtgaaaagagcaagagaagaaacagacaaagaagaacctgcatccaaacaacagaaaacagaaaatggtgctggagaccagtagtttagtaaaccaattttttattcattttaaataggttttaaacgacttttgtttgcggggcttttaaaaggaaaaccgaattaggtccacttcaatgtccacctgtgagaaaggaaaaatttttttgttgtttaacttgtctttttgttatgcaaatgagatttctttgaatgtattgttctgtttgtgttatttcagatgattcaaatatcaaaaggaagattcttccattaaattgcctttgtaatatgagaatgtattagtacaaactaactaataaaatatatactatatgaaaagagcaaaaaaaaaaaaaaaaa

SEQ ID NO: 9937 - protein, 408 aa, Homo sapiens; identical to SEQ ID NO: 8793
  ref <308>: DATABASE ACCESSION NUMBER: SWISS-Prot / P05455
  ref <309>: DATABASE ENTRY DATE: 2002-06-15

SEQ ID NO: 9938 - DNA, 1521 bp, Rattus norvegicus; identical to SEQ ID NO: 9934
  ref <308>: DATABASE ACCESSION NUMBER: EMBL / X67859
  ref <309>: DATABASE ENTRY DATE: 1992-08-06

SEQ ID NO: 9939 - protein, 415 aa, Rattus norvegicus; identical to SEQ ID NO: 9935
  ref <308>: DATABASE ACCESSION NUMBER: SWISS-Prot / P38656
  ref <309>: DATABASE ENTRY DATE: 2001-10-16

SEQ ID NO: 9940 - DNA, 1619 bp, Homo sapiens; identical to SEQ ID NO: 9936
  ref <308>: DATABASE ACCESSION NUMBER: Refseq / NM_003142
  ref <309>: DATABASE ENTRY DATE: 2001-12-10

SEQ ID NO: 9941 - protein, 408 aa, Homo sapiens; identical to SEQ ID NO: 8793
  ref <308>: DATABASE ACCESSION NUMBER: SWISS-Prot / P05455
  ref <309>: DATABASE ENTRY DATE: 2002-06-15

SEQ ID NO: 9942 - DNA, 1526 bp, Rattus norvegicus
  ref <308>: DATABASE ACCESSION NUMBER: EMBL / X67877
  ref <309>: DATABASE ENTRY DATE: 1994-09-08
ctctcctgaccctgcgcgccgcgggaagatggcgcttgaagctggcgacatggaagagggacagctttccgactcggattccgacatgacggtcgtccccagcgataggcctctgcaaatggcgaaagtactaggtgggggcggtgctgcatgcgcaccagtgtcaaactatcggactgttaaacatgtggactccagtgaggagagtctggattccgatgacgattgctctctttggaaacgtaagcggcagaaatgtcacagtcctcctcccaagccagagcctttcccatttggacagagcggtcagaaacaagctctcaacggtgggaagaaggtgaacaacatctggggtgctgtgctacaggaacagaaccaagatgctgtggccactgagctcggcatcttgggaatggaaggcaccatcgacagaagcaggcagtctgagacctataattatttgcttgctaagaaacttgctaagaaggaatctcaagagtatacaaaagaattagacaaagatctggatgagtatatgcatggcgacaaaaaacctgggtcaaaggaagaggagaatgggcaaggtcatctcaaacggaaacggcctgtccgagacagactgggtaacagagtagaaatgaactacaaaggccgctacgacatcacagaggaggattctcccgagaaagtggctgatgagattgccttcaggttacggaaccgaagaaggacctgatagcccgagtagtgacgatacttgggaacaaaaaggccattgaacttctgatggagacggctgaggttgagcaaaatggtggccttttcataatgaatggaagccgaaggagaacgccgggtggggttttcctcaatctcctgaagaacacgcccagcatcagcgaagagcagatcaaggatattttctacattgaaaatcaaaaagaatatgaaaataaaaaagctgctagaaaaagaagaacacaactattggggaagaaaatgaaagaagctattaaaagtctaaatttccaggaagatgatgacacatctcgagaaacgtttgcaagtgacactaatgaggccctggcctctcttgacgaagcccaggaaggacccggtgaaaccaagctggatgctgaggacgccatcgacgtggaccaccctcaggatttggacatcttttaagcacactttggacattttgaagcaataaacctttgttttttaaaaaaggtgttaccaatttctactgaggttgctttactgtgcaccgacactgaggcgggagagctgtgtctgtgctcccgtgaagtagtaatgtatgtggtagtcgtgccgtcgccgcagtgtggaaggtggctgcatctgacggctgctgtacagcacgggctaatttctctactctgcatgtgctgactgttagcctacgtggagctgtgtcctctctgtccagctcactgtttcatgccagtaagacattttggttttctcattcatctttgtggtgaactatgctttggttttaa

SEQ ID NO: 9943 - protein, 235 aa, Rattus norvegicus
  ref <308>: DATABASE ACCESSION NUMBER: SWISS-Prot / CAA48076
  ref <309>: DATABASE ENTRY DATE: 2001-12-01
MALEAGDMEEGQLSDSDSDMTVVPSDRPLQMAKVLGGGGAACAPVSNYRTVKHVDSSEESLDSDDDCSLWKRKRQKCHSPPPKPEPFPFGQSGQKQALNGGKKVNNIWGAVLQEQNQDAVATELGILGMEGTIDRSRQSETYNYLLAKKLAKKESQEYTKELDKDLDEYMHGDKKPGSKEEENGQGHLKRKRPVRDRLGNRVEMNYKGRYDITEEDSPEKVADEIAFRLRNRRRT

SEQ ID NO: 9944 - DNA, 2903 bp, Homo sapiens
aagtgctctcctgacccgccgctgtgcagcgcagcgcaccgcgggaagatggcgttggaggtcggcgatatggaagatgggcagctttccgactcggattccgacatgacggtcgcacccagcgacaggccgctgcaattgccaaaagtgctaggtggcgacagtgctatgagggccttccagaacacggcaactgcatgtgcaccagtatcacattatcgagctgttgaaagtgtggattcaagtgaagaaagtttttctgattcagatgatgatagctgtctttggaaacgcaaacgacagaaatgttttaaccctcctcccaaaccagagccttttcagtttggccagagcagtcagaaaccacctgttgctggaggaaagaagattaacaacatatggggtgctgtgctgcaggaacagaatcaagatgcagtggccactgaacttggtatcttgggaatggagggcactattgacagaagcagacaatccgagacctacaattatttgcttgccaagaaacttaggaaggaatctcaagagcatacaaaagatctagacaaggaactagatgaatatatgcatggtggcaaaaaaatgggatcaaaggaagaggaaaatgggcaaggtcatctcaaaaggaaacgacctgtcaaagacaggctagggaacagaccagaaatgaactataaaggtcgatacgagatcacagcggaagattctcaagagaaagtggctgatgaaatttcattcaggttacaggaaccaaagaaagacctgatagcccgagtagtgaggattattggtaacaaaaaggcaattgaacttctgatggaaaccgctgaagttgaacaaaatggtggtctctttataatgaatggtagtcgaagaagaacaccaggtggagtttttctgaatctcttgaaaaacactcctagtatcagcgaggaacaaattaaggacattttctacattgaaaaccaaaaggaatatgaaaataaaaaagctgctaggaagaggagaacacaagtgttggggaaaaagatgaaacaagctattaaaagtctaaattttcaagaagatgatgatacatcacgagaaacttttgcaagtgacacgaatgaggccttggcctctcttgatgagtcacaggaaggacatgcagaagccaagttggaggcagaggaagccattgaagttgatcattctcatgatttggacatcttttaagtacattttcaacagtttgaggactaagcctttctaaaataacattgtaataaaccatttttactgagattgcaacgttttgcactgataaacatgagaatctggaggaaagacaattgttttcttgtttaaaatatgtgtggaaaggaatgcaattgatagaacatttaaagatatatctgacaaaatacttaagagtatatagcacaggatttaatttctcaatctgttgcatgtgctaattatgagtattactagttgataatcagttttgtctaggtcataacataccatttgtaagtttgtttgctttttcaggtttatctttgcagtgaattatgctttgctttaaaacattccgctaaaatcataatgggacatataaattattaagctgttagaaatgcattcaaatttgttttttctgtgttctaagaactcaggcaattttaaggataaaaactaacattggccaggcacggtggctcacgcctgtaatcccaacactttaggagaccaaggcgggcagatcacttgaggtcagaagtttgagaccagccaggccaacatggtgaaacttcatctctactaaaaatacaaaaactagccaggtgtggttctccatgcctataatcccggctactcgggaggctgaggcaggagaatcacctgaacccccaggctggagtacagtggcaggatctcagcttactgcagcttccatctcccaggttcaagcgatcatgtgcctaagcctcctgagtagctgggatcacaggtgtgtaccaccacgcccagctgatttttgtatttttagtaaagactttcgccatgttgtccaggctggtctcgaactcctggcctaatgatctgcccacctctgcctcccaaagtgctgggatcacaggcatgagccaccgaacccagccttattctgcttaaatttaacgtgttttttgacttcttaattaacttggtcatatactaaatgtgatctcctgtggattaccacatgcattaaaaaatttttcaagctgggcctagtggcgcacacctgcaatcccaacactttgggaggccaagagaggaagattgcttgagcccaggagtttgagaccaatctaggcaatgtagtgagaccctgtctctaatttaaaaaagaaaaagaaaaaaacattcccagtggcagcctgcctaagactgtcttaccttatgttaaggaagtcaggtatttaaaatgttacatatgccggcgcagtggctcatgtgtgtaatcccagcactctgggaggctgagacaggtagatcatttgaggtcaggagttcaaaaccaacctggtctacatggtgaaaccccatctcaactaaaaatacaaaaaatacaaaaaattagccgggcgcggtggctcacacctgtaatcccagcactttgggaggtggaggcgggtggatcacaaggtcaagagatcgagaccatcctggccaacatggtgaaaccctgtctctattaaaaatacaaaaattagctgggcgtggtggcgcatgcctgtagtcccaactactagggaggctgaggcaggagaatcacttgaacccaggaggtggaggttgcagtgagccgagatcacgccactgcactccagcctggcgacagagcgagactccctctc

SEQ ID NO: 9945 - protein, 394 aa, Homo sapiens
MALEVGDMEDGQLSDSDSDMTVAPSDRPLQLPKVLGGDSAMRAFQNTATACAPVSHYRAVESVDSSEESFSDSDDDSCLWKRKRQKCFNPPPKPEPFQFGQSSQKPPVAGGKKINNIWGAVLQEQNQDAVATELGILGMEGTIDRSRQSETYNYLLAKKLRKESQEHTKDLDKELDEYMHGGKKMGSKEEENGQGHLKRKRPVKDRLGNRPEMNYKGRYEITAEDSQEKVADEISFRLQEPKKDLIARVVRIIGNKKAIELLMETAEVEQNGGLFIMNGSRRRTPGGVFLNLLKNTPSISEEQIKDIFYIENQKEYENKKAARKRRTQVLGKKMKQAIKSLNFQEDDDTSRETFASDTNEALASLDESQEGHAEAKLEAEEAIEVDHSHDLDIF

SEQ ID NO: 9946 - DNA, 1526 bp, Rattus norvegicus; identical to SEQ ID NO: 9942
  ref <308>: DATABASE ACCESSION NUMBER: EMBL / X67877
  ref <309>: DATABASE ENTRY DATE: 1994-09-08

SEQ ID NO: 9947 - protein, 235 aa, Rattus norvegicus; identical to SEQ ID NO: 9943
  ref <308>: DATABASE ACCESSION NUMBER: SWISS-Prot / CAA48076
  ref <309>: DATABASE ENTRY DATE: 2001-12-01

SEQ ID NO: 9948 - DNA, 2903 bp, Homo sapiens; identical to SEQ ID NO: 9944

SEQ ID NO: 9949 - protein, 394 aa, Homo sapiens; identical to SEQ ID NO: 9945

SEQ ID NO: 9950 - DNA, 3227 bp, Rattus norvegicus
  ref <308>: DATABASE ACCESSION NUMBER: EMBL / X68101
  ref <309>: DATABASE ENTRY DATE: 1999-02-24
taagctgtcacgtggacatagtccactcatgaagaaagtttttgatgtctacctgtgtttcctccaaaagcatcagtcagaaatggctttaaaaaatgtcttcactgccttaaggtcattaatttataagttcccctcaacgttctacgaggggcgggcagacatgtgcgcatctctgtgctatgaggttctcaagtgctgtaactccaagctcagctccatccgcaccgaggcctcccagctgctctacttcctgatgaggaacaacttcgactacacagggaagaagtcttttgtccggacacacttacaggtcatcatctctctcagccagctgatcgcagacgtggttggcattggaggaaccagattccagcagtccttgtctatcatcaacaactgtgccaatagcgaccggctcattaagcacaccagcttctcctctgatgtgaaggatttgaccaagaggatccgcacagtcctgatggccacagcccagatgaaggaacatgagaacgacccagagatgctggtggacctgcagtacagcctggccaagtcctacgccagcacccctgagctcaggaagacatggctggacagcatggcaaggatccatgttaaaaatggggatctctcagaggcagcaatgtgctatgtccacgtgacagctttggtagcggaatatctcacacggaaagaagctgacctagcactccagcgggaaccacctgtcttcccctacagccatacctcctgccagaggaagagccggggaggcatgttcagacaggggtgcacagccttcagggtcatcacaccaaacattgatgaagaggcttccatgatggaagatgtcggcatgcaggatgtccatttcaatgaggatgtgctgatggagctgctggagcagtgcgcagatggactttggaaggcagagcggctacgagctggattgctgacatctataaactcatcatccccatctatgaaaagcggagggactttagagactacccacctgtatgacaccctgcaccgcccatacagcaaagtgacagaggtcatcactcgggccgcaggctcctgggacctacttccgggtggcctcttcggacagggattcttcgaagatgaagacgggaaggaatacatctacaaagagcccaaactcacgcctctgtcagagatttctcagagactccttaaactttactcggataaattcggttctgaaaatgtcaaaatgatacaggattctggcaaggtcaacccgaaggatctggattccaagtttgcttacatccaggtgacccatgtgaccccgttctttgatgaaaaggagttacaggagaggaaaacagagtttgaacgatgtcacaacatccggcgcttcatgttcgagatgcccttcacccagactgggaagaggcagggtggcgtggaggagcagtgtaagcgacggaccatcctgacagcaatacactgcttcccctatgtaaagaagcggatccctgtcatgtaccagcaccacactgacctgaaccccattgaggtggccatcgatgaaatgagcaagaaagtggccgagctccaccagctgtgttcctcagctgaagtggacatgatcaaactgcagctcaaactgcagggcagtgtgagcgtccaggtcaatgctggcccgctagcatacgcccgagccttcctcgatgacaccaacacaaagagataccctgacaataaggtgaagctgctgaaggaagttttcaggcaattcgtggaagcttgtggccaagccttggcagtgaacgaacgtctgattaaagaggaccagctggagtaccaggaagagatgaaagccaactacagggagatccggaaggagctctccgacatcatcgtgccgagaatttgccctggagaggacaagcgtgctaccaaattccctgcacatcttcaacgccatcagcgggacaccaacaagcacagtggttcaagggttgaccagttcatcctcagttgtgtgactttacctcatgaaccacacgtggggacatgctttgtcatgtgcaaactcaggacgactttcagagctaatcactggttttgccaagcacaggaagaagccatggggaatgggagagagaaagagccctggactgtgatatttaatagcagattttataggagttgggggaaggtgcacatatttttttaaatctcactggcaatgtttagttttcctcatgtcttaacaggtgtatgtggatactcttgggctgcagttcaattttattcttcttacagtatagtattaaaataaatggtctaaaggaaaagagggaaagtatgctgggacacctgtagcaggtgtgctgggacacctgtaccagctgtgctgggacacctgtaccagctgtgctgggacacctgtagcagatgcagcagcactgaacctgggaatggggactaagctggaaaaatcttgaaaatatttttctccctgtggcacattcaggttgagtacaagaactatttttgtgtctagttttgaagactgaaaggaattgactattgagattttttactagtgaatgcggagacttagagcctttatatccatgccttgtgttgacaacatgagcacttccgaagctgagtgtgatgtgagcctaagcctagtcagcagcatagaaccaaaggcctgcactagcgaacacacctatgctaaaacctaaaaccccatgtacatatgttctgttaatacggcctcctcgctgagtccacgtacttactacatttctacacttttaatacatcagtgtccgtgttaagtttattattcgtgacccatttgtgctgttctcggtatatgcaaatacattggacttcactgtttattcttgtacataagaagtgcaatatggagatgtatacagtctttgctatgttaggtttataaactgtttttaaaaagaaattcatccttttgccaaaatggtggagtatgtgattggtaaaccctaaaccctgtggtgagtggagggataatttaaagttttcaccatgttatattttcttttaagactttaatttagtaattttatatttgggaaaataaaggtttttaatttaactggaatcactgccctgctgtaattacatatcatgtaccccaactgtattaaaaataacactgctgattttctggtaaaaaacgaaaaaaa

SEQ ID NO: 9951 - protein, 738 aa, Rattus norvegicus
  ref <308>: DATABASE ACCESSION NUMBER: SWISS-Prot / CAA48220
  ref <309>: DATABASE ENTRY DATE: 2000-05-01
KLSRGHSPLMKKVFDVYLCFLQKHQSEMALKNVFTALRSLIYKFPSTFYEGRADMCASLCYEVLKCCNSKLSSIRTEASQLLYFLMRNNFDYTGKKSFVRTHLQVIISLSQLIADVVGIGGTRFQQSLSIINNCANSDRLIKHTSFSSDVKDLTKRIRTVLMATAQMKEHENDPEMLVDLQYSLAKSYASTPELRKTWLDSMARIHVKNGDLSEAAMCYVHVTALVAEYLTRKEADLALQREPPVFPYSHTSCQRKSRGGMFRQGCTAFRVITPNIDEEASMMEDVGMQDVHFNEDVLMELLEQCADGLWKAERLRAGLLTSINSSSPSMKSGGTLETTHLYDTLHRPYSKVTEVITRAAGSWDLLPGGLFGQGFFEDEDGKEYIYKEPKLTPLSEISQRLLKLYSDKFGSENVKMIQDSGKVNPKDLDSKFAYIQVTHVTPFFDEKELQERKTEFERCHNIRRFMFEMPFTQTGKRQGGVEEQCKRRTILTAIHCFPYVKKRIPVMYQHHTDLNPIEVAIDEMSKKVAELHQLCSSAEVDMIKLQLKLQGSVSVQVNAGPLAYARAFLDDTNTKRYPDNKVKLLKEVFRQFVEACGQALAVNERLIKEDQLEYQEEMKANYREIRKELSDIIVPRICPGEDKRATKFPAHLQRHQRDTNKHSGSRVDQFILSCVTLPHEPHVGTCFVMCKLRTTFRANHWFCQAQEEAMGNGREKEPWTVIFNSRFYRSWGKVHIFF

SEQ ID NO: 9952 - DNA, 7545 bp, Homo sapiens
  ref <308>: DATABASE ACCESSION NUMBER: EMBL / AB028981
  ref <309>: DATABASE ENTRY DATE: 2002-05-12
ctggcatgcctgtgccttgcacggccagggactcgcagctgttccagttgcagactttctgacttgcgttttcagccgagaatgcaggctgataaatgcaggacaagtagtagaagtgtcaaaaaggaactggtgattgagtcccccctgcaatacaaggatgcagctcagggcgaagtggaagcagagagcccgggccctgtgccggcaaagccaaagctaattgagccactcgactatgaaaatgtcatcgtccagaagaagactcagatcctgaacgactgtttacgggagatgctgctcttcccttacgatgactttcagacggccatcctgagacgacagggtcgatacatatgctcaacagtgcctgcgaaggcggaagaggaagcacagagcttgtttgttacagagtgcatcaaaacctataactctgactggcatcttgtgaactataaatatgaagattactcaggagagtttcgacagcttccgaacaaagtggtcaagttggataaacttccagttcatgtctatgaagttgacgaggaggtcgacaaagatgaggatgctgcctcccttggttcccagaagggtgggatcaccaagcatggctggctgtacaaaggcaacatgaacagtgccatcagcgtgaccatgaggtcatttaagagacgatttttccacctgattcaacttggcgatggatcctataatttgaatttttataaagatgaaaagatctccaaagaaccaaaaggatcaatatttctggattcctgtatgggtgtcgttcagaacaacaaagtcaggcgttttgcttttgagctcaagatgcaggacaaaagtagttatctcttggcagcagacagtgaagtggaaatggaagaatggatcacaattctaaataagatcctccagctcaactttgaagctgcaatgcaagaaaagcgaaatggcgactctcacgaagatgatgaacaaagcaaattggaaggttctggttccggtttagatagctacctgccggaacttgccaagagtgcaagagaagcagaaatcaaactgaaaagtgaaagcagagtcaaacttttttatttggacccagatgcccagaagcttgacttctcatcagctgagccagaagtgaagtcatttgaagagaagtttggaaaaaggatccttgtcaagtgcaatgatttatctttcaatttgcaatgctgtgttgccgaaaatgaagaaggacccactacaaatgttgaacctttctttgttactctatccctgtttgacataaaatacaaccggaagatttctgccgatttccacgtagacctgaaccatttctcagtgaggcaaatgctcgccaccacgtccccggcgctgatgaatggcagtgggcagagcccatctgtcctcaagggcatccttcatgaagccgccatgcagtatccgaagcagggaatattttcagtcacttgtcctcatccagatatatttcttgtggccagaattgaaaaagtccttcaggggagcatcacacattgcgctgagccatatatgaaaagttcagactcttctaaggtggcccagaaggtgctgaagaatgccaagcaggcatgccaaagactaggacagtatagaatgccatttgcttgggcagcaaggacattgtttaaggatgcatctggaaatcttgacaaaaatgccagattttctgccatctacaggcaagacagcaataagctatccaatgatgacatgctcaagttacttgcagactttcggaaacctgagaagatggctaagctcccagtgattttaggcaatctagacattacaattgataatgtttcctcagacttccctaattatgttaattcatcatacattcccacaaaacaatttgaaacctgcagtaaaactcccatcacgtttgaagtggaggaatttgtgccctgcataccaaaacacactcagccttacaccatctacaccaatcacctttacgtttatcctaagtacttgaaatacgacagtcagaagtcttttgccaaggctagaaatattgcgatttgcattgaattcaaagattcagatgaggaagactctcagccccttaagtgcatttatggcagacctggtgggccagttttcacaagaagcgcctttgctgcagttttacaccatcaccaaaacccagaattttatgatgagattaaaatagagttgcccactcagctgcatgaaaagcaccacctgttgctcacattcttccatgtcagctgtgacaactcaagtaaaggaagcacgaagaagagggatgtcgttgaaacccaagttggctactcctggcttcccctcctgaaagacggaagggtggtgacaagcgagcagcacatcccggtctcggcgaaccttccttcgggctatcttggctaccaggagcttgggatgggcaggcattatggtccggaaattaaatgggtagatggaggcaagccactgctgaaaatttccactcatctggtttctacagtgtatactcaggatcagcatttacataattttttccagtactgtcagaaaaccgaatctggagcccaagccttaggaaacgaacttgtaaagtaccttaagagtctgcatgcgatggaaggccacgtgatgatcgccttcttgcccactatcctaaaccagctgttccgagtcctcaccagagccacacaggaagaagtcgcggttaacgtgactcgggtcattattcatgtggttgcccagtgccatgaggaaggattggagagccacttgaggtcatatgttaagtacgcgtataaggctgagccatatgttgcctctgaatacaagacagtgcatgaagaactgaccaaatccatgaccacgattctcaagccttctgccgatttcctcaccagcaacaaactactgaagtactcatggtttttctttgatgtactgatcaaatctatggctcagcatttgatagagaactccaaagttaagttgctgcgaaaccagagatttcctgcatcctatcatcatgcagtggaaaccgttgtaaatatgctgatgccacacatcactcagaagtttcgagataatccagaggcatctaagaacgcgaatcatagccttgctgtcttcatcaagagatgtttcaccttcatggacaggggctttgtcttcaagcagatcaacaactacattagctgttttgctcctggagacccaaagaccctctttgaatacaagtttgaatttctccgtgtagtgtgcaaccatgaacattatattccgttgaacttaccaatgccatttggaaaaggcaggattcaaagataccaagacctccagcttgactactcattaacagatgagttctgcagaaaccacttcttggtgggactgttactgagggaggtggggacagccctccaggagttccgggaggtccgtctgatcgccatcagtgtgctcaagaacctgctgataaagcattcttttgatgacagatatgcttcaaggagccatcaggcaaggatagccaccctctacctgcctctgtttggtctgctgattgaaaacgtccagcggatcaatgtgagggatgtgtcacccttccctgtgaacgcgggcatgactgtgaaggatgaatccctggctctaccagctgtgaatccgctggtgacgccgcagaagggaagcaccctggacaacagcctgcacaaggacctgctgggcgccatctccggcattgcttctccatatacaacctcaactccaaacatcaacagtgtgagaaatgctgattcgagaggatctctcataagcacagattcgggtaacagccttccagaaaggaatagtgagaagagcaattccctggataagcaccaacaaagtagcacattgggaaattccgtggttcgctgtgataaacttgaccagtctgagattaagagcctactgatgtgtttcctctacatcttaaagagcatgtctgatgatgctttgtttacatattggaacaaggcttcaacatctgaacttatggatttttttacaatatctgaagtctgcctgcaccagttccagtacatggggaagcgatacatagccagaacaggaatgatgcatgccagattgcagcagctgggcagcctggataactctctcacttttaaccacagctatggccactcggacgcagatgttctgcaccagtcattacttgaagccaacattgctactgaggtttgcctgacagctctggacacgctttctctatttacattggcgtttaagaaccagctcctggccgaccatggacataatcctctcatgaaaaaagtttttgatgtctacctgtgttttcttcaaaaacatcagtctgaaacggctttaaaaaatgtcttcactgccttaaggtccttaatttataagtttccctcaacattctatgaagggagagcggacatgtgtgcggctctgtgttacgagattctcaagtgctgtaactccaagctgagctccatcaggacggaggcctcccagctgctctacttcctgatgaggaacaactttgattacactggaaagaagtcctttgtccggacacatttgcaagtcatcatatctgtcagccagctgatagcagacgttgttggcattgggggaaccagattccagcagtccctgtccatcatcaacaactgtgccaacagtgaccggcttattaagcacaccagcttctcctctgatgtgaaggacttaaccaaaaggatacgcacggtgctaatggccaccgcccagatgaaggagcatgagaacgacccagagatgctggtggacctccagtacagcctggccaaatcctatgccagcacgcccgagctcaggaagacgtggctcgacagcatggccaggatccatgtcaaaaatggcgatctctcagaggcagcaatgtgctatgtccacgtaacagccctagtggcagaatatctcacacggaaagaagcagtccagtgggagccgccccttctcccccacagccatagcgcctgcctgaggaggagccggggaggcgtgtttagacaaggatgcaccgccttcagggtcattaccccaaacatcgacgaggaggcctccatgatggaagacgtggggatgcaggatgtccatttcaacgaggatgtgctgatggagctccttgagcagtgcgcagatggactctggaaagccgagcgctacgagctcattgccgacatctacaaacttatcatccccatttatgagaagcggagggattttgagaggctggcccatctgtatgacacgctgcaccgggcctacagcaaagtgaccgaggtcatgcactcgggccgcaggcttctggggacctacttccgggtagccttcttcgggcaggcagcgcaataccagtttacagacagtgaaacagatgtggagggattctttgaagatgaagatggaaaggagtatatttacaaggaacccaaactcacaccgctgtcggaaatttctcagagactccttaaactgtactcggataaatttggttctgaaaatgtcaaaatgatacaggattctggcaaggtcaaccctaaggatctggattctaagtatgcctacatccaggtgactcacgtcatccccttctttgacgaaaaagagttgcaagaaaggaaaacagagtttgagagatcccacaacatccgccgcttcatgtttgagatgccatttacgcagaccgggaagaggcagggcggggtggaagagcagtgcaaacggcgcaccatcctgacagccatacactgcttcccttatgtgaagaagcgcatccctgtcatgtaccagcaccacactgacctgaaccccatcgaggtggccattgacgagatgagtaagaaggtggcggagctccggcagctgtgctcctcggccgaggtggacatgatcaaactgcagctcaaactccagggcagcgtgagtgttcaggtcaatgctggcccactagcatatgcgcgagctttcttagatgatacaaacacaaagcgatatcctgacaataaagtgaagctgcttaaggaagttttcaggcaatttgtggaagcttgcggtcaagccttagcggtaaacgaacgtctgattaaagaagaccagctcgagtatcaggaagaaatgaaagccaactacagggaaatggcgaaggagctttctgaaatcatgcatgagcagctgggatgatctgccccctggaggagaagacgagcgtcttaccgaattcccttcacatcttcaacgccatcagtgggactccaacaagcacaatggttcacgggatgaccagctcgtcttcggtcgtgtgattacatctcatggcccgtgtgtggggacttgctttgtcatttgcaaactcaggatgctttccaaagccaatcactggggagaccgagcacagggaggaccaggggaaggggagagaaaggaaataaagaacaacgttatttcttaacagactttctataggagttgtaagaaggtgcacatatttttttaaatctcactggcaatattcaaagttttcattgtgtcttaacaaaggtgtggtagacactcttgagctggacttagattttattcttccttgcagagtagtgttagaatagatggcctacagaaaaaaaaggttctgggatctacatggcagggagggctgcactgacattgatgcctgggggaccttttgcctcgaggctgagctggaaaatcttgaaaatattttttttttcctgtggcacattcaggttgaatacaagaactatttttgtgactagtttttgatgacctaagggaactgaccattgtaatttttgtaccagtgaaccaggagatttagtgcttttatattcatttccttgcatttaagaaaatatgaaagcttaaggaattatgtgagcttaaaactagtcaagcagtttagaaccaaaggcctatattaataaccgcaactatgctgaaaagtacaaagtagtacagtatattgttatgtacatatcattgttaatacagtcctggcattctgtacatatatgtattacatttctacatttttaatactcacatgggcttatgcattaagtttaattgtgataaatttgtgctgttccagtatatgcaatacactttaatgttttattcttgtacataaaaatgtgcaatatggagatgtatacagtctttactatattaggtttataaacagttttaagaatttcatccttttgccaaaatggtggagtatgtaattggtaaatcataaatcctgtggtgaatggtggtgtactttaaagctgtcaccatgttatattttcttttaagacattaatttagtaattttatatttgggaaaataaaggtttttaattttatttaactggaatcactgccctgctgtaattaaacattctgtaccacatctgtattaaaaagacattgctgacc

SEQ ID NO: 9953 - DNA, 3350 bp, Rattus norvegicus
  ref <308>: DATABASE ACCESSION NUMBER: EMBL / X68394
  ref <309>: DATABASE ENTRY DATE: 1994-05-27
cgggtggggccggaagtgccgctcccgggtgggggctgttcatggcggtttcggggtctccaacagcttctcaggttgaaatccaaaagcctcccgaggcgggtctgcggagtttgagatttttgcaggtgtgaaatgactgagtacaaactggtggtggttggagcaggtggcgttgggaaaagtgctttgacaatccagctaatccagaaccactttgtggatgaatatgatcccaccatagaggattcttaccgaaaacaagtggtgattgacggtgagacctgtctactggacatactggacacagctggacaagaggagtacagtgccatgagagaccaatacatgaggacaggcgaagggttcctctgtgtgtttgccatcaataatagcaaatcctttgcagatattaacctctacagggagcaaattaagcgggtgaaagactctgatgatgtacccatggtgctggtagggaacaagtgtgacttgccaacaaggacagttgacacaaagcaagcccacgagctggccaagagttatggaattccattcattgaaacctcagccaagacccgacagggtgtggaggatgccttttacacgcttgtaagggagatacgccagtaccggatgaagaagctcaacagcagtgaggatggcactcaaggctgtatggggctgccctgtgtggtgatgtagtaagaccctttaaaagttctgtcatcagaaacgagccactttcaagcctcactgatgccctggttctgacatccctggaggagacgtgtttctgctgctctctgcatctcagagaagctcctgcttcctgcttccccaacttagttactgagcacagccatctaacctgagacctcttcagaataactacctcctcactcggctgtccgaaccagagaaatgaacctgtttctccccagtagttctctgccctgggtttcccctagaaacaaacacacctgccagctggctttgtcctccgaaaagcagtttacattgatgcacgagaaccaaactatagacaagcaattctgttgtcaacagtttcttaagctctaaggtaacaattgctggtgatttccccctttgcccccaactgttgaacttggccttgttagttttgggggaaatgtaaaaattaatcctcttccccgagaatagaattagtgttgctgattgcctgatttgcaatgtgatcagctatattctataagctggcgtctgctctgtattcataaatgcaaacatgagtactgacgtaagtgcatccctagtcttctcagctgcatgcaattaaatccaacgttcacaacaaagtgccttgtcctaacagtgctctgtaggcttccgttatagttcgtattgaaatagatgtttcaagaaccattgtataggaaagtgactatgagccatctaccttggagggaaaggtgaatctacctgatggcagatgcttgtatatgtacacatatgtacacaaagacagtttccctgtttgcggttctcccaggagaaagagggaactgaaacgattatgactaatttcatttaattctagctaatctttttttttttttttggagggggggagtaggttaccacctataaatatttgtaatttcttctagcttactgataatctaatagtcaatgagcttccattataataaattggttcataccaggaagccctccatttatagttagtcagatactgtaaaaattggcatgttattactttatacctgtgattaatgattcttcaaaccttaaatatagttattgcaggcaggttatatctttgctgcatagtttcttcatggaaaaaaaaaaatatatatatatatggagagagtggccctcagttcccatctcaccatccctctctttcagcctagatcagttcaagcatcctataggagcttgaataattatctcagttgaacaaaccatggtgctaatggaccaggtcatggtttcaaaacttgaacaagccagttagatcacagagaaaacagttcatccatatttgcctccctgcctattactcctgcttgtagacttttgcctgatgcctgctgttcgagctataaggataaaagttagtgtggttctacaccaggactgggaatgcctggtgagctgttgggtaagcctagacacctttacattttcagacccgtatttttagccccatggaaactgaagccagagttcacacctccatctcttcccccattagataaatgttcttaatctatatagctttttaaaagtatttaaaacatgtctataagttaggctaccaactaacaaaagctgatgtgtttgttcaaataaagaggtatcctttactacttgagaaaagaatgtaaaatgccattaattgttgtcatgtagaagtttgatatttgtggtaatgccctgataattcattggtgagtttgttagtcatggtgatacttaaaatataactcatctcagtaatttcaatgaaaacataaaatgggatgccttgattgaaaaaagcaaacctaattccaaaatgaccattttctcttctgatcttacgacacctaaaaatctgagatccttgggattcatttgtttataacaggaacttgctatgtaatcttggctggcctcaaactcacaatgctcttcctgcatcagtctccaaaatgatgggattacaggcacatgccaccacacacacctgatctggtttctaatgaatttttattgttaagcaaatccccatcaccttgaaactaatcagaagagggaagaaacatatgttgtgctcctcagtgctaatgctgggatctttcaccaggggtttgcattcttaagtaaactgctgcctttttacaacataggctcagtcatcctcctgaagctgcttgagaccaacacttggtcttgttcttttttaatgtgtctgtatgactggtggtggatctctaaaaagtttattaaactccagttagggagaaagttactccccttggcccttttgaccatatccatgtgtgtgtgtgtgtgtgtgtgtgtgtgtgtgtgtgtgtgtgtacacacatatgtatgtatgtgtgtctgtagttggtctccagttcagatgcccttactagcatatattcccacagggtgtgggtttcggcacaacagtgacaaacttgaaagccaagtaaatccagttggtgtttttagagagcataattagtgaagatctggtttacctcaaagtcacaaagcctctcttcctgaattgaagtgcctggcccactgtcacaaattaacatgtggaaggcagctggttgaagctt

SEQ ID NO: 9954 - protein, 189 aa, Rattus norvegicus
  ref <308>: DATABASE ACCESSION NUMBER: SWISS-Prot / CAA48460
  ref <309>: DATABASE ENTRY DATE: 2001-10-16
MTEYKLVVVGAGGVGKSALTIQLIQNHFVDEYDPTIEDSYRKQVVIDGETCLLDILDTAGQEEYSAMRDQYMRTGEGFLCVFAINNSKSFADINLYREQIKRVKDSDDVPMVLVGNKCDLPTRTVDTKQAHELAKSYGIPFIETSAKTRQGVEDAFYTLVREIRQYRMKKLNSSEDGTQGCMGLPCVVM

SEQ ID NO: 9955 - DNA, 1963 bp, Homo sapiens
  ref <308>: DATABASE ACCESSION NUMBER: Refseq / NM_002524
  ref <309>: DATABASE ENTRY DATE: 2002-11-05
gaaacgtcccgtgtgggaggggcgggtctgggtgcggctgccgcatgactcgtggttcggaggcccacgtggccggggcggggactcaggcgcctggcagccgactgattacgtagcgggcggggccggaagtgccgctccttggtgggggctgttcatggcggttccggggtctccaacatttttcccggtctgtggtcctaaatctgtccaaagcagaggcagtggagcttgaggttcttgctggtgtgaaatgactgagtacaaactggtggtggttggagcaggtggtgttgggaaaagcgcactgacaatccagctaatccagaaccactttgtagatgaatatgatcccaccatagaggattcttacagaaaacaagtggttatagatggtgaaacctgtttgttggacatactggatacagctggacaagaagagtacagtgccatgagagaccaatacatgaggacaggcgaaggcttcctctgtgtatttgccatcaataatagcaagtcatttgcggatattaacctctacagggagcagattaagcgagtaaaagactcggatgatgtacctatggtgctagtgggaaacaagtgtgatttgccaacaaggacagttgatacaaaacaagcccacgaactggccaagagttacgggattccattcattgaaacctcagccaagaccagacagggtgttgaagatgctttttacacactggtaagagaaatacgccagtaccgaatgaaaaaactcaacagcagtgatgatgggactcagggttgtatgggattgccatgtgtggtgatgtaacaagatacttttaaagttttgtcagaaaagagccactttcaagctgcactgacaccctggtcctgacttcctggaggagaagtattcctgttgctgtcttcagtctcacagagaagctcctgctacttccccagctctcagtagtttagtacaataatctctatttgagaagttctcagaataactacctcctcacttggctgtctgaccagagaatgcacctcttgttactccctgttatttttctgccctgggttcttccacagcacaaacacacctcaacacacctctgccaccccaggtttttcatctgaaaagcagttcatgtctgaaacagagaaccaaaccgcaaacgtgaaattctattgaaaacagtgtcttgagctctaaagtagcaactgctggtgattttttttttctttttactgttgaacttagaactatgcctaatttttggagaaatgtcataaattactgttttgccaagaatatagttattattgctgtttggtttgtttataatgttatcggctctattctctaaactggcatctgctctagattcataaatacaaaaatgaatactgaattttgagtctatcctagtcttcacaactttgacgtaattaaatccaacttttcacagtgaagtgcctttttcctagaagtggtttgtagactcctttataatatttcagtggaatagatgtctcaaaaatccttatgcatgaaatgaatgtctgagatacgtctgtgacttatctaccattgaaggaaagctatatctatttgagagcagatgccattttgtacatgtatgaaattggttttccagaggcctgttttggggctttcccaggagaaagatgaaactgaaagcatatgaataatttcacttaataatttttacctaatctccacttttttcataggttactacctatacaatgtatgtaatttgtttcccctagcttactgataaacctaatattcaatgaacttccatttgtattcaaatttgtgtcataccagaaagctctacatttgcagatgttcaaatattgtaaaactttggtgcattgttatttaatagctgtgatcagtgattttcaaacctcaaatatagtatattaacaaatt

SEQ ID NO: 9956 - protein, 189 aa, Homo sapiens
  ref <308>: DATABASE ACCESSION NUMBER: SWISS-Prot / P01111
  ref <309>: DATABASE ENTRY DATE: 2002-06-15
MTEYKLVVVGAGGVGKSALTIQLIQNHFVDEYDPTIEDSYRKQVVIDGETCLLDILDTAGQEEYSAMRDQYMRTGEGFLCVFAINNSKSFADINLYREQIKRVKDSDDVPMVLVGNKCDLPTRTVDTKQAHELAKSYGIPFIETSAKTRQGVEDAFYTLVREIRQYRMKKLNSSDDGTQGCMGLPCVVM

SEQ ID NO: 9957 - DNA, 864 bp, Rattus norvegicus
  ref <308>: DATABASE ACCESSION NUMBER: EMBL / X68782
  ref <309>: DATABASE ENTRY DATE: 2001-08-01
ctgcaggagtcaggcactgagcttgtgagacctgggtcctcagtcaagatttcttgcaaggcttctggctacacctttacagattactatatgcactgggtgaagcagaggcctgaacagggactggtatggataggacggattaatcctgcaaatggtaatactgaatatgcagagaagttcaaaagcagggccacactgactgcagataaatcgtccaacacagcctacatgcaactcagcagcctgacatctgaagacaccgcaacctatttttgtaccatttggggtacagtggtcccttttgattactggggccaaggagtcatggtcacagtctcctcagagagtcagtcctccccaactgtcttgcccctcgtctcctgcgagagccccctgtctgatgagaatttggtggccatgggctgcctggcccgggacttcctgcccagctccatttccttctcctggaactaccagaacaacactgaagtcatgcagggtgtcagaaccttcccaacactgaggacaggggacaaatacacagctacctcgcaggtgttactgtccgccaaaaatgtccttgaaggttcagatgaatacttggtatgcaaaatccaccatggcaacaaaaacaaagatctgcatgtgccgattccagctgtcgttgagatgaaccccaatgtgagtgtgttcattccaccacgtgatgccttctctggccctgcaccccgcaagtccagactcatctgcgaggccaccaacttcagtcccaaacagatcacagtatcctggctacaggatgggaagcctgtgaaatctggcttcaccacagagccagtgactgtcgaggccaaaggatcc

SEQ ID NO: 9958 - DNA, 2129 bp, Homo sapiens
  ref <308>: DATABASE ACCESSION NUMBER: EMBL / BC009851
  ref <309>: DATABASE ENTRY DATE: 2001-07-13
ggcacgaggatggactggacctggagaatcctcttcttggtggcagcagccacagatgcctactcccagatgcagctggtgcagtctggggctgaggtgaagaagactgggtcctcagtgaaggtttcctgcaaggcttccggatacaccttcacctaccgctacctgcactgggtgcgacaggcccccggacaagcgcttgagtggatgggatggatcacacctttcaatggtaacaccaactacgcacagaaattccaggacagagtcaccattaccagggacaggtctatgaacacagcctacatggagctgagcagcctgagatctgaggacacagccatgtattactgtgcaagagggtatagcagcagctgggatgatgcttttgatatctggggccaggggacaatggtcaccgtctcttcagggagtgcatccgccccaacccttttccccctcgtctcctgtgagaattccccgtcggatacgagcagcgtggccgttggctgcctcgcacaggacttccttcccgactccatcactttctcctggaaatacaagaacaactctgacatcagcagcacccggggcttcccatcagtcctgagagggggcaagtacgcagccacctcacaggtgctgctgccttccaaggacgtcatgcagggcacagacgaacacgtggtgtgcaaagtccagcaccccaacggcaacaaagaaaagaacgtgcctcttccagtgattgctgagctgcctcccaaagtgagcgtcttcgtcccaccccgcgacggcttcttcggcaacccccgcaagtccaagctcatctgccaggccacgggtttcagtccccggcagattcaggtgtcctggctgcgcgaggggaagcaggtggggtctggcgtcaccacggaccaggtgcaggctgaggccaaagagtctgggcccacgacctacaaggtgaccagcacactgaccatcaaagagagcgactggctcagccagagcatgttcacctgccgcgtggatcacaggggcctgaccttccagcagaatgcgtcctccatgtgtgtccccgatcaagacacagccatccgggtcttcgccatccccccatcctttgccagcatcttcctcaccaagtccaccaagttgacctgcctggtcacagacctgaccacctatgacagcgtgaccatctcctggacccgccagaatggcgaagctgtgaaaacccacaccaacatctccgagagccaccccaatgccactttcagcgccgtgggtgaggccagcatctgcgaggatgactggaattccggggagaggttcacgtgcaccgtgacccacacagacctgccctcgccactgaagcagaccatctcccggcccaagggggtggccctgcacaggcccgatgtctacttgctgccaccagcccgggagcagctgaacctgcgggagtcggccaccatcacgtgcctggtgacgggcttctctcccgcggacgtcttcgtgcagtggatgcagagggggcagcccttgtccccggagaagtatgtgaccagcgccccaatgcctgagccccaggccccaggccggtacttcgcccacagcatcctgaccgtgtccgaagaggaatggaacacgggggagacctacacctgcgtggtggcccatgaggccctgcccaacagggtcaccgagaggaccgtggacaagtccaccgagggggaggtgagcgccgacgaggagggctttgagaacctgtgggccaccgcctccaccttcatcgtcctcttcctcctgagcctcttctacagtaccaccgtcaccttgttcaaggtgaaatgatcccaacagaagaacatcggagaccagagagaggaactcaaaggggcgctgcctccgggtctggggtcctggcctgcgtggcctgttggcacgtgtttctcttccccgcccggcctccagttgtgtgctctcacacaggcttccttctcgaccggcaggggctggctggcttgcaggccacgaggtgggctctaccccacactgctttgctgtgtatacgcttgttgccctgaaataaatatgcacattttatccatgaaaaaaaaaaaaaaaaa

SEQ ID NO: 9959 - protein, 454 aa, Homo sapiens
  ref <308>: DATABASE ACCESSION NUMBER: SWISS-Prot / P01871
  ref <309>: DATABASE ENTRY DATE: 2002-06-15
GSASAPTLFPLVSCENSPSDTSSVAVGCLAQDFLPDSITFSWKYKNNSDISSTRGFPSVLRGGKYAATSQVLLPSKDVMQGTDEHVVCKVQHPNGNKEKNVPLPVIAELPPKVSVFVPPRDGFFGNPRSKSKLICQATGFSPRQIQVSWLREGKQVGSGVTTDQVQAEAKESGPTTYKVTSTLTIKESDWLSQSMFTCRVDHRGLTFQQNASSMCVPDQDTAIRVFAIPPSFASIFLTKSTKLTCLVTDLTTYDSVTISWTRQNGEAVKTHTNISESHPNATFSAVGEASICEDDWNSGERFTCTVTHTDLPSPLKQTISRPKGVALHRPDVYLLPPAREQLNLRESATITCLVTGFSPADVFVQWMQRGQPLSPEKYVTSAPMPEPQAPGRYFAHSILTVSEEEWNTGETYTCVVAHEALPNRVTERTVDKSTGKPTLYNVSLVMSDTAGTCY

SEQ ID NO: 9960 - DNA, 2450 bp, Rattus norvegicus
  ref <308>: DATABASE ACCESSION NUMBER: EMBL / X69903
  ref <309>: DATABASE ENTRY DATE: 1996-02-20
gtcgacccaatggggcggctttgcaccaagttcctgtcctccgtgagctgtctgattttgctatgggtgactggctctgggggcatcaaggtcctgggtgaccccacctgcttctctgactacatccgcacttctacgtgtgagtggcagctggatagcactgtggactgcagttctcagctcctcctggactacaggctgctcttcgagttctctgaaaacctcacatgcacccccaagaacagtgccgacaccgtgtgtgtgtgccaaatggccatagaggagccgatccaggcagacacatactggctggaactgtggtctgagcggggacagctgtggcaaggctccttcaagcctagtgacaatgtgaagcccccagctccagacaacctcacactccacaccaatgtctccaatggcctgctgctgatgtggagcaacccatacccatcgaacaacttcctgcacaaaggcctcatctgcatggtcaacatctccagagaggacaacccggcggaattcaaagtctataatgtgacctacacggaacccaagctgagcttcccagtcaacaccctaacatcaggggtgcgctatagggcacgtgtgagggtcttgtcccagagcttccctggcatctggagtgagtggagtcccagcatcacgtggtacaaccacttccagctgcccctgctgcagcgcctcccgctgggtgtcagcatctcctgcatctgcatcctattgttttgcctgacctgttacttcagcattatcaagattaagaagatatggtgggaccagattcccactccagcacgcagtcccttagcagccatcatcattcaggacacgaaggtgctcctctgggagaagcagacccgaagccaggagtcaaccaagagccggcactggaagacttgtctaaccaagctgctgccctgcttgctggagcatagagtgaagaaagagagagaatccccgaaggctgccaaaaccaagcctctccagagtcctgaaaaagcaggctggtatcctgcggaggtcagcaggaccgtcctctggccagagaacgttcatgtcagtgtggtgcgctgtatggagctgtttgaggccccagtacagaatgtggaggaggaagaggatgagatggtcaaaggggacctgagcatgtcacctgagaacagcggagggggcttccaggagagtcaggcagacatcatggcccggctcactgagaacctgttttcagacttgctgggggctgagaatggaggcgttggccagtcgagcatggcagagtcatcctcccttctgccttcagaaagtgggcaagcttctacgtcctgggcctgcttccccacggggcccagtgagaccacatgccaggtcacagggcagcagcctccacacccagaccctgagagagcaactggcacagcctgcacacaggtcccccttgtcatttcagacaatcctgcctaccggagttttagtgacttctccagccccgccccaaatcctggagagctggcttcagaacagaagcaggctggacatctggaagaaggggatcttctgagcccggttgacccccattcttcagggccaccaatgcagcaagcggagagctgggagcagatccttcacatgagtgtcctgcagcacgggacagctggctccaccccagcccctaccagtggctaccaagagtttgtgcaggcagtgaagcagggtgcgtcccaggccaggtgggtgcctggtgtcgggccttctggagacactggttacaaggctttctcgagcctgctcagcagcagtggcgtctgcacggacacagcagcagcagggactgacagtggatgtggagggtacaagcccttccagaaccctgttcctaaccagtcccccaactccatgcccttattcaccttcggactggacatggagctgccacccagtcccctgaactcagccccacccaatagcaccccagaatgccttggtctagagctggggctcaaaggaggcacctggctgaaggcccctcctccttcagagcaggtgcccaagccctttggggatgacctgggccttggcattgtgtactcgtccctcacctgccatctgtgtggccacctgaagcaacaccacagccaggaggaagatggtcagatccatgtcgttgcatgccctggctgcggctgttgctatgatgaaaaatcaccatccttggggaatctctcggggaccttggagagctgtcctggggaaatgtcacaggaagccaacctcaccttagcacccaggacaccctccaatttgtcaggggtgcaaggccctggccactctcctgttcccagccagactactgaggtacctgtgggcactctgggcgtcactgtgtcttaggtgagtgtgctgttgttgctgaggtctgtgctgtcgac

SEQ ID NO: 9961 - protein, 800 aa, Rattus norvegicus
  ref <308>: DATABASE ACCESSION NUMBER: SWISS-Prot / CAA49528
  ref <309>: DATABASE ENTRY DATE: 2003-02-01
MGRLCTKFLSSVSCLILLWVTGSGGIKVLGDPTCFSDYIRTSTCEWQLDSTVDCSSQLLLDYRLLFEFSENLTCTPKNSADTVCVCQMAIEEPIQADTYWLELWSERGQLWQGSFKPSDNVKPPAPDNLTLHTNVSNGLLLMWSNPYPSNNFLHKGLICMVNISREDNPAEFKVYNVTYTEPKLSFPVNTLTSGVRYRARVRVLSQSFPGIWSEWSPSITWYNHFQLPLLQRLPLGVSISCICILLFCLTCYFSIIKIKKIWWDQIPTPARSPLAAIIIQDTKVLLWEKQTRSQESTKSRHWKTCLTKLLPCLLEHRVKKERESPKAAKTKPLQSPEKAGWYPAEVSRTVLWPENVHVSVVRCMELFEAPVQNVEEEEDEMVKGDLSMSPENSGGGFQESQADIMARLTENLFSDLLGAENGGVGQSSMAESSSLLPSESGQASTSWACFPTGPSETTCQVTGQQPPHPDPERATGTACTQVPLVISDNPAYRSFSDFSSPAPNPGELASEQKQAGHLEEGDLLSPVDPHSSGPPMQQAESWEQILHMSVLQHGTAGSTPAPTSGYQEFVQAVKQGASQARWVPGVGPSGDTGYKAFSSLLSSSGVCTDTAAAGTDSGCGGYKPFQNPVPNQSPNSMPLFTFGLDMELPPSPLNSAPPNSTPECLGLELGLKGGTWLKAPPPSEQVPKPFGDDLGLGIVYSSLTCHLCGHLKQHHSQEEDGQIHVVACPGCGCCYDEKSPSLGNLSGTLESCPGEMSQEANLTLAPRTPSNLSGVQGPGHSPVPSQTTEVPVGTLGVTVS

SEQ ID NO: 9962 - DNA, 3597 bp, Homo sapiens
  ref <308>: DATABASE ACCESSION NUMBER: Refseq / NM_000418
  ref <309>: DATABASE ENTRY DATE: 2000-10-31
ggcgaatggagcaggggcgcgcagataattaaagatttacacacagctggaagaaatcatagagaagccgggcgtggtggctcatgcctataatcccagcacttttggaggctgaggcgggcagatcacttgagatcaggagttcgagaccagcctggtgccttggcatctcccaatggggtggctttgctctgggctcctgttccctgtgagctgcctggtcctgctgcaggtggcaagctctgggaacatgaaggtcttgcaggagcccacctgcgtctccgactacatgagcatctctacttgcgagtggaagatgaatggtcccaccaattgcagcaccgagctccgcctgttgtaccagctggtttttctgctctccgaagcccacacgtgtatccctgagaacaacggaggcgcggggtgcgtgtgccacctgctcatggatgacgtggtcagtgcggataactatacactggacctgtgggctgggcagcagctgctgtggaagggctccttcaagcccagcgagcatgtgaaacccagggccccaggaaacctgacagttcacaccaatgtctccgacactctgctgctgacctggagcaacccgtatccccctgacaattacctgtataatcatctcacctatgcagtcaacatttggagtgaaaacgacccggcagatttcagaatctataacgtgacctacctagaaccctccctccgcatcgcagccagcaccctgaagtctgggatttcctacagggcacgggtgagggcctgggctcagtgctataacaccacctggagtgagtggagccccagcaccaagtggcacaactcctacagggagcccttcgagcagcacctcctgctgggcgtcagcgtttcctgcattgtcatcctggccgtctgcctgttgtgctatgtcagcatcaccaagattaagaaagaatggtgggatcagattcccaacccagcccgcagccgcctcgtggctataataatccaggatgctcaggggtcacagtgggagaagcggtcccgaggccaggaaccagccaagtgcccacactggaagaattgtcttaccaagctcttgccctgttttctggagcacaacatgaaaagggatgaagatcctcacaaggctgccaaagagatgcctttccagggctctggaaaatcagcatggtgcccagtggagatcagcaagacagtcctctggccagagagcatcagcgtggtgcgatgtgtggagttgtttgaggccccggtggagtgtgaggaggaggaggaggtagaggaagaaaaagggagcttctgtgcatcgcctgagagcagcagggatgacttccaggagggaagggagggcattgtggcccggctaacagagagcctgttcctggacctgctcggagaggagaatgggggcttttgccagcaggacatgggggagtcatgccttcttccaccttcgggaagtacgagtgctcacatgccctgggatgagttcccaagtgcagggcccaaggaggcacctccctggggcaaggagcagcctctccacctggagccaagtcctcctgccagcccgacccagagtccagacaacctgacttgcacagagacgcccctcgtcatcgcaggcaaccctgcttaccgcagcttcagcaactccctgagccagtcaccgtgtcccagagagctgggtccagacccactgctggccagacacctggaggaagtagaacccgagatgccctgtgtcccccagctctctgagccaaccactgtgccccaacctgagccagaaacctgggagcagatcctccgccgaaatgtcctccagcatggggcagctgcagcccccgtctcggcccccaccagtggctatcaggagtttgtacatgcggtggagcagggtggcacccaggccagtgcggtggtgggcttgggtcccccaggagaggctggttacaaggccttctcaagcctgcttgccagcagtgctgtgtccccagagaaatgtgggtttggggctagcagtggggaagaggggtataagcctttccaagacctcattcctggctgccctggggaccctgccccagtccctgtccccttgttcacctttggactggacagggagccacctcgcagtccgcagagctcacatctcccaagcagctccccagagcacctgggtctggagccgggggaaaaggtagaggacatgccaaagcccccacttccccaggagcaggccacagacccccttgtggacagcctgggcagtggcattgtctactcagcccttacctgccacctgtgcggccacctgaaacagtgtcatggccaggaggatggtggccagacccctgtcatggccagtccttgctgtggctgctgctgtggagacaggtcctcgccccctacaacccccctgagggccccagacccctctccaggtggggttccactggaggccagtctgtgtccggcctccctggcaccctcgggcatctcagagaagagtaaatcctcatcatccttccatcctgcccctggcaatgctcagagctcaagccagacccccaaaatcgtgaactttgtctccgtgggacccacatacatgagggtctcttaggtgcatgtcctcttgttgctgagtctgcagatgaggactagggcttatccatgcctgggaaatgccacctcctggaaggcagccaggctggcagatttccaaaagacttgaagaaccatggtatgaaggtgattggccccactgacgttggcctaacactgggctgcagagactggaccccgcccagcattgggctgggctcgccacatcccatgagagtagagggcactgggtcgccgtgccccacggcaggcccctgcaggaaaactgaggcccttgggcacctcgacttgtgaacgagttgttggctgctccctccacagcttctgcagcagactgtccctgttgtaactgcccaaggcatgttttgcccaccagatcatggcccacgtggaggcccacctgcctctgtctcactgaactagaagccgagcctagaaactaacacagccatcaagggaatgacttgggcggccttgggaaatcgatgagaaattgaacttcagggagggtggtcattgcctagaggtgctcattcatttaacagagcttccttaggttgatgctggaggcagaatcccggctgtcaaggggtgttcagttaaggggagcaacagaggacatgaaaaattgctatgactaaagcagggacaatttgctgccaaacacccatgcccagctgtatggctgggggctcctcgtatgcatggaacccccagaataaatatgctcagccaccctgtgggccgggcaatccagacagcaggcataaggcaccagttaccctgcatgttggcccagacctcaggtgctagggaaggcgggaaccttgggttgagtaatgctcgtctgtgtgttttagtttcatcacctgttatctgtgtttgctgaggagagtggaacagaaggggtggagttttgtataaataaagtttctttgtctc

SEQ ID NO: 9963 - protein, 825 aa, Homo sapiens
  ref <308>: DATABASE ACCESSION NUMBER: SWISS-Prot / P24394
  ref <309>: DATABASE ENTRY DATE: 2002-06-15
MGWLCSGLLFPVSCLVLLQVASSGNMKVLQEPTCVSDYMSISTCEWKMNGPTNCSTELRLLYQLVFLLSEAHTCIPENNGGAGCVCHLLMDDVVSADNYTLDLWAGQQLLWKGSFKPSEHVKPRAPGNLTVHTNVSDTLLLTWSNPYPPDNYLYNHLTYAVNIWSENDPADFRIYNVTYLEPSLRIAASTLKSGISYRARVRAWAQCYNTTWSEWSPSTKWHNSYREPFEQHLLLGVSVSCIVILAVCLLCYVSITKIKKEWWDQIPNPARSRLVAIIIQDAQGSQWEKRSRGQEPAKCPHWKNCLTKLLPCFLEHNMKRDEDPHKAAKEMPFQGSGKSAWCPVEISKTVLWPESISVVRCVELFEAPVECEEEEEVEEEKGSFCASPESSRDDFQEGREGIVARLTESLFLDLLGEENGGFCQQDMGESCLLPPSGSTSAHMPWDEFPSAGPKEAPPWGKEQPLHLEPSPPASPTQSPDNLTCTETPLVIAGNPAYRSFSNSLSQSPCPRELGPDPLLARHLEEVEPEMPCVPQLSEPTTVPQPEPETWEQILRRNVLQHGAAAAPVSAPTSGYQEFVHAVEQGGTQASAVVGLGPPGEAGYKAFSSLLASSAVSPEKCGFGASSGEEGYKPFQDLIPGCPGDPAPVPVPLFTFGLDREPPRSPQSSHLPSSSPEHLGLEPGEKVEDMPKPPLPQEQATDPLVDSLGSGIVYSALTCHLCGHLKQCHGQEDGGQTPVMASPCCGCCCGDRSSPPTTPLRAPDPSPGGVPLEASLCPASLAPSGISEKSKSSSSFHPAPGNAQSSSQTPKIVNFVSVGPTYMRVS

SEQ ID NO: 9964 - DNA, 645 bp, Rattus norvegicus
  ref <308>: DATABASE ACCESSION NUMBER: EMBL / X70062
  ref <309>: DATABASE ENTRY DATE: 1993-06-04
cgaaatgacagagctgtcagctaaccatggtggcagtgcaggggacggagaatcccttcgagtatgactatgaaaccgtccgcaaaggaggcctgatcttcgcgggccttgccttcgtcgtgggactcctcattctcctcagcaaaagattccgctgtgggggcagtaagaagcataggcaggtcaatgaagatgagctgtgacggaagagccggcagtgccaccggtgcatgggcacagtgatgccacttccccagccaggcaccacggaccccaccatggtcagcactggctgaaggaagtgccaggcttactggacccctcatggtcatccctcatgcctctagatcgttaacttcctctctcccctccccaacctctcttacacccaactccctattccaagttggggtacatgtgcaatctcattgccctggttttcaatgaatcgctctacaagaatctgccaacaaaagcaggctcagtgtggtcatctacgggagtgtatccttcgcccctgaacagttactctggggacagttaccctgcctgacttctgggcgccctgccaaagtctgaagctgttaagatgaaggtgacttggtggactgggtcctgctgctgctgctgctgctgctgctgctg

SEQ ID NO: 9965 - protein, 66 aa, Rattus norvegicus
  ref <308>: DATABASE ACCESSION NUMBER: SWISS-Prot / Q04679
  ref <309>: DATABASE ENTRY DATE: 2002-06-15
MTELSANHGGSAKGTENPFEYDYETVRKGGLIFAGLAFVVGLLILLSKRFRCGGSKKHRQVNEDEL

SEQ ID NO: 9966 - DNA, 1155 bp, Homo sapiens
  ref <308>: DATABASE ACCESSION NUMBER: EMBL / X86400
  ref <309>: DATABASE ENTRY DATE: 1995-06-02
gcaaaagaattccgggcccggctgtatttgtacttgagcttggagaggctggtggtgacagaggagggagacaggcaggcaggtgagggaagcagcggtctctgacgccggctttattataagcatgaggtggcacgaggcaggagttggcgatgccacctgggggtcacattgagtctggagcttccttcagcccaagcgctggcagtgacggggacaaaggtctaaagcccagggaagaaggggaggcgccagaggcagggccatgcttggcttcccagctggccccagtgcagtgggtggcaccgccgaggctgctgttacggctcatcttcattgatttgcctgcgcttcttattgcccccacagcggaatcttctgctgaggaggatgaggagccccacgatgaaggccagtccagcgaagatcaggcccccattgcgaacggtctcatagtcatagtagaacgggtccacgtcccccttggggctgccgccaccgtccatcgacaacccagtcatttccccaggtgaatgggctgcctccactcccctcttcctgcaagaagttctcaagcctttttgatttttgtgcaataaagtacagctttgcataagagtgaaattgggctagcttaaatggatccataaactttcttctaattttaagtgagaatcttttaaacacctgttaaatttaatgtagcagtctgagaatctaaaattatgtaccactcgtttatttgttcattcatccatcccttttcccatgaatatttcatttgtttatccagctagttttattaactgttttaatccaggcattgggatataatgataagcaagatatcattcctgtggaaacttcttccaggcactaaagatatagaggatgaattagaggaacataaaattggaggagattgaatacttaaaggcagtggccatagggatggcaaagaggaagtagagatagagtcattaggacttagtgccaattaaatacggggtgagtgagagaagatggctttgggatgtcctcaagttcctagcttatttattcattatgcttttattggaggactatcatgttttaggcattgttatgtttcaggcattgccggaattcagcttggacttaaccaggctgaactgg

SEQ ID NO: 9967 - protein, 126 aa, Homo sapiens
  ref <308>: DATABASE ACCESSION NUMBER: SWISS-Prot / Q15332
  ref <309>: DATABASE ENTRY DATE: 2000-05-30
MPPGGHIESGASFSPSAGSDGDKGLKPREEGEAPEAGPCLASQLAPVQWVAPPRLLLRLIFIDLPALLIAPTAESSAEEDEEPHDEGQSSEDQAPIANGLIVIVERVHVPLGAAATVHRQPSHFPR

SEQ ID NO: 9968 - DNA, 1706 bp, Rattus norvegicus
  ref <308>: DATABASE ACCESSION NUMBER: EMBL / X70662
  ref <309>: DATABASE ENTRY DATE: 1994-10-25
caccagcctcctgaccacatggatctggctgcttaatcagccgagatcacaacctgggaagattggggacgctgatatgcgctccagctgctgagacaacttccagcttggctgtttacttctttgggtcccagggactctgtcctacacctcagcctctcctgccactgtgtgtgggttctgaagtcagctgctgggactcctccgaaggcatccaggaaggggggcaagaggggttaaaagacagccgaaatcccctccaactgctcaccctctgccgaccgcctgtgctgtggggttctgagaggaccttgcgctgtccggggaagcaatgcaagtctccatagcctgcacagagcacaatttgaagagtcgaaatggtgaggaccgacttctgagcaagcagagctccaccgcccccaatgtggtgaacgcagcccgggccaaattccgcactgtcgctatcatcgctcgcagcctggggaccttcacccctcagcatcacatttctctcaaagagtccactgcaaagcagactggcatgaaatataggaatcttgggaaatcaggactcagagtttcgtgcttgggtcttggaacatgggtgacattcggaggtcaaatttcagatgaggttgctgaacggctgatgacaattgcctatgagagtggagttaatctcttcgacactgcagaagtctatgctgctgggaaggctgaggtgattctggggagcatcatcaagaagaaaggctggaggaggtcaagcttggtcatcacaaccaaactctactggggtggaaaagccgaaacagaaagaggattgtcaagaaagcacatcattgaaggactgaaaggctccctccagaggctgcaactggaatatgtggacgtggtctttgcaaatcgcccagacagcaacacccccatggaagaaatcgttcgagccatgacgcacgtgatcaaccaaggcatggcaatgtactggggcacctcgaggtggagcgcgatggagatcatggaagcctactctgtcgcgcggcagttcaacatgatcccgcctgtctgtgagcaagctgagtatcatcttttccagagagaaaaggtggaggtccagctgccagagctctaccataaaataggggttggtgcaatgacatggtctccacttgcttgtggaattatttcaggaaaatatggaaatggggtgccagaaagttctagagcttcactgaagtgctaccagtggttgaaggaaaggattgtaagtgaagaagggagaaaacagcaaaacaagctgaaagacctctctccaattgctgaacgcctgggatgcacactacctcagctggctgtggcatggtgcctgagaaacgagggtgtgagctctgtgctgctgggatcatccactcctgaacaactcattgaaaaccttggtgccattcaggtcctccctaagatgacatcacatgtggtaaatgagattgataacatattgcgcaacaagccctacagcaaaaaggactatagatcctaaggcaatgcatgagccacttaagctgcatgagtaaatcctggtgggtaggcggtgcagaacggccttaccagccactcttttcaatcacttagcagcttgctgctcaacctctagtgtcccaggattctctgaggtctctgctgttgctaccactgtgcaccctgaattc

SEQ ID NO: 9969 - protein, 401 aa, Rattus norvegicus
  ref <308>: DATABASE ACCESSION NUMBER: SWISS-Prot / Q63277
  ref <309>: DATABASE ENTRY DATE: 2001-10-16
MQVSIACTEHNLKSRNGEDRLLSKQSSTAPNVVNAARAKFRTVAIIARSLGTFTPQHHISLKESTAKQTGMKYRNLGKSGLRVSCLGLGTWVTFGGQISDEVAERLMTIAYESGVNLFDTAEVYAAGKAEVILGSIIKKKGWRRSSLVITTKLYWGGKAETERGLSRKHIIEGLKGSLQRLQLEYVDVVFANRPDSNTPMEEIVRAMTHVINQGMAMYWGTSRWSAMEIMEAYSVARQFNMIPPVCEQAEYHLFQREKVEVQLPELYHKIGVGAMTWSPLACGIISGKYGNGVPESSRASLKCYQWLKERIVSEEGRKQQNKLKDLSPIAERLGCTLPQLAVAWCLRNEGVSSVLLGSSTPEQLIENLGAIQVLPKMTSHVVNEIDNILRNKPYSKKDYRS

SEQ ID NO: 9970 - DNA, 2620 bp, Homo sapiens
  ref <308>: DATABASE ACCESSION NUMBER: EMBL / U33428
  ref <309>: DATABASE ENTRY DATE: 1999-06-30
agggaccgtgcgctgcctggggaagcaatgcaagtctccatagcctgcacagagcacaatttgaagagtcggaatggtgaggaccgacttctgagcaagcagagctccaccgcccccaatgtggtgaacgcagcccgggccaaattccgcacggtcgctatcatcgcgcgcagcctggggacgttcacgcctcagcatcacatttctctcaaagagtccaccgcaaagcagactggcatgaaatataggaatcttggaaaatcaggactcagagtttcttgcttgggtcttggaacatgggtgacatttggaggtcaaatttcagatgaggttgctgaacggctgatgaccatcgcctatgaaagtggtgttaacctctttgatactgccgaagtctatgctgctggaaaggctgaagtgattctggggagcatcatcaagaagaaaggctggaggaggtccagtctggtcataacaaccaaactctactggggtggaaaagctgaaacagaaagagggctgtcaagaaagcatattattgaaggattgaagggctccctccagaggctgcagctcgagtatgtggatgtggtctttgcaaatcgaccggacagtaacactcccatggaagaaattgtccgagccatgacacatgtgataaaccaaggcatggcgatgtactggggcacctcgagatggagtgctatggagatcatggaagcctattctgtagcaagacagttcaatatgatcccaccggtctgtgaacaagctgagtaccatcttttccagagagagaaagtggaggtccagctgccagagctctaccacaaaataggtgttggcgcaatgacatggtctccacttgcctgtggaatcatctcaggaaaatacggaaacggggtgcctgaaagttccagggcttcactgaagtgctaccagtggttgaaagaaagaattgtaagtgaagaagggagaaaacagcaaaacaagctaaaagacctttccccaattgcggagcgtctgggatgcacactacctcagctagctgttgcgtggtgcctgagaaatgaaggtgtgagttctgtgctcctgggatcatccactcctgaacaactcattgaaaaccttggtgccattcaggttctcccaaagatgacatcacatgtggtaaatgagattgataacatactgcgcaacaagccctacagcaagaaggactatagatcataaggcaatgcatgaaccacagaagctgcatggttaaaatagcggcctgtgcccagtacagaaaggtgttactaaccagtcttttgaatcacttagcagcttgctcgtcaacctctagtgtccctccctggattctttgaggtgtctgctgtcgctaccactgtgcacatctgaaaactcacaaccaagaaaatccattctattttcttatcttggactggagtcacctattcttgcattgctgtatacacctcatgcttatgcaatgggaagaatatgggggccagggggtgtggtactaccttcaggcatttggtaactcaaagaaggctgtacagatatattttttcaaaaagaacaaaatccacagatgcaatgtgagttgcgtaagaaacagagtagatagactaaattcagtgaaggaaaggaattgagagatttttcttagtaaatagattattgttaagtaaatagttattaaaaatatatctcactgcaaaaaaaaaaaaagcagtatcttcactcaaaagtcttgcttggaagaataagcagaaagaattttatatattttttttctattttcacattcatactaacaagttttgttccatttgttattcaataaaacaaaaatttctaggtatttgctttattacctttcaaatatttactgttgcttggccccaagaatggccttgtacaacttatccagaatgtctattaggattctaatgttatgtccacttacaagtagagacagtaaaaggatgaatacccaatctttagtgacaatgcagctgatttatgaaagagagggctacactgctatggaaacttagcttcaaagaaaatgcaatgtatctgcaattaggtgttcattttttactacattttattaaaacctgctttatactttcaactgcttgtaggcacaacttctgcaagtttaaatatttgagctttacaaataaacatacacatgctgttttttaagtaaacctgtaaaatacccaggaaggcaaatgttcattgtttaattagcactgggattttataatataatgtttggtatttttgaggcattgttaacatgaaagtcaaccactggctttgtgaaaaatgctatgtcactattcagaatatgctgggtaaattaacttgcctagtgaaaagcaaaatgttaaagaaagaacttctggttctataatcatattatatgcactaaactatatgcatgaaagttctttgcatggattaatggggcttacccttgttgcactcgaaatctgaggtgtatctagccctgccactattggctacttaccctcattaatatcccacttgagaaaaattgtgagactatactgtgtcaatatctgtaaaaagagag

SEQ ID NO: 9971 - protein, 419 aa, Homo sapiens
  ref <308>: DATABASE ACCESSION NUMBER: SWISS-Prot / Q14722
  ref <309>: DATABASE ENTRY DATE: 2001-10-16
MLAARTGAAGSQISEENTKLRRQSGFSVAGKDKSPKKASENAKDSSLSPSGESQLRARQLALLREVEMNWYLKLCDLSSEHTTVCTTGMPHRNLGKSGLRVSCLGLGTWVTFGGQISDEVAERLMTIAYESGVNLFDTAEVYAAGKAEVILGSIIKKKGWRRSSLVITTKLYWGGKAETERGLSRKHIIEGLKGSLQRLQLEYVDVVFANRPDSNTPMEEIVRAMTHVINQGMAMYWGTSRWSAMEIMEAYSVARQFNMIPPVCEQAEYHLFQREKVEVQLPELYHKIGVGAMTWSPLACGIISGKYGNGVPESSRASLKCYQWLKERIVSEEGRKQQNKLKDLSPIAERLGCTLPQLAVAWCLRNEGVSSVLLGSSTPEQLIENLGAIQVLPKMTSHVVNEIDNILRNKPYSKKDYRS

SEQ ID NO: 9972 - DNA, 1339 bp, Rattus norvegicus
  ref <308>: DATABASE ACCESSION NUMBER: EMBL / X70667
  ref <309>: DATABASE ENTRY DATE: 1993-11-15
cggctgtaactgtagcaaccggtgttgggtggggatgagaagagaccagagagagagagggtcagagcgacaggggatgagacaggctggtcagagtctgcactgattgttggagacgcaaaggaaagttttttctatgtctccaacctccccctcctcccccgtttctctctggagaaactaaaatctagactggacagcatccacaagagaagcacctagaagaagatttttttttcccagcagcttgctcaggaccctgcaggagctgcagccggaactggtcccgccgataaccatgaactcttcctgctgcccgtcctcctcttatccgacgctgcctaacctctcccagcaccctgcagccccctctgccagcaaccggagtggcagtgggttctgcgagcaggttttcatcaagccagaggtcttcctggcactgggcatcgtcagtctgatggaaaacatcctggtgatcctggctgtggtgaggaacggcaacctgcactcccccatgtacttcttcctgctgagcctgctgcaggccgacatgctggtgagcctgtccaactccctggagaccatcatgatcgtggttatcaacagcgactccctgaccttggaggaccaattcatccagcacatggacaacatcttcgactctatgatctgcatctccctggtggcctccatctgcaacctcctggccatcgccgtggacaggtacgtcaccatcttctatgccctccgttaccacagcatcatgacggttaggaaagccctctccttgatcgtggccatctgggtctgctgtggcatctgcggcgtgatgttcatcgtctactccgagagcaagatggtcatcgtgtgcctcatcaccatgttcttcgccatggtgctcctcatgggcaccctgtacatccacatgttcctcttcgccaggctgcacgtccagcgcatcgcggcactgccacctgctgacggggtagccccgcagcagcactcgtgcatgaagggggccgtcaccatcaccatcctgctgggggttttcatcttctgctgggcgcctttcttcctccacctggtcctcatcatcacctgccccaccaacccctactgcatctgctacacggcgcacttcaacacctacctggttctcatcatgtgcaactctgtcatcgaccccctcatctacgccttccgcagcctggagctgcggaacaccttcaaggagattctctgcggttgcaatggcatgaacgtgggctaggaacccccgaggaggtgttccacggctagccaagagagaaaagcaatgctcaggtgagacacagaaggg

SEQ ID NO: 9973 - protein, 323 aa, Rattus norvegicus
  ref <308>: DATABASE ACCESSION NUMBER: SWISS-Prot / CAA50005
  ref <309>: DATABASE ENTRY DATE: 2000-05-30
MNSSCCPSSSYPTLPNLSQHPAAPSASNRSGSGFCEQVFIKPEVFLALGIVSLMENILVILAVVRNGNLHSPMYFFLLSLLQADMLVSLSNSLETIMIVVINSDSLTLEDQFIQHMDNIFDSMICISLVASICNLLAIAVDRYVTIFYALRYHSIMTVRKALSLIVAIWVCCGICGVMFIVYSESKMVIVCLITMFFAMVLLMGTLYIHMFLFARLHVQRIAALPPADGVAPQQHSCMKGAVTITILLGVFIFCWAPFFLHLVLIITCPTNPYCICYTAHFNTYLVLIMCNSVIDPLIYAFRSLELRNTFKEILCGCNGMNVG

SEQ ID NO: 9974 - DNA, 1083 bp, Homo sapiens
  ref <308>: DATABASE ACCESSION NUMBER: Refseq / NM_019888
  ref <309>: DATABASE ENTRY DATE: 2001-12-28
atgagcatccaaaagacgtatctggagggagattttgtctttcctgtgagcagcagcagcttcctacggaccctgctggagccccagctcggatcagcccttctgacagcaatgaatgcttcgtgctgcctgccctctgttcagccaacactgcctaatggctcggagcacctccaagcccctttcttcagcaaccagagcagcagcgccttctgtgagcaggtcttcatcaagcccgaggttttcctgtctctgggcatcgtcagtctgctggaaaacatcctggttatcctggccgtggtcaggaacggcaacctgcactccccgatgtacttctttctctgcagcctggcggtggccgacatgctggtaagtgtgtccaatgccctggagaccatcatgatcgccatcgtccacagcgactacctgaccttcgaggaccagtttatccagcacatggacaacatcttcgactccatgatctgcatctccctggtggcctccatctgcaacctcctggccatcgccgtcgacaggtacgtcaccatcttttacgcgctccgctaccacagcatcatgaccgtgaggaaggccctcaccttgatcgtggccatctgggtctgctgcggcgtctgtggcgtggtgttcatcgtctactcggagagcaaaatggtcattgtgtgcctcatcaccatgttcttcgccatgatgctcctcatgggcaccctctacgtgcacatgttcctctttgcgcggctgcacgtcaagcgcatagcagcactgccacctgccgacggggtggccccacagcaacactcatgcatgaagggggcagtcaccatcaccattctcctgggcgtgttcatcttctgctgggcccccttcttcctccacctggtcctcatcatcacctgccccaccaacccctactgcatctgctacactgcccacttcaacacctacctggtcctcatcatgtgcaactccgtcatcgacccactcatctacgctttccggagcctggaattgcgcaacacctttagggagattctctgtggctgcaacggcatgaacttgggatag

SEQ ID NO: 9975 - protein, 360 aa, Homo sapiens
  ref <308>: DATABASE ACCESSION NUMBER: Refseq / NP_063941
  ref <309>: DATABASE ENTRY DATE: 2001-12-28
MSIQKTYLEGDFVFPVSSSSFLRTLLEPQLGSALLTAMNASCCLPSVQPTLPNGSEHLQAPFFSNQSSSAFCEQVFIKPEVFLSLGIVSLLENILVILAVVRNGNLHSPMYFFLCSLAVADMLVSVSNALETIMIAIVHSDYLTFEDQFIQHMDNIFDSMICISLVASICNLLAIAVDRYVTIFYALRYHSIMTVRKALTLIVAIWVCCGVCGVVFIVYSESKMVIVCLITMFFAMMLLMGTLYVHMFLFARLHVKRIAALPPADGVAPQQHSCMKGAVTITILLGVFIFCWAPFFLHLVLIITCPTNPYCICYTAHFNTYLVLIMCNSVIDPLIYAFRSLELRNTFREILCGCNGMNLG

SEQ ID NO: 9976 - DNA, 1959 bp, Rattus norvegicus
  ref <308>: DATABASE ACCESSION NUMBER: EMBL / X70706
  ref <309>: DATABASE ENTRY DATE: 1993-01-27
ccacctataatttattccacctctggcaaaggactgcaaaggcagccaggaaggagattcatcttcacatggacgagatggcaaccactcagatttccaaagatgagcttgatgaactcaaagaggcctttgcaaaagttgatctcaacagcaatggattcatttgcgactatgaacttcatgagcttttcaaggaagcgaatatgccattgcccggatataaagtgagagaaattattcaaaaactcatgctggatggcgacagaaataaagatgggaagataagctttaatgaatttgtttatattttccaagaggtaaagagcagtgacattgctaaaaccttccgcaaagccatcaacaggaaagaagggatttgtgctctgggaggaacttcagagttgtccagtgaaggaacccagcattcctactcagaggaagaaaaatatgctttcgttaattggataaataaagctttggaaaatgatcccgattgcagacatgtcatacccatgaacccaaatactgatgacctattcaaagcagttggtgatggaattgtgctctgcaaaatgatcaacctttctgttcccgatacaattgatgagagagcaatcaataagaagaagcttacacccttcatcattcaggaaaacttgaacttggccctgaattctgcttctgccattggatgtcacgttgtgaacattggtgccgaagatctgcgtgccgggaaacctcatctggtcttgggactgctctggcagattattaagattggcttatttgctgacattgaattaagcaggaatgaagcactggcggctttgcttcgagatggtgagactctggaggagcttatgaaattgtctccagaagagcttctgctgagatgggccaacttccatctggaaaactcaggctggcaaaagatcaacaacttcagtgctgacatcaaggattccaaagcctatttccatctactcaatcaaattgcaccgaaaggacagaaggaaggggaaccacggatagatattaacatgtcaggtttcaacgaaacagatgatttaaagagagccgaaagtatgcttcagcaagcagataaattaggctgcagacagttcgttaccccggctgatgttgtgagcggaaaccccaaactgaacttggcctttgtagccaacctctttaataaatatccagcactaactaaacctgagaaccaggatattgattggactcttctagaaggagaaactcgtgaagaaagaacctttcgtaactggatgaactctcttggtgtgaatccccatgtcaaccatctctatgttgacctgcaggatgccctggtgatcttacagctgtatgagagaattaaagttcctgtggactggagtaaagttaacaagcctccatacccaaagctgggtgccaacatgaaaaagttagaaaactgcaactatgcagttgaattagggaagaatcaggctaaattctccttggttggcattggaggacaagacttgaatgatgggaacccaaccttgaccttggctgtagtctggcagctgatgagaagatatacccttaatgttatggaagatcttggagagggtcagaaagcaactgatgacatcattgtaaactgggtcaatggaacattgagtgaagctggaaagtcaacttctattcagagttttaaggacaagacgatcagctccagtttggcagttgtggatttaattgatgccatccagccaggctgcattaactatgaccttgtgaagactggaaatctaacagaagaagacaagcacaataacgccaagtatgcagtgtcgatggctagaagaataggagccagagtgtatgctctccctgaagaccttgtggaagtaaaaccgaagatggtcatgaccgtgtttgcctgtttgatgggcaggggaatgaagagtgtaa

SEQ ID NO: 9977 - protein, 627 aa, Rattus norvegicus
  ref <308>: DATABASE ACCESSION NUMBER: SWISS-Prot / Q63598
  ref <309>: DATABASE ENTRY DATE: 2001-10-16
MATTQISKDELDELKEAFAKVDLNSNGFICDYELHELFKEANMPLPGYKVREIIQKLMLDGDRNKDGKISFNEFVYIFQEVKSSDIAKTFRKAINRKEGICALGGTSELSSEGTQHSYSEEEKYAFVNWINKALENDPDCRHVIPMNPNTDDLFKAVGDGIVLCKMINLSVPDTIDERAINKKKLTPFIIQENLNLALNSASAIGCHVVNIGAEDLRAGKPHLVLGLLWQIIKIGLFADIELSRNEALAALLRDGETLEELMKLSPEELLLRWANFHLENSGWQKINNFSADIKDSKAYFHLLNQIAPKGQKEGEPRIDINMSGFNETDDLKRAESMLQQADKLGCRQFVTPADVVSGNPKLNLAFVANLFNKYPALTKPENQDIDWTLLEGETREERTFRNWMNSLGVNPHVNHLYVDLQDALVILQLYERIKVPVDWSKVNKPPYPKLGANMKKLENCNYAVELGKNQAKFSLVGIGGQDLNDGNPTLTLAVVWQLMRRYTLNVMEDLGEGQKATDDIIVNWVNGTLSEAGKSTSIQSFKDKTISSSLAVVDLIDAIQPGCINYDLVKTGNLTEEDKHNNAKYAVSMARRIGARVYALPEDLVEVKPKMVMTVFACLMGRGMKSV

SEQ ID NO: 9978 - DNA, 3089 bp, Homo sapiens
  ref <308>: DATABASE ACCESSION NUMBER: Refseq / NM_005032
  ref <309>: DATABASE ENTRY DATE: 2002-11-05
aaagattccgaggtgcagaagttgtctgagtgggttggtcggcggcagtcgggccagacccaggactctgcgactttacatctttaaatggatgagatggctaccactcagatttccaaagatgagcttgatgaactcaaagaggcctttgcaaaagttgatctcaacagcaacggattcatttgtgactatgaacttcatgagctcttcaaggaagctaatatgccattaccaggatataaagtgagagaaattattcagaaactcatgctggatggtgacaggaataaagatgggaaaataagttttgacgaatttgtttatatttttcaagaggtaaaaagtagtgatattgccaagaccttccgcaaagcaatcaacaggaaagaaggtatttgtgctctgggtggaacttcagagttgtccagcgaaggaacacagcattcttactcagaggaagaaaaatatgcttttgttaactggataaacaaagctttggaaaatgatcctgattgtagacatgttataccaatgaaccctaacaccgatgacctgttcaaagctgttggtgatggaattgtgctttgtaaaatgattaacctttcagttcctgataccattgatgaaagagcaatcaacaagaagaaacttacacccttcatcattcaggaaaacttgaacttggcactgaactctgcttctgccattgggtgtcatgttgtgaacattggtgcagaagatttgagggctgggaaacctcatctggttttgggactgctttggcagatcattaagatcggtttgttcgctgacattgaattaagcaggaatgaagccttggctgctttactccgagatggtgagactttggaggaacttatgaaattgtctccagaagagcttctgcttagatgggcaaactttcatttggaaaactcgggctggcaaaaaattaacaactttagtgctgacatcaaggattccaaagcctatttccatcttctcaatcaaatcgcaccaaaaggacaaaaggaaggtgaaccacggatagatattaacatgtcaggtttcaatgaaacagatgatttgaagagagctgagagtatgcttcaacaagcagataaattaggttgcagacagtttgttacccctgctgatgttgtcagtggaaaccccaaactcaacttagctttcgtggctaacctgtttaataaatacccagcactaactaagccagagaaccaggatattgactggactctattagaaggagaaactcgtgaagaaagaaccttccgtaactggatgaactctcttggtgtcaatcctcacgtaaaccatctctatgctgacctgcaagatgccctggtaatcttacagttatatgaacgaattaaagttcctgttgactggagtaaggttaataaacctccatacccgaaactgggagccaacatgaaaaagctagaaaactgcaactatgctgttgaattagggaagcatcctgctaaattctccctggttggcattggagggcaagacctgaatgatgggaaccaaaccctgactttagctttagtctggcagctgatgagaagatataccctcaatgtcctggaagatcttggagatggtcagaaagccaatgacgacatcattgtgaactgggtgaacagaacgttgagtgaagctggaaaatcaacttccattcagagttttaaggacaagacgatcagctccagtttggcagttgtggatttaattgatgccatccagccaggctgtataaactatgaccttgtgaagagtggcaatctaacagaagatgacaagcacaataatgccaagtatgcagtgtcaatggctagaagaatcggagccagagtgtatgctctccctgaagaccttgtggaagtaaagcccaagatggtcatgactgtgtttgcatgtttgatgggcaggggaatgaagagagtgtaaaataaccaatctgaataaaacagccatgctcccaggtgcatgattcgcaggtcagctatttcccaggtgaagtgcttatggcttaaggaactcttggccattcaaaggacttttcattttgattaacaggactagcttatcatgagagcctcaggggaaagggtttaagaaaaacaactcctctttcccatagtcagagttgaatttgtcaggcacgcctgaaatgtgctcatagccaaaacattttactctctcctcctagaatgctgcccttgacatttcccattgctgtatgttatttcttgctctgttatcttttgccctcttagaatgtccctctcttgggacttgcttagatgatgggatatgaatattattagacagtaattttgctttccatccagtatgctagttcttattcgagaactatggtcagagcgtatttggatatgagtatcctttgcttatctttgtagtactgaaaatttgccgaagtaactggctgtgcagaatgtaatagaagcttttcttattcttttattcttaagtacagtatctttttacagtattctttctacatgatccttttttgtacatttaagaatattttgattatattaaacaagactgctgattttgctactttttttaaggggtcttcaagtaagtaaaacatacatcgtagctagaagaaaaatgtaccttaaatttgcatcttccctctcatacccaagctgtaaacaattgaaatattttgtcttaaatcacttggttcaatacatgcttatttgttttaaaacctgtatcatcaaactctctctctaaatttaaaatgctgttgaatatgatacttttgaggagagagtgtgctcagaacttagacgggatttggtaggccaagtatgctaagtgtacaatatattttttaattttacacctgaaacaaagaaatgtggtcactaaaaataaaagtatatatgtaggaattaatgtactcttgctttgtcaagctgtttgctatagtttccaaggtattatgttactctaactctgaaaagtgatgtaatctggtagcaatgtagtagttcaaataaaggcatttacataat

SEQ ID NO: 9979 - protein, 627 aa, Homo sapiens [sequence omitted]

SEQ ID NO: 9980 - DNA, 1136 bp, Rattus norvegicus
  ref <308>: DATABASE ACCESSION NUMBER: EMBL / X71127
  ref <309>: DATABASE ENTRY DATE: 1996-03-14
gggcttcttggacgtttttgggaggggacagcaagggaaggtccttctgcctctagggacccagacttccgctttctgcagacagcagcaggctctgggctctgggaatccactgctgtctggcctagaagcatcatagaacacgaggattccatacacaggaggcccctgaagctgagctgagctgatgaagacacagtggagtgagatcttgacacccctgttgctgctgctcctgggtttgctccatgtctcctgggcccaaagcagctgtactgggtcccctggcatccctggggtccctggcatccctggggtccctggctctgatggcaaaccaggcactccagggataaaaggagagaaagggctccccggactggctggagaccatggtgagttaggagagaaaggggatgcagggatccctgggatcccaggcaaagttggccccaagggtcccgtcggccctaagggtgctccaggcccccctggaccccgcggtcccaaaggtggctctggagactacaaggctacccagaaagtagccttctctgccctgaggacggtcaacagcgccctgcgaccaaaccaggccattcgcttcgaaaaggtgatcaccaatgttaatgataactacgagccgcgcagtggcaagttcacctgcaaggtacctggcctctactacttcacctaccacgccagttcccgcgggaatctgtgtgtgaacatcgtgcgcggccgcgaccgagaccgcatgcagaaagttctcaccttctgcgactatgcccaaaacaccttccaggtcaccacgggtggggtagtcttgaagctggagcaggaagaggttgttcacctgcaggccacagacaagaactccctgctgggcgtcgagggagccaatagcatcttcactggctttctgcttttccctgacatggatgtatgatcacggggtcaaatcactcctatccaaaacctcctccctgccagtaatcctccctggaccccagacactgccctttgactgcccaaagccctgaccagagccctgtagatgttacagaatgggtaaataaactcttcaaggccaagaaaaaaaaaaaaaaaaaaaaaaaaaaaaaaaaaaaaaaccc

SEQ ID NO: 9981 - protein, 253 aa, Rattus norvegicus
  ref <308>: DATABASE ACCESSION NUMBER: SWISS-Prot / P31721
  ref <309>: DATABASE ENTRY DATE: 2001-10-16
MKTQWSEILTPLLLLLLGLLHVSWAQSSCTGSPGIPGVPGIPGVPGSDGKPGTPGIKGEKGLPGLAGDHGELGEKGDAGIPGIPGKVGPKGPVGPKGAPGPPGPRGPKGGSGDYKATQKVAFSALRTVNSALRPNQAIRFEKVITNVNDNYEPRSGKFTCKVPGLYYFTYHASSRGNLCVNIVRGRDRDRMQKVLTFCDYAQNTFQVTTGGVVLKLEQEEVVHLQATDKNSLLGVEGANSIFTGFLLFPDMDV

SEQ ID NO: 9982 - DNA, 935 bp, Homo sapiens
  ref <308>: DATABASE ACCESSION NUMBER: EMBL / X03084
  ref <309>: DATABASE ENTRY DATE: 1994-11-11
ccaggcccagctcagctgcaccgggcccccagccatccctggcatcccgggtatccctgggacacctggccccgatggccaacctgggaccccagggataaaaggagagaaagggcttccagggctggctggagaccatggtgagttcggagagaagggagacccagggattcctgggaatccaggaaaagtcggccccaagggccccatgggccctaaaggtggcccaggggcccctggagccccaggccccaaaggtgaatcgggagactacaaggccacccagaaaatcgccttctctgccacaagaaccatcaacgtccccctgcgccgggaccagaccatccgcttcgaccacgtgatcaccaacatgaacaacaattatgagccccgcagtggcaagttcacctgcaaggtgcccggtctctactacttcacctaccacgccagctctcgagggaacctgtgcgtgaacctcatgcgtggccgggagcgtgcacagaaggtggtcaccttctgtgactatgcctacaacaccttccaggtcaccaccggtggcatggtcctcaagctggagcagggggagaacgtcttcctgcaggccaccgacaagaactcactactgggcatggagggtgccaacagcatcttttccgggttcctgctctttccagatatggaggcctgacctgtgggctgcttcacatccaccccggctccccctgccagcaacgctcactctacccccaacaccaccccttgcccagccaatggacacagtagggcttggtgaatgctgctgagtgaatgagtaaataaactcttcaaggccaaggaacagtggtctaattcaactctgtgtcccagcactggcacaccagaagtgccatgctcagaaatgttggttacatgaatgaatgaaccatgaatgaatg

SEQ ID NO: 9983 - protein, 251 aa, Homo sapiens
  ref <308>: DATABASE ACCESSION NUMBER: SWISS-Prot / P02746
  ref <309>: DATABASE ENTRY DATE: 2002-06-15
MKIPWGSIPVLMLLLLLGLIDISQAQLSCTGPPAIPGIPGIPGTPGPDGQPGTPGIKGEKGLPGLAGDHGEFGEKGDPGIPGNPGKVGPKGPMGPKGGPGAPGAPGPKGESGDYKATQKIAFSATRTINVPLRRDQTIRFDHVITNMNNNYEPRSGKFTCKVPGLYYFTYHASSRGNLCVNLMRGRERAQKVVTFCDYAYNTFQVTTGGMVLKLEQGENVFLQATDKNSLLGMEGANSIFSGFLLFPDMEA

SEQ ID NO: 9984 - DNA, 1136 bp, Rattus norvegicus; identical to SEQ ID NO: 9980
  ref <308>: DATABASE ACCESSION NUMBER: EMBL / X71127
  ref <309>: DATABASE ENTRY DATE: 1996-03-14

SEQ ID NO: 9985 - protein, 253 aa, Rattus norvegicus; identical to SEQ ID NO: 9981
  ref <308>: DATABASE ACCESSION NUMBER: SWISS-Prot / P31721
  ref <309>: DATABASE ENTRY DATE: 2001-10-16

SEQ ID NO: 9986 - DNA, 935 bp, Homo sapiens; identical to SEQ ID NO: 9982
  ref <308>: DATABASE ACCESSION NUMBER: EMBL / X03084
  ref <309>: DATABASE ENTRY DATE: 1994-11-11

SEQ ID NO: 9987 - protein, 251 aa, Homo sapiens; identical to SEQ ID NO: 9983
  ref <308>: DATABASE ACCESSION NUMBER: SWISS-Prot / P02746
  ref <309>: DATABASE ENTRY DATE: 2002-06-15

SEQ ID NO: 9988 - DNA, 4447 bp, Rattus norvegicus
  ref <308>: DATABASE ACCESSION NUMBER: EMBL / X72757
  ref <309>: DATABASE ENTRY DATE: 1995-06-20
gatccacctgcctctgcttcctgagtgctggtattaaaggtgtgtgccaccaccatccagcaatacacctgttttttttttttaattgttcatatagttcagtatggccttgaactcatcaagcatgagtctgctgcctctacctccttttgttattttgagatagggtctcataccatagacaaggctaatcacagactctatatgtggtccagagtggcctctaattagagattccctcctcggtctctcagaactgtgccatatacacatacatttaaacttgggggtgtgtgggtggagacagggtttcactttacagcccaggcaagtctctaactcacaacaatcctcctgacccatctcactcttgctgggattatgagccacctgccaccatgcttcccgtgttgtgttgtttttgtttcatggagaagggtctcactatgcagcccctggacagcctggaactctcggtagaagaaagaggctatcctgggatcagtccatcgtcttcctccaagatgccaccacacctggcattccagcctttttaaaaaaaaaaacttttatctttaaaaaggcgtttagacaaaaagaaagaaaaaagaaagcagatatttaaaaagttctacagacgaaatttaacagatctttgtagaattcgagggagagagcaggaccattggccaatcgctgaggatatggagctgaaacaaagtccagattttctggcaccaattccagggttctttctgggtccaggagctattcattgactcattaattcatggattcataattcatatattcattaaattgcataaagcacctgctacttgatttcgggtaactctgggaatgcagcgctggcaaaatctaagcaccacggactttacagtccatatagggcgtcacagaagagaataacaacggtctttaagagtgatgacaagggtgtcgggtgccttggaaatcgcggaattagaagtcagcgaggaaaggagaatggcgcttccgataacgtcatttgttctcggcatttcagatcctgtccagggactccaaagaaggtagcagttaaaaacaaaacaaaaaaatatctcacagaagctctattcagcgaacatcctcacccagcagcagaggagggaggtggggcacaggtatgaaacgcatgcgcaatctcactcgtgccgccccgagggtttggaccaggaccgaaaatgtgcgcaggcgctacaattcctggccagtgagaaggcgttgcccaatgaaacttcgtttggcgtctctgtcccgcccccttcgggacccccatttccgcttccggcgcgccgggtagttccaagatggcgtcggcggtgctgagtgcgtctcgagtctctgggctgctgggccgggccctcccacgggtggggcggcccatgtcgagtggcgcccacggcgaggagggttcaggtaccggggctcgggtgggcgtgggggcctcagtggctggcacgcggcctggcggggccgtgaccttggcgggaggccttgcgggagggagcggccgaggctgacattctggtccccgctgcagctcgtatttggaaggccctcacctacttcgtggcgctgcccggggtgggagtgagcatgctcaacgttttcctgaagtcgcgacacgaagagcacgagagacccgagttcgtcgcctacccccatctccgcatcaggactaaggtacgcgctgcgcctctgctgtccttcaagcgtccgttatttctgggttgtccactccccagtcccagcccttggtgcgctaggatctcggctgcctgtctatccgcgcagactgaacattttatttactctcgttttacatgagggaagccagtttgtgggtcgcggcttaattttcttaaaaagccgcacaataaatggtcctggattttcaactcccccaatttgtcatcttttgtcttctggtgcacttcagatgctgtttcctgaatgaaagcttgtagttttggggtgtccttttatagaggcagatcctgaaggtgatttacaatccgggcgttaggcttgagcacagactgccggtttgtgtagacagttttaatgtctctcgatgaattttttttttttttggttctttttttccggagctggggatcgaacccagggccttgcacttcctaggcaagcgctctaccactgagctaaatccccaacccctctcgatgaatttttaacaaggctgtttatttgctccttaaattgtatcacctaattcacataggactagccttgcagaaacttaatctagatttttacatcccacgaggctcgatcccactcgtgtacagcctcagcacttgggaggccaaagcaggcatatctcctgagctcaagaccagtctggtctacatagtgagctccagggcagttatgggtgagaaaaaggtgcttcacagcatccttgccttggcctctgcccagtaggtggcagtagtaccccggcctaactgcctctagaaaatgcgcatgtctcgcccctgacacttgggggctgaaaataagagaatcagtagctcatggtcattctctgcttcgttatgaagtaggttatcttgggccaaagaggttatcacagatagccaaaaatggttgtgagctattggccaagagcagtgcttttcaaacatggtgggaaggaactggagagatggctcagtggtttagagtggtgctgctcatacggacagaagagccagttttaatttctagtgcccaggtgggtagctcacaacttgctttagctccatatgggggtgggactggtgtcttttggcttctgtggtacactcatacttttgtgcatatgcccacaaaggaggaggaggagtactaatgatcgtaataaaaaataaagccggcatggtagcacaggcctttaatctcagcacttgggaggcagaggcaggaggatcattgtaatttttaggtcagcctgtctatgtaggatttaaggttagctaaagaaaccctgcttcaataaaaaaaaaaaaaaaaaaaaaaaaaatcagggcttcaaagatgctcagcaggtgaaggagctagcaagcccaagacggtgcatcaatgtctgggacccactgcagaaggggagaacctatatacccacacacaagtggtctctgacagtggccgtatacatgcacactcaaaacaaaaggtactgaggaaaaggatagaatcttggttgcagttttctggtcctgcattaaaaagcatccacgtctgccatcgcccttctgatacaggaagggccacaccttgatggcacaatcctggctggagcagtttccaggggaagctaggaactgcttttcttatattaaaaatgttgattatggatagatacctatgtgtgtacatatgtacctgtgagtgcaggtgtctgtggggtcagaggtgtgagatcccggcagcagttgtgagacacctgatctgatgtctgagaattttggaggagcaagtctgatgaacggagccatctttccaacatcttatgttttttaaggtttaatttcttttaaattacgtgtgtgcatgtggatgcccaagggagccaaagagggcttcaggttccctggggctggagtagtagcagttatgagctgcctggtgtggatgctgggaaccaaacttgttctattcatgggcagagcagtacatggccttagctgctgagccatctccttccctggagcttgctttactactagccacttcagaggagagatggctcggtggttagagcaccggctgctcttccaggggtcctgagttcgatttccagcaaccacatggtggctcacaaccatctgtaatgggatctgaatccctcttttgtgtgggtgaagacatagtgtttatacataaataaattaaagtacataaaaaatttaacaagaaaaactatgggacagttgaaattatgccagtaaaggacaaatttccgtttggattttgttttatctgtttcaagcagttggcaggcaagttgtttgtgagcgttttcgggaaacatctaattgccatcttcactccacagcccttcccctggggagatggtaaccataccctcttccacaatcctcacatgaacccgcttccgactggctatgaagatgagtaaagagaacctggctcttcgcccaggcgacaagggaccacagcactgatttggaccctgactcttgtgtgtggaccacgaaagcccattggatgctcagctcatctttcctttatcagatggtgaccattactttgctcctccatccctttgctcgtaagaggagatggcttaaataaataacttgaactgagattgtccgtgggctggatgctgcatttttattctcagattaattgctttgctgcttgtagatct

SEQ ID NO: 9989 - protein, 111 aa, Rattus norvegicus; identical to SEQ ID NO: 6833
  ref <308>: DATABASE ACCESSION NUMBER: SWISS-Prot / CAA51286
  ref <309>: DATABASE ENTRY DATE: 2002-06-15

SEQ ID NO: 9990 - DNA, 4447 bp, Rattus norvegicus; identical to SEQ ID NO: 9988
  ref <308>: DATABASE ACCESSION NUMBER: EMBL / X72757
  ref <309>: DATABASE ENTRY DATE: 1995-06-20

SEQ ID NO: 9991 - protein, 111 aa, Rattus norvegicus; identical to SEQ ID NO: 6833
  ref <308>: DATABASE ACCESSION NUMBER: SWISS-Prot / CAA51286
  ref <309>: DATABASE ENTRY DATE: 2002-06-15

SEQ ID NO: 9992 - DNA, 1448 bp, Rattus norvegicus
  ref <308>: DATABASE ACCESSION NUMBER: EMBL / X73371
  ref <309>: DATABASE ENTRY DATE: 1993-10-05
cctctagatgcatgctcgagcggccgccagtgtggtggaattctgccaaactcggagagaagcctgtgcctgcagctgactcactccaggactgatgggaaccctgctgttcctaccgctccccatggacagcaacaggactgtcgtccatgtgctctcacggactttgtaccatatgctactgtggacagctgtgctaaatcttgttgctgagtctcatgcaggtcttccgaaggctgtggtgaaacttgagcccccatggatccaggtgcttaaggaagacactgtgacactgatgtgcgaagggacccacaacaccaagaactgttctactcagtggtttcacaatgggagctccatctggcatcaagcccaagccaactacacgtttaaggccacagtcaatgatagtggagaataccggtgccgaatggaggagaccggcatcagcgaacccatacatctgggagtgatttctgactggctgctactccagacctctcaactggtgtttgaagaaggggaaaccatcacattaaggtgccatagctggaagaacaaacagctgactaaggtcttgttgttccagaatggaaaacctgtgaggtattatcatcaaagcagcaatttttcaatccccaaagccaaccacagtcacagtgggaactactattgcaaagcatatctaggaaggacaatgcacgtgtccaagcctgtcaccatcactgtccaagagcccaaatccagcagttcgttgccggtattgacgattgtagctgctgtcgctggaattgctgtagctgccattgttattatcctggtatccttggtctatctcaagaaaaagcaggttccagacactccttctggtctcgaagaagctgagaaaaatgaggtggagaatacaatcacctattcacttctcaagcatcctgaagctccggatgaagaatcagatcacgactaccagaaccacatttagtctctcttgagattgggaaaagcaaaccagtaaggccaggacctagcgtctcctggtccaaggaatgctgtagatatgaaagaaaacatctagagtcccttctgtgagtcctgaaaccaacagacactacgatattggttcccaatggttgactgtactaatgacttccataacttacagcttcccaactaaagactcttttgctatagatccacacagccaataaaattaatcaacttactgttgttaagagactacagcaacgtgggaactgcttatattacatgctaaggagaacaagtaacattaggatgcataatctcagcgaggatcaactagacgtgtaccaacctgtcaaaagtgatgcttctttataagaaactttatttccttatttttctataaaggtcacatattacttttatagtaaaatgttgtgaaaatgtccaaaaaaaaaaaaaaaaaa

SEQ ID NO: 9993 - protein, 285 aa, Rattus norvegicus
  ref <308>: DATABASE ACCESSION NUMBER: SWISS-Prot / Q63203
  ref <309>: DATABASE ENTRY DATE: 2002-06-15
MDSNRTVVHVLSRTLYHMLLWTAVLNLVAESHAGLPKAVVKLEPPWIQVLKEDTVTLMCEGTHNTKNCSTQWFHNGSSIWHQAQANYTFKATVNDSGEYRCRMEETGISEPIHLGVISDWLLLQTSQLVFEEGETITLRCHSWKNKQLTKVLLFQNGKPVRYYHQSSNFSIPKANHSHSGNYYCKAYLGRTMHVSKPVTITVQEPKSSSSLPVLTIVAAVAGIAVAAIVIILVSLVYLKKKQVPDTPSGLEEAEKNEVENTITYSLLKHPEAPDEESDHDYQNHI

SEQ ID NO: 9994 - DNA, 1466 bp, Homo sapiens
  ref <308>: DATABASE ACCESSION NUMBER: Refseq / NM_004001
  ref <309>: DATABASE ENTRY DATE: 2002-11-05
gccctctagggtagaatcgccaagctttgagagaaggctgtgactgctgtgctctgggcgccagctcgctccagggagtgatgggaatcctgtcattcttacctgtccttgccactgagagtgactgggctgactgcaagtccccccagccttggggtcatatgcttctgtggacagctgtgctattcctggcagctcccccaaaggctgtgctgaaactcgagccccagtggatcaacgtgctccaggaggactctgtgactctgacatgccgggggactcacagccctgagagcgactccattcagtggttccacaatgggaatctcattcccacccacacgcagcccagctacaggttcaaggccaacaacaatgacagcggggagtacacgtgccagactggccagaccagcctcagcgaccctgtgcatctgactgtgctttctgagtggctggtgctccagacccctcacctggagttccaggagggagaaaccatcgtgctgaggtgccacagctggaaggacaagcctctggtcaaggtcacattcttccagaatggaaaatccaagaaattttcccgttcggatcccaacttctccatcccacaagcaaaccacagtcacagtggtgattaccactgcacaggaaacataggctacacgctgttctcatccaagcctgtgaccatcactgtccaagctcccagctcttcaccgatggggatcattgtggctgtggtcactgggattgctgtagcggccattgttgctgctgtagtggccttgatctactgcaggaaaaagcggatttcagctctcccaggataccctgagtgcagggaaatgggagagaccctccctgagaaaccagccaatcccactaatcctgatgaggctgacaaagttggggctgagaacacaatcacctattcacttctcatgcacccggatgctctggaagagcctgatgaccagaaccgtatttagtctccattgtcttgcattgggatttgagaagaaaatcagagagggaagatctggtatttcctggcctaaattccccttggaggacagggagatgctcgagttccaaaagagaaggtttcttccagagtcatctacctgagtcctgaagctccctgtcctgaaagccacagacaatatggtcccaaataaccgactgcacctgctgtcttcagctcttcttgacatcaaggctcttccgttccacatccacacagccaatccaattaatcaaaccactgttattaacagataatagcaacttgggaaatgcttatgttacaggttaccgttgagaacaatcatctaaatctatatgatttcagaaatgttaaaatagactaacctctaccagcacattaaaagtgattgtttctgggtgatttattgatgatttttattttctttatttttctataaagatcatatattactttt

SEQ ID NO: 9995 - protein, 310 aa, Homo sapiens
  ref <308>: DATABASE ACCESSION NUMBER: SWISS-Prot / P31994
  ref <309>: DATABASE ENTRY DATE: 2002-06-15
MGILSFLPVLATESDWADCKSPQPWGHMLLWTAVLFLAPVAGTPAAPPKAVLKLEPQWINVLQEDSVTLTCRGTHSPESDSIQWFHNGNLIPTHTQPSYRFKANNNDSGEYTCQTGQTSLSDPVHLTVLSEWLVLQTPHLEFQEGETIVLRCHSWKDKPLVKVTFFQNGKSKKFSRSDPNFSIPQANHSHSGDYHCTGNIGYTLYSSKPVTITVQAPSSSPMGIIVAVVTGIAVAAIVAAVVALIYCRKKRISALPGYPECREMGETLPEKPANPTNPDEADKVGAENTITYSLLMHPDALEEPDDQNRI

SEQ ID NO: 9996 - DNA, 1525 bp, Rattus norvegicus
  ref <308>: DATABASE ACCESSION NUMBER: EMBL / X73653
  ref <309>: DATABASE ENTRY DATE: 1994-11-07
ggccaagagaacgaagtcttttttttttttttcttgcgggagaacttaatgctgcatttattattaacctagtaccctaacataaaacaaaaggaagaaaaggattaaggaaggaaaaggtgaatcgagaagagccatcatgtcggggcgaccgagaaccacctcctttgcggagagctgcaagccagtgcagcagccttcagcttttggtagcatgaaagttagcagagataaagatggcagcaaggtaaccacagtggtggcaactcctggacagggtcctgacaggccacaggaagtcagttacacagacactaaagtcattggaaatgggtcatttggtgtggtatatcaagccaaactttgtgactcaggagaactggtggccatcaagaaagttcttcaggacaagcgatttaagaaccgagagctccagatcatgagaaagctagatcactgtaacatagtccgattgcggtatttcttctactcgagtggcgagaagaaagatgaggtctaccttaacctggtgctggactatgttccggaaacagtgtacagagtcgccagacactatagtcgagccaagcagacactccctgtgatctatgtcaagttgtatatgtaccagctgttcagaagtctagcctatatccattcctttgggatctgccatcgagacattaaaccacagaacctcttgctggatcctgatacagctgtattaaaactctgcgactttggaagtgcaaagcagctggtccgaggagagcccaatgtttcatatatctgttctcggtactacagggcaccagagctgatctttggagccaccgattacacgtctagtatagatgtatggtctgcaggctgtgtgttggctgaattgttgctaggacaaccaatatttcctggggacagtggtgtggatcagttggtggaaataataaaggtcctaggaacaccaacaagggagcaaattagagaaatgaacccaaattatacagaattcaaattcccccaaatcaaggcacatccttggacgaaggtctttcggccccgaactccaccagaggcaatcgcactgtgtagccgtctcctggagtacacgccgaccgcccggctaacaccactggaagcttgtgcacattcattttttgatgaattacgggacccaaatgtcaaactaccaaatgggcgagacacacctgccctcttcaactttaccactcaagaactgtcaagtaacccacctctggccaccatccttatccctcctcacgctcggattcaggcagctgcttcaccgcctgcaaacgccacagcagcctcagatactaatgctggagaccgtggacagaccaataacgccgcttctgcatcagcctccaactctacctgaacagccccaagtagccagctgcgcagggaagaccagcacttacttgagtgccactcagcaacactggtcacgtttggaaagaaaattaaaaagaggaaaacaaaaacaaaaacaaaaaacccc

SEQ ID NO: 9997 - protein, 420 aa, Rattus norvegicus
  ref <308>: DATABASE ACCESSION NUMBER: SWISS-Prot / P18266
  ref <309>: DATABASE ENTRY DATE: 2001-10-16
MSGRPRTTSFAESCKPVQQPSAFGSMKVSRDKDGSKVTTVVATPGQGPDRPQEVSYTDTKVIGNGSFGVVYQAKLCDSGELVAIKKVLQDKRFKNRELQIMRKLDHCNIVRLRYFFYSSGEKKDEVYLNLVLDYVPETVYRVARHYSRAKQTLPVIYVKLYMYQLFRSLAYIHSFGICHRDIKPQNLLLDPDTAVLKLCDFGSAKQLVRGEPNVSYICSRYYRAPELIFGATDYTSSIDMWSAGCVLAELLLGQPIFPGDSGVDQLVEIIKVLGTPTREQIREMNPNYTEFKFPQIKAHPWTKVFRPRTPPEAIALCSRLLEYTPTARLTPLEACAHSFFDELRDPNVKLPNGRDTPALFNFTTQELSSNPPLATILIPPHARIQAAASPPANATAASDTNAGDRGQTNNAASASASNST

SEQ ID NO: 9998 - DNA, 1639 bp, Homo sapiens
  ref <308>: DATABASE ACCESSION NUMBER: EMBL / BC000251
  ref <309>: DATABASE ENTRY DATE: 2001-07-13
atcatctatatgttaaatatccgtgccgatctgtcttgaaggagaaatatatcgcttgttttgttttttatagtatacaaaaggagtgaaaagccaagaggacgaagtctttttctttttcttctgtgggagaacttaatgctgcatttatcgttaacctaacaccccaacataaagacaaaaggaagaaaaggaggaaggaaggaaaaggtgattcgcgaagagagtgatcatgtcagggcggcccagaaccacctcctttgcggagagctgcaagccggtgcagcagccttcagcttttggcagcatgaaagttagcagagacaaggacggcagcaaggtgacaacagtggtggcaactcctgggcagggtccagacaggccacaagaagtcagctatacagacactaaagtgattggaaatggatcatttggtgtggtatatcaagccaaactttgtgattcaggagaactggtcgccatcaagaaagtattgcaggacaagagatttaagaatcgagagctccagatcatgagaaagctagatcactgtaacatagtccgattgcgttatttcttctactccagtggtgagaagaaagatgaggtctatcttaatctggtgctggactatgttccggaaacagtatacagagttgccagacactatagtcgagccaaacagacgctccctgtgatttatgtcaagttgtatatgtatcagctgttccgaagtttagcctatatccattcctttggaatctgccatcgggatattaaaccgcagaacctcttgttggatcctgatactgctgtattaaaactctgtgactttggaagtgcaaagcagctggtccgaggagaacccaatgtttcgtatatctgttctcggtactatagggcaccagagttgatctttggagccactgattatacctctagtatagatgtatggtctgctggctgtgtgttggctgagctgttactaggacaaccaatatttccaggggatagtggtgtggatcagttggtagaaataatcaaggtcctgggaactccaacaagggagcaaatcagagaaatgaacccaaactacacagaatttaaattccctcaaattaaggcacatccttggactaaggattcgtcaggaacaggacatttcacctcaggagtgcgggtcttccgaccccgaactccaccggaggcaattgcactgtgtagccgtctgctggagtatacaccaactgcccgactaacaccactggaagcttgtgcacattcattttttgatgaattacgggacccaaatgtcaaactaccaaatgggcgagacacacctgcactcttcaacttcaccactcaagaactgtcaagtaatccacctctggctaccatccttattcctcctcatgctcggattcaagcagctgcttcaacccccacaaatgccacagcagcgtcagatgctaatactggagaccgtggacagaccaataatgctgcttctgcatcagcttccaactccacctgaacagtcccgagcagccagctgcacaggaaaaaccaccagttacttgagtgtcactcagcaacactggtcacgtttggaaagaatattaaaaaaaaaaaaaaaaaa

SEQ ID NO: 9999 - protein, 420 aa, Homo sapiens
  ref <308>: DATABASE ACCESSION NUMBER: SWISS-Prot / P49841
  ref <309>: DATABASE ENTRY DATE: 2002-06-15
MSGRPRTTSFAESCKPVQQPSAFGSMKVSRDKDGSKVTTVVATPGQGPDRPQEVSYTDTKVIGNGSFGVVYQAKLCDSGELVAIKKVLQDKRFKNRELQIMRKLDHCNIVRLRYFFYSSGEKKDEVYLNLVLDYVPETVYRVARHYSRAKQTLPVIYVKLYMYQLFRSLAYIHSFGICHRDIKPQNLLLDPDTAVLKLCDFGSAKQLVRGEPNVSYICSRYYRAPELIFGATDYTSSIDVWSAGCVLAELLLGQPIFPGDSGVDQLVEIIKVLGTPTREQIREMNPNYTEFKFPQIKAHPWTKVFRPRTPPEAIALCSRLLEYTPTARLTPLEACAHSFFDELRDPNVKLPNGRDTPALFNFTTQELSSNPPLATILIPPHARIQAAASTPTNATAASDANTGDRGQTNNAASASASNST

SEQ ID NO: 10000 - DNA, 2668 bp, Rattus norvegicus
  ref <308>: DATABASE ACCESSION NUMBER: EMBL / X73911
  ref <309>: DATABASE ENTRY DATE: 1994-08-18
gagtggccaggagcaaagtctggaagccggcgagccacggagcagagcacacagagctatgaggcttgcacaaatgtgtctggccttcggctgggcagctgtcatattggttctacagacggtagacacggcatctgctgtgaggactccttatgacaaagcgagggtatttgcagacctgagcccccaggagataaaggctgttcacagcttcctgatgaacagggaggagctggggctgcagccgtccaaggaaccgactttggccaaaaactctgtgtttctcattgagatgctactgcccaagaagaagcatgtgttgaaatttctggatgaaggaagaaaaggtcctaaccgggaagctagggctgtcatcttcttcggtgcccaggactaccccaatgtcactgagtttgctgtggggcccctgccacggccctactatattcgagcactatcccccaggccagggcaccatctgtcctggtcatccaggcccatctccacagcagagtacgacctcctctaccacacgctgaagagagccaccatgcctctgcaccagtttttccttgacaccactggcttctcattcctaggctgtgacgaccgatgcttgacttttactgacgtagctccacgtggtgtggcgtctggtcagcgtagaagctggtttattgtgcagcgctatgtggaaggctatttcctgcatcctacagggctggagatcctattggatcatgggagcacagatgtccaggactggagagtggagcagctctggtataacggcaagttctacaacaacccagaggaactggctcggaaatacgcagttggagaagtggacacggtggtcctcgaggacccactgcccaatggcacagagaagcccccactcttttcttcctacaaaccccggggggaattccatacaccagtcaatgttgctggcccccacgttgtccagcccagcggcccccgatataaactagagggcaacactgtgctctatggaggttggagcttctcttatcggctaagatcctcttctgggctgcagatcttcaatgtgctctttggaggtgagcgtgttgcctacgaggtcagtgtgcaggaggctgtggcactgtatggaggacacacacctgcaggcatgcagactaagtacattgatgttggctggggcctgggcagtgtcactcacgagttggcccctggcattgactgtccagagactgctactttcctggatgccttccactattacgacagcgatggccctgtccattatccacatgctctgtgcctctttgagatgcccacaggggtgcccctgaggcgccactttaactcaaactttaaaggtggcttcaacttctatgcgggtttgaagggatatgtgctggtgctacggacgacatcaactgtctataattatgattacatctgggatttcatcttctactctaacggggtgatggaggccaagatgcacgccactggctatgtccatgcgaccttctacactcctgagggactgcgccatggcactcgcttacaaacccacctgcttggtaacatccacacccacctggtgcactaccgtgttgacatggacgtggcaggcaccaagaacagcttccagacactgacgatgaagctggaaaacctcaccaatccctggagcccaagtcactccctggtccagcccacactcgagcagacccagtactcccaggagcaccaggctgcattccgcttcggacagactctgcccaagtacctgctctttagcagcccccaaaagaactgctggggtcacaggcgcagctaccgcctgcagatccattctatggctgagcaggtgctgccaccaggctggcaggaggagcgggctgtcacttgggccaggtatcctttggctgtaacaaagtatcgggaatctgagcgctacagcagcagcctctacaaccagaatgacccctgggatccccccgtggtctttgaggagttccttcggaacaacgagaacattgaagatgaggatttggtggcctgggtgacagtgggcttcctgcacatccctcactcagaagatgtccccaacacagccacacctggaaactctgtgggcttcttgctccggcccttcaacttcttcccagaggacccatccctggcttctagagacactgtgatagtgtggccccaggacaagggcctcaaccgtgtccagcgctggatccctgaggacaggcgctgcttggtgtctcctcctttcagctataatgggacctacaagcctgtgtgatgggtcagccccagcctctgcagcacacccagagcctcacaaagacagggaaaacaaacaaacgaaacttctgtctctaccctgtatgctaccttttagctctactcgtgtttcattaccatacctgccacagacttccaagaccattgcaaaggaaggaccacaattttctgccggtggttcggtggtttggagggtggtgttttttaaatatttgaggtgtttatcttcctatcaggagactttagagaaattgtctcacctcagtgatgggagggagtaaggaaactgtcatatgaaaatctaataaaatgacacctttgctctttagacatcaaaaaaaaaaaaaaaaaa

SEQ ID NO: 10001 - protein, 746 aa, Rattus norvegicus
  ref <308>: DATABASE ACCESSION NUMBER: SWISS-Prot / P36633
  ref <309>: DATABASE ENTRY DATE: 2002-06-15
MCLAFGWAAVILVLQTVDTASAVRTPYDKARVFADLSPQEIKAVHSFLMNREELGLQPSKEPTLAKNSVFLIEMLLPKKKHVLKFLDEGRKGPNREARAVIFFGAQDYPNVTEFAVGPLPRPYYIRALSPRPGHHLSWSSRPISTAEYDLLYHTLKRATMPLHQFFLDTTGFSFLGCDDRCLTFTDVAPRGVASGQRRSWFIVQRYVEGYFLHPTGLEILLDHGSTDVQDWRVEQLWYNGKFYNNPEELARKYAVGEVDTVVLEDPLPNGTEKPPLFSSYKPRGEFHTPVNVAGPHVVQPSGPRYKLEGNTVLYGGWSFSYRLRSSSGLQIFNVLFGGERVAYEVSVQEAVALYGGHTPAGMQTKYIDVGWGLGSVTHELAPGIDCPETATFLDAFHYYDSDGPVHYPHALCLFEMPTGVPLRRHFNSNFKGGFNFYAGLKGYVLVLRTTSTVYNYDYIWDFIFYSNGVMEAKMHATGYVHATFYTPEGLRHGTRLQTHLLGNIHTHLVHYRVDMDVAGTKNSFQTLTMKLENLTNPWSPSHSLVQPTLEQTQYSQEHQAAFRFGQTLPKYLLFSSPQKNCWGHRRSYRLQIHSMAEQVLPPGWQEERAVTWARYPLAVTKYRESERYSSSLYNQNDPWDPPVVFEEFLRNNENIEDEDLVAWVTVGFLHIPHSEDVPNTATPGNSVGFLLRPFNFFPEDPSLASRDTVIVWPQDKGLNRVQRWIPEDRRCLVSPPFSYNGTYKPV

SEQ ID NO: 10002 - DNA, 2473 bp, Homo sapiens
  ref <308>: DATABASE ACCESSION NUMBER: EMBL / U11863
  ref <309>: DATABASE ENTRY DATE: 1999-07-02
tcacagccctgccgggcaaaggctggaagcagagcgaactgggagcagagcacacagagccgtggagcgagagatgccggccctgggctgggccgtggctgccatcctgatgctgcagacggccatggcggagccctccccggggactctgcccaggaaggcaggggtgttttcagacctaagcaaccaagagctgaaggcagtgcacagcttcctctggtccaagaaggagctgaggctgcagccctccagtaccaccaccatggccaagaacaccgtgtttctcatcgagatgctgctgcccaagaagtaccatgtgctgaggtttctggataaaggtgaaaggcatcctgtgcgggaagcccgtgccgtcatcttctttggtgaccaggagcatcccaatgtcaccgagtttgctgtggggcccctgccagggccctgctacatgcgagcactgtcccccaggcctgggtaccagtcctcctgggcatcgaggcccatctccacagcagagtatgccctcctctaccacaccctgcaggaagccaccaagcccctgcatcagttcttcctcaataccacaggcttctcattccaagactgccatgacagatgcctggccttcaccgatgtggccccccggggtgtggcttctggccagcgccgcagttggcttatcatacagcgctatgtagaaggctactttctgcaccccactgggctggagctcctcgtggatcatgggagcacagatgctgggcactgggccgtggagcaggtgtggtacaacgggaagttctatgggagcccagaggaactggctcggaagtatgcagatggagaggtggacgtggtggtcctggaggacccgctgcctgggggcaaggggcatgacagcacagaggagccgcccctcttctcctcccacaagccccgcggggacttccccagccccatccatgtgagcggcccccgcttggtccagccccacggccctcgcttcaggctggagggcaacgctgtgctctacggcggctggagctttgccttccggctgcgctcctccttcgggctgcaggtcctgaacgtgcacttcggcggagagcgcattgcctatgaggtcagcgtgcaagaggcagtggcgctgtatggaggacacacacctgcaggcatgcagaccaagtacctcgatgtcggctggggcctgggcagcgtcactcatgagttagcccccggcatcgactgcccggagaccgccaccttcctggacactttccactactatgatgccgatgacccggtccattatccccgagccctctgcctctttgaaatgcccacaggggtgccccttcggcggcactttaattccaactttaaaggtggcttcaacttctatgcggggctgaagggccaggtgctggtgctgcggacaacttcaactgtctacaattatgattacatttgggactttatcttctaccccaacggggtgatggaggccaagatgcatgccactggctacgtccacgccaccttctacacccccgaggggctgcgccacggcactcgcctgcacacccacctgattggcaacatacacactcacttggtgcactaccgcgtagacctggatgtggcaggcaccaagaacagcttccagacactgcagatgaagctagaaaacatcaccaacccctggagcccgagacaccgcgtggtccagccaactctggagcagacgcagtactcctgggagcgccaggcggccttccgcttcaaaaggaagctgcctaagtacctgctctttaccagcccccaggagaacccctggggccacaagcgcagctaccgcctgcagatccactccatggccgaccaggtgctgcccccaggctggcaggaggagcaggccatcacctgggcaaggactgaggggggccagcccagggccctgagccaagctcgttcgcctgtgcctggcaggtaccccctggcagtgaccaagtaccgggagtcagagctgtgcagcagcagcatctaccaccagaacgacccctgggacccgcccgtggtctttgagcagtttcttcacaacaacgagaacattgaaaatgaggacctggtggcctgggtgacggtgggcttcctgcacatcccccactcagaggacattcccaacacagccacacctgggaactccgtgggcttcctgctccggccattcaacttcttcccagaggacccctccctggcatccagagacactgtgatcgtgtggcctcgggacaacggccccaactacgtccagcgctggatccctgaggacagggactgctcgatgcctcccccttttagctacaatgggacctatagacctgtgtgaccagcccccagttcctcccccagttcctcccaggaagcccaggagcctcactggggcagacaataaaccctcagagcctcaaaaaaa

SEQ ID NO: 10003 - protein, 751 aa, Homo sapiens
  ref <308>: DATABASE ACCESSION NUMBER: SWISS-Prot / P19801
  ref <309>: DATABASE ENTRY DATE: 2002-06-15
MPALGWAVAAILMLQTAMAEPSPGTLPRKAGVFSDLSNQELKAVHSFLWSKKELRLQPSSTTTMAKNTVFLIEMLLPKKYHVLRFLDKGERHPVREARAVIFFGDQEHPNVTEFAVGPLPGPCYMRALSPRPGYQSSWASRPISTAEYALLYHTLQEATKPLHQFFLNTTGFSFQDCHDRCLAFTDVAPRGVASGQRRSWLIIQRYVEGYFLHPTGLELLVDHGSTDAGHWAVEQVWYNGKFYGSPEELARKYADGEVDVVVLEDPLPGGKGHDSTEEPPLFSSHKPRGDFPSPIHVSGPRLVQPHGPRFRLEGNAVLYGGWSFAFRLRSSSGLQVLNVHFGGERIAYEVSVQEAVALYGGHTPAGMQTKYLDVGWGLGSVTHELAPGIDCPETATFLDTFHYYDADDPVHYPRALCLFEMPTGVPLRRHFNSNFKGGFNFYAGLKGQVLVLRTTSTVYNYDYIWDFIFYPNGVMEAKMHATGYVHATFYTPEGLRHGTRLHTHLIGNIHTHLVHYRVDLDVAGTKNSFQTLQMKLENITNPWSPRHRVVQPTLEQTQYSWERQAAFRFKRKLPKYLLFTSPQENPWGHKRSYRLQIHSMADQVLPPGWQEEQAITWARYPLAVTKYRESELCSSSIYHQNDPWHPPVVFEQFLHNNENIENEDLVAWVTVGFLHIPHSEDIPNTATPGNSVGFLLRPFNFFPEDPSLASRDTVIVWPRDNGPNYVQRWIPEDRDCSMPPPFSYNGTYRPV

SEQ ID NO: 10004 - DNA, 3765 bp, Rattus norvegicus
  ref <308>: DATABASE ACCESSION NUMBER: EMBL / X74226
  ref <309>: DATABASE ENTRY DATE: 1993-11-30
cctgacactaggagcacggggccgcaggactcggagtccttcgcccacactcggggagtctctggcacctcgcaagggcagcttcagtggcaggctaagcccagcctacagtctgggctctcttactggggcttcacctcgccagagcccccatgctcaaaggaagctttccagtggggacttgcgggtgcccatcccaagggagaggaaaaatagcatcacggagatcagcgacaatgaggacgatctcctggagtaccacaggcggcagcgccaagagcggctccgggagcaggagatggagaaggctggaacgccagcgcctggagaccatcctgaacctgtgtgctgagtacagccgagctgacgggggacctgagactggggaactgcccagtataggagaggccacggcagcactggctttggcaggcaggaggccctcaagaggcttggcaggagccatagtagtgtctggaaggagtggcgaggagtctggaggtgcctcgcagcgcctgtgggagagcatggagcgctctgatgaagagaatctcaaagaggagtgcagcagcacagagagcacccagcaggagcacgaagatgctcctagcacgaagctccaaggagaggtgctggctgtggaagaggagcgggctcaggttctggggcgcgtagagcagctgaaggtccgagtgaaggagctggaacagcagctgcaggaggcagcccgagaggctgaaatggagagagcactgctgcagggggagagggaggcggagcgagcattgctgcagaaggaacaaagagctatggaccagctgcaggagaagttggtggccttggagacaggcatccagaaggagagggacaaggaggcagacgctctagagactgagacaaagctctttgaggacctggagttccagcagctggagcgggagagtcgcgtggaggaggagcgggagttggccggccaagggctgcttcgcagcaaggctgagttgctgcgcagcgtgagcaagagaaaggagcgcctagctgtactggacagtcaggctgggcagatccgggcccaagcagtacaggagtcagagcgtctggcccgggaaaagaatgctgtcctgcagctactgcaaaaggagaaggagaagctgactgtgcttgagaggagatatcattcgctcacgggtggcaggccttttccgaagaccacctcaaccctcaaagaggtttaccgctccaagatgaatggtgacatggccagccccctgcccaggacccgtagtggccctctcccctcctcctcaggctcctcatcctcttcttcacagctcagcgtggctaccctgggccgtagtccttccccaaagagtgccctgctcgcccagaatggcaccagtagtctccctcgaaacctggcagccacgctgcaggacattgagaccaagcgccagctggccctacagcaaaaggtcgagttacctcctgccgagcccctctcacccgaagacccagcagggcaccaagtgatcgaggagcaacggcgacggctggctgagctgaagcagaaagcagcggcagaggctcagtgccagtgggatgccttgcatggtgcagccgcctttccagcaggcccgtctggcttccccacgctcatgcaccattctatcctgcaccacctgccagcaggcagggaacgtggagaggagggcgagcacgcttacgacaccctgagcctggagagttcggacagcatggagaccagcatctctacggggggcaactccgcctgttcccctgacaacatgtccagcgctagtggtctggacatgggcaagatagaggaaatggagaagatgctaaaggaagctcacgcggagaagagccggctcatggagtccagggagcgggagatggagctacggaggcaggccctggaggaggaacgtcggaggcgggagcaagtggagcggaggctgcagagtgagagcgcccgcaggcagcagctggtggagaaagaagtcaagctgagggagaagcagttttcccaggctcgacctctgacacgttatcttcccaaccggaaggaggactttgatttgaagacccacatagagtcgtcaggccatggggtggacacctgcctacatgtggtgcttagcagcaaggtctgccgtggctacttaatcaagatgggtggcaagattaaatcgtggaagaagcgctggtttgtctttgaccggctgaagcgcaccctttcctactatgtggacaaacacgagacgaagctgaagggggtcatctacttccaggccatcgaggaagtgtactatgaccacctgcgcagcgcagccaagagtccgaatccagccctcaccttctgtgtgaagacccatgaccggctgtactacatggtggccccatctgcagaggccatgcgcatctggatggatgtcatcgtcacgggagctgagggctacactcaattcatgaactaactaccaggcacctcctgggtcccccaggtcagccccaggacaccatgccctgccacttgctgctctgcttgtccctggagacagaggcacactgggcacgggccacaaagggtcaggatgtagttgagtaccccagggcttttgtgcaagaaaacgaaattgttctatgaggagtttggtgcttgggaatcaggctccggtccctaaagagccagcagagaggaaaggaagagggagaggccttgtcgcctcctgggagtccagaagtgcaggattccctcctgggtccagcaggctgaagaggcatagctgagctgtgactctcagctctgtcctggtacccacttagcccagcttactttctctctgtaaaggacaaattatggtaccagaatctgccaaagatcccctttctcatctcatcccctctacaggggtctggggggtcctgagcagagccacgtgtagaacaggggagaggctcaggcctgcacttcccgcccccggtctgcctccttctcctcccacctcccacttttcactacttagctcaaggaccagagacctcaagtgtcattctcgaggtccagccccgtaatcatgttacaagcccatcatccttgtctccatggtggctgcttcctcaccatggttacacactaattgccatggccactctgtggctctgcccactgcttcggctgtgggccacatgagggtacatgccacccatctctccaacccaggcctgggggcctgtcacatggtgggaggagatagagttcctcccggctgcagtgtgtctccagcccccagcccagccctctcccttttactgtgccttgcttagagccagaagggatgatgtccagagatccaagaccagagagcagcatcactgaggggagaggaagctaagaggtctgccctcccattctgacaggactagttcccaataaggaacgagggtggtagctcagagtgtctggaaagaagcctgagttgggagcagggcgggcagaagcagaggccctgagctgtggtaacctcccttcagtttcccaaaggtgacgggaaagaaggacagaggatcaagtctccagctggctggcctcagccttgcgccttaacactaagccaccttccctgccctccccagcactgggcccttggttgctgggcctggctgggtgttttgcagtatttgtaagcatttcagcagaacaataaaagcattttgactatgtaaaaaaaaaaaaaaaaaaaa

SEQ ID NO: 10005 - protein, 781 aa, Rattus norvegicus
  ref <308>: DATABASE ACCESSION NUMBER: SWISS-Prot / CAA52297
  ref <309>: DATABASE ENTRY DATE: 2003-02-01
MLKGSFPVGTCGCPSQGRGKIASRRSATMRTISWSTTGGSAKSGSGSRRWRRLERQRLETILNLCAEYSRADGGPETGELPSIGEATAALALAGRRPSRGLAGAIVVSGRSGEESGGASQRLWESMERSDEENLKEECSSTESTQQEHEDAPSTKLQGEVLAVEEERAQVLGRVEQLKVRVKELEQQLQEAAREAEMERALLQGEREAERALLQKEQRAMDQLQEKLVALETGIQKERDKEADALETETKLFEDLEFQQLERESRVEEERELAGQGLLRSKAELLRSVSKRKERLAVLDSQAGQIRAQAVQESERLAREKNAVLQLLQKEKEKLTVLERRYHSLTGGRPFPKTTSTLKEVYRSKMNGDMASPLPRTRSGPLPSSSGSSSSSSQLSVATLGRSPSPKSALLAQNGTSSLPRNLAATLQDIETKRQLALQQKVELPPAEPLSPEDPAGHQVIEEQRRRLAELKQKAAAEAQCQWDALHGAAAFPAGPSGFPTLMHHSILHHLPAGRERGEEGEHAYDTLSLESSDSMETSISTGGNSACSPDNMSSASGLDMGKIEEMEKMLKEAHAEKSRLMESREREMELRRQALEEERRRREQVERRLQSESARRQQLVEKEVKLREKQFSQARPLTRYLPNRKEDFDLKTHIESSGHGVDTCLHVVLSSKVCRGYLIKMGGKIKSWKKRWFVFDRLKRTLSYYVDKHETKLKGVIYFQAIEEVYYDHLRSAAKSPNPALTFCVKTHDRLYYMVAPSAEAMRIWMDVIVTGAEGYTQFMN

SEQ ID NO: 10006 - DNA, 5449 bp, Homo sapiens
  ref <308>: DATABASE ACCESSION NUMBER: EMBL / AB014538
  ref <309>: DATABASE ENTRY DATE: 2002-05-12
cccacgcgtccgaagcctgaggccaccgcgaccgagccgagccaggctaagggaccagtgtctccctgccccccccccacctctaggagctctggagccttaggaccatggacgctctcaataggaaccaaataggccctggatgccagacccagaccatggtgcagaaaggacccttggacctgatcgagacaggcaaagggctgaaagtgcaaacggacaaaccccacctggtgagcctgggcagtgggcgactcagcacagccatcaccctcctgccgctggaggaagggaggacggtgattggctctgcagccagagacatctcactacagggcccaggcctggctccagagcactgctacatcgagaacctgcggggcaccctcaccctctacccctgtggcaatgcctgcactattgatgggctccctgtccggcagcctacccggctcactcagggctgcatgttgtgcctgggtcagtccaccttccttcgctttaaccacccggctgaagccaagtggatgaaaagcatgattccagcagggggccgagcccctgggcccccctacagccctgttcctgcagaatcagaaagtctggtaaatgggaaccacaccccacagactgcaacacggggaccctctgcctgtgccagccacagttccctggtgagctctattgagaaggacctgcaagagatcatggactcactggtgctagaggagcctggagctgctggcaagaagcctgccgcaacctctccactgtcaccgatggctaatggtgggcgctacctgctgtctcccccaaccagccccggcgccatgtctgtgggctccagctatgagaacacctctccagccttctctccactctcttcaccagccagcagtggaagctgtgccagtcactcacccagtgggcaagagccaggaccttctgtgcccccgctggtacctgcccgttcctccagctaccatctggccctacagcccccacagtcccgcccaagtggtgctcgctccgagagtcctcggctgagcaggaaagggggccatgagaggcctcccagccctggcctccggggtctgctgacagacagccctgcagctactgtcttggcggaggcccggagagccactgagagcccccggctgggtgggcagctgcctgtggtggccatcagcctgagtgaatacccagcttctggtgctctcagtcaacccaccagcattcctggcagccccaagtttcagcctccagtccctgctccccgaaacaagattggcacactccaggaccgccctcccagccctttccgtgagcctccaggcagtgagcgggtgctaacaaccagcccctcacgccaactggtgggccgaacattttcagatgggttagccacccgtaccctgcagcctcctgagagtccccgcctgggccggcggggcctggacagtatgcgagaactaccccccttaagtccatctctgtcccggcgagctctctccccgctgcccacccggaccaccccagatcccaagctaaacagggaagtggcagagagtcctcggccccggcgctgggcagcccatggggcttcaccagaggacttctccctgacgctgggggcacggggccgtaggacacggagcccctcacccacactgggtgagtctctggcaccccacaagggcagcttcagtggcaggctgagcccagcctacagtctgggctctcttactggggcttcaccctgccagagtccctgtgtccagaggaagctctccagcggggacttgcgggtgcctgtcacaagggagcggaaaaatagcatcacagagatcagtgacaatgaggacgacctcctggagtaccaccggcgacagcgccaagagcggctccgggagcaggagatggagaggctggaacgccagcgcctggagaccatcctgaacctgtgtgccgaatacagccgggctgatgggggacctgaggctggggagcttcccagcattggggaggccaccgcagcattggcactggcaggccggaggccctcacgaggccttgcaggggcctctgggcggagcagcgaggagcctggcgttgccacccaacgcctatgggagagtatggagcgctcagatgaggaaaatctcaaggaggagtgcagcagcactgagagcacccagcaggagcacgaagatgcacctagcaccaagctccagggagaggtgctagccctggaagaagagcgggctcaggtgctggggcacgtggagcagctcaaggtccgtgtgaaggagctagagcagcagctgcaggagtcagcccgagaggccgaaatggagcgggcactgctgcagggagagagggaggcagagcgggcactgctgcagaaggagcagaaggcagtggatcagctgcaggagaagctggtggccttggagacaggcatccagaaggagagggacaaggaggcagaggccctggagactgagacaaagctctttgaggacttggagttccagcagttggagcgggagagccgcgtggaggaggagcgcgagctggccggccaggggctgctccggagcaaggctgagctgctccgcagcatcgccaagaggaaggagcgcctggccatcctggacagtcaggctgggcagatccgggctcaggccgtgcaggagtcagaacgcctggcccgggacaagaatgcctccttacagctgctgcaaaaggagaaggagaagctgactgtgctggaaaggagataccactcactcacagggggcaggcctttcccgaagaccacatcgaccctcaaagagatggagaagctgctgctccctgctgtagacttagagcagtggtaccaggagctgatggccgggctggggactggccccgctgcagcctcccctcactcttctcccccgcctctgcccgccaaagcttcccgtcagctgcaggtttaccgctccaagatggatggcgaggccaccagcccccttccccggacccgcagcggccccctcccctcctcctctggctcttcctcctcctcctcccagctcagcgtggctaccctggggcgtagcccctccccaaagagcgctctactcacccagaatggcacgggcagccttcctcgcaacctggcagccacactgcaggacatcgagaccaagcgccaactagctctgcagcagaagggacaacaagtgattgaagagcagcggcggcgactggctgagctgaagcagaaagcggcagctgaggcacagtgccagtgggatgcccttcacggggcagcacccttcccagcgggcccctcgggcttcccccctctcatgcaccactctatcctacaccacctgcctgcggggcgggagcgtggggaggagggtgagcacgcctatgatacgctgagtctggagagctctgacagcatggagaccagcatctccaccgggggcaactcggcctgctcccctgacaacatgtccagcgcgagtggtctggacatggggaagatcgaggagatggagaagatgctgaaagaggctcatgcagagaagaaccggctcatggagtcgagggagcgggagatggagctgcggcggcaggccctggaggaggagcggcggaggcgtgagcaggtagaacggaggctgcagagtgagagtgcccggaggcagcagctggtcgagaaggaggtcaagatgcgggagaaacaattttcccaggcacgacccctgacccgctacctgccaatccggaaggaggactttgacctgaagacacatattgagtcatcgggccatggtgttgatacctgcctgcacgtggtgctcagcagcaaggtctgccgtggctacttggtcaagatgggcggcaagattaaatcatggaagaagcgctggtttgtcttcgaccggctcaagcgcaccctttcctattatgtggacaagcatgagacgaagctgaagggagtcatctatttccaggccattgaggaagtgtactacgaccacctgcgcagtgcagccaagaagaggtttttccgcttcactatggtgactgagagcccgaacccagccctcaccttctgcgtaaagacccatgaccggctgtactacatggtggccccatctgcagaggccatgcgtatctggatggatgtcattgtcacaggggctgagggctacactcagttcatgaactaactgtcgtgggcctcctggcagagcacaactggggcttttgtataagaagactttaatattctgtaaggagcttggtcctgtgagtttctgggctctggcctcctgaagaaccagccagaagaagaaaagtagaggtggctttgctgcctcctgggagcccagaacttgcagtaaccctttagggtcctgccccaggcccagccagggctgaggagctgtcacagagagggcctcagctctgacctgacacctgctctccccagcctgttttctcttttctaaaagacaaattatggtaccataagctgccaaagatcccctcctgcctcagacccctttgccaggggctttgggggctgagcagagccacatccagagtggggtaatagctcaggcggcccgcttcccatttctcaaaccccgctctgccccattgttctcctttcccttatactttttattaccttgctcaagggccagagatctcaagtgtcaaccttgaggtcccagctccatcccctagttgcagactcatcaccatggttaccatagtgactgcttcattgccatggttacatactaattgctgcagctctgtggcccagcccactgcttcagctgtgggccatctgagggtacgtgccatcatctctccagcccaggcccctgggcatctcatgctggggggaagggactgaatacctttttccttccccctgcctgtgtcttcagccctgatgcacaggctgccagccccccagtccagccctctcccttccactggtgccttgcttagagccagaagggatgaagccgggggatctatggaacagaggaggagcgatgcagttgggagaggaagctagaagggttatggttggagttctgtacagtgttgagtttccgacagggaaagaggattcctccaatgcgcctagagagaaagcctgagcaggagatgatgcagcagaggggaagggccctgtggtgccgccgcccttccttcagcctccgaagggtgatggaaatggagagtggaggaccaggcctccagctgtctggcctcgcccttcacgccttaacactaagcccacctcccctgctctccttcccagcattgagcccttggttgcctgggcccaggctgggggttttcagtatttgtaagcatttcagcagaacaataaagcctttggactacggaagtg

SEQ ID NO: 10007 - protein, 402 aa, Homo sapiens
  ref <308>: DATABASE ACCESSION NUMBER: SWISS-Prot / BAB55164
  ref <309>: DATABASE ENTRY DATE: 2003-02-01
MDGEATSPLPRTRSGPLPSSSGSSSSSSQLSVATLGRSPSPKSALLTQNGTGSLPRNLAATLQDIETKRQLALQQKGQQVIEEQRRRLAELKQKAAAEAQCQWDALHGAAPFPAGPSGFPPLMHHSILHHLPAGRERGEEGEHAYDTLSLESSDSMETSISTGGNSACSPDNMSSASGLDMGKIEEMEKMLKEAHAEKNRLMESREREMELRRQALEEERRRREQVERRLQSESARRQQLVEKEVKMREKQFSQARPLTRYLPIRKEDFDLKTHIESSGHGVDTCLHVVLSSKVCRGYLVKMGGKIKSWKKRWFVFDRLKRTLSYYVDKHETKLKGVIYFQAIEEVYYDHLRSAAKSPNPALTFCVKTHDRLYYMVAPSAEAMRIWMDVIVTGAEGYTQFMN

SEQ ID NO: 10008 - DNA, 1401 bp, Rattus norvegicus
  ref <308>: DATABASE ACCESSION NUMBER: EMBL / X74402
  ref <309>: DATABASE ENTRY DATE: 1994-08-09
aagagcgggcgctggtaccaaggcctgaccatggatgaggaatacgatgtgattgtgctggggacaggtcttaccgaatgcatcctgtctggcatcatgtctgtgaatggaaagaaggtgttgcacatggaccgaaacccctactatgggggtgagagctcttctatcacaccccttgaggagctatataagcgctttcagttgctggaagggccccctgaatcaatgggccggggccgagactggaatgttgacttgatccccaaattcctcatggccaatggtcagctggtaaagatgctactgtatacagaagtgactcgttatctggacttcaaggtggtagagggcagctttgtatacaaagggggcaagatctacaaagtgccatctactgagactgaggccttggcttctaatctgatgggcatgtttgaaaaacgacgcttccgaaaatttttggtgtttgtggcaaactttgatgagaatgaccccaaaacctttgagggtgttgacccgcagaccaccagcatgcgtgatgtctaccggaagtttgacctgggccaagatgtcattgatttcactggccatgccctggcgctctaccgcactgatgattacctggttcagccatgtcttgagactattaaccgcatcaagttgtacagtgagtccctggcccggtatggcaagagcccatatttgtacccactctatggcctgggtgagctgcctcagggctttgccagattgagtgccatctatgggggaacatacatgctgaacaaaccagtggatgacatcatcatggaaaatggcaaggtggtgggtgtaaaatctgagggagaggtggcccgctgcaagcagctgatctgtgatcccagctacatcccagaccgtgtgcgaaaggctggccaggttattcgcatcatctgcatcctcagccaccccatcaagaataccaatgatgccaattcctgccaaattatcatccctcagaatcaggtcaacaggaagtcagacatctatgtgtgcatgatctcctatgcacacaacgtggccgcacaaggcaaatacatcgccattgccagcaccaccgtagagactgcagaaccagaaaaggaggttgagcctgcattggagctgttggaacctattgaccaaaagtttgtggctatcagtgatttatatgagcccattgatgacggttcagagagtcaggtgttctgttcctgctcctatgatgctaccacacactttgagacaacctgcaatgacatcaaagatatctacaaacgcatggctggttctgcctttgattttgagaacatgaagcgcaaacagaatgatgtctttggagaagccgatcagtgattgctgactcccctcctccagcccctg

SEQ ID NO: 10009 - protein, 447 aa, Rattus norvegicus
  ref <308>: DATABASE ACCESSION NUMBER: SWISS-Prot / P50398
  ref <309>: DATABASE ENTRY DATE: 2001-10-16
MDEEYDVIVLGTGLTECILSGIMSVNGKKVLHMDRNPYYGGESSSITPLEELYKRFQLLEGPPESMGRGRDWNVDLIPKFLMANGQLVKMLLYTEVTRYLDFKVVEGSFVYKGGKIYKVPSTETEALASNLMGMFEKRRFRKFLVFVANFDENDPKTFEGVDPQTTSMRDVYRKFDLGQDVIDFTGHALALYRTDDYLDQPCLETINRIKLYSESLARYGKSPYLYPLYGLGELPQGFARLSAIYGGTYMLNKPVDDIIMENGKVVGVKSEGEVARCKQLICDPSYIPDRVRKAGQVIRIICILSHPIKNTNDANSCQIIIPQNQVNRKSDIYVCMISYAHNVAAQGKYIAIASTTVETAEPEKEVEPALELLEPIDQKFVAISDLYEPIDDGSESQVFCSCSYDATTHFETTCNDIKDIYKRMAGSAFDFENMKRKQNDVFGEADQ

SEQ ID NO: 10010 - DNA, 2225 bp, Homo sapiens
  ref <308>: DATABASE ACCESSION NUMBER: EMBL / X79353
  ref <309>: DATABASE ENTRY DATE: 1995-03-02
cggcggcggcggtggcggcggcgactgctgcggtgaaggaggaggaggagccgagcgggcgctggcaccgaggcctgaccatggacgaggaatacgatgtgatcgtgctggggaccggtctcaccgaatgcatcctgtcgggcatcatgtctgtgaacgggaagaaggtgctgcacatggaccggaacccctactacgggggcgagagctcctccatcacacccctggaggagctgtataagcgttttcagttgctggaggggccccctgagtcgatgggccgaggccgagactggaatgttgacctgattcccaaattcctcatggctaacgggcagctggtaaagatgctactgtatacagaggtgactcgctacctggacttcaaggtggtggagggcagctttgtctacaaggggggcaagatctacaaagtgccgtccactgagactgaggccttggcttccaatctgatgggcatgtttgagaaacggcgcttccgcaagttcctggtgtttgtggcaaacttcgatgagaatgaccccaagacctttgagggcgttgacccccagactaccagcatgcgtgacgtctaccggaagtttgatctgggccaggatgtcatcgatttcactggccatgccctggcgctctaccgcactgatgactacctggaccagccctgccttgagaccgtcaaccgcatcaagttgtacagtgagtccctggcccggtatggcaagagcccatatttatacccgctctacggcttgggcgagctgccccagggttttgcaagattgagtgccatctatggggggacatatatgctgaacaaacctgtggatgacatcatcatggagaacggcaaggtggtgggcgtgaagtctgagggagaggtggcccgctgcaagcagctgatctgtgaccccagctacatcccggaccgtgtgcggaaggctggccaggttatccgcatcatctgtatccttagccaccccatcaagaacaccaacgacgccaactcctgccaaataatcatcccccagaaccaggtcaacaggaagtcagacatctacgtgtgcatgatctcctatgcacacaacgtggcggcccagggcaagtacatagctattgccagcactactgtggagaccacggaccctgaaaaggaggtggagccggctctggagctgttggagcccattgaccagaagtttgtggctatcagtgacttgtatgagcccattgatgatggttgtgagagccaggtgttctgttcctgctcctacgatgccaccacacactttgagacaacctgcaacgacatcaaagacatctacaaacgcatggctggcacggcctttgactttgagaacatgaagcgcaaacagaacgacgtctttggagaagctgagcagtgattgtggccgcccccagcccctgctgccccagcctgtgtctgttctcctcgagggctccagcatcctctgcttcccccaccacgttcccatcacccacctcattgatccactgaccaaatccttaaccctagcgatggcttgggagatggggggttggatagcatcctctttcttggcccttccttatcctaggaaaagagggttcctctccttgtgtgtgtctcttccccccacccctaattcttctgctctgtttgggaagacgtggaggaaaaggtgacttctgcccccaccgctcttacccccactgtagtggcctttggagatgcccccacctcccccccaccaactctcgcgtgttggagagaaggggccctcccagcacaaagttgcattcctccccccctaatttattctaatttattaactttgacccaccctttctgagcctgcagccttcccgtgtggcctgagggctgtcgagtgagctgccccagccccctcccagcccttgcccagcctgggggagtggggaaggcttgggcatggccccgttggaggttgatttgctgttttgtttcttgtctttgtgttctgtggtacttgctgagagaaaagaaaagtgagccaagcagaaggaggtggaaaacggacccaaaccccagtgtgccctgccccatgcctttcctttagtggtgggaaacccttatcttgcaaagtgaatgtgtccccttccccaccctctagtgtatttcacagaaaacaaaacctcccaataaaacggttgaaacctgaaaaaaa

SEQ ID NO: 10011 - protein, 447 aa, Homo sapiens [sequence omitted]

SEQ ID NO: 10012 - DNA, 2277 bp, Rattus norvegicus
  ref <308>: DATABASE ACCESSION NUMBER: EMBL / X74593
  ref <309>: DATABASE ENTRY DATE: 1994-01-26
ccaccagcgacagaatttactattggaagcagtttgagaaagctcaggtgttggccatggtcttctccagcagagtcttttttttttcacgtgtccccttactccagacccttggcggtttgacgagcagaaacaccagctccccgccggatccagccgacacctcaaagcaagagagcgacatggcagctcctgctaagggcgagaacctgtccctggtggtgcacggacctggagacattcgcctggagaactacccaatccctgagctgggcccaaatgatgtgttactaaagatgcattcggtggggatctgtggctcggatgttcactactgggagcatggccgaattggggacttcgttgtgaaaaagccaatggtgcttgggcatgaagctgctggaacagtcacaaaagtgggaccgatggtgaaacatctaaaaccaggagatcgggtggccatcgagcctggcgttccccgagaaatagatgaattctgcaagatcggccgatacaatctgacgccatccatcttcttctgtgccacgcccccagatgatgggaacctctgccgcttctacaagcacagcgctgacttctgctacaagcttcctgatagtgtcacctttgaagaaggggccctgattgagcctctctctgtggggatctatgcctgccgtcgaggttcggtttccctggggaacaaggtccttgtgtgtggagctgggccaattgggatagtcactttgcttgtggccaaagcaatgggagcttctcaagtagtggtgattgacctctctgcttctcggttagccaaggccaaggaagttggagcagactttaccatccaggttgccaaagagacccctcacgacattgccaagaaggtggaaagtgtgctggggagcaagccagaggtcaccatcgaatgcacgggagcggagtcctctgtccagacgggcatctatgccactcactctggcgggaccttggtggttgtgggaatgggccccgagatgatcaatttacccctagtgcacgcagctgtgcgggaggtggacatcaaaggcgtgtttcgatactgcaacacgtggccgatggcagtttccatgcttgcatcgaagactttgaatgtaaagcccttagtgacccataggttccccctggagaaggctgtagaagcctttgaaacagccaaaaagggactggggctgaaagttatgatcaagtgtgaccccaatgaccagaacccctaaatgtgattgctctatgcccttagcccactctctcagcatctaagggctaaatggaccagaaggggaagccattaatgcagaaccttctttttgaatggtaggaataataaactcataagccgagagccttagaggagctggcgtgccttaaagacagaagtaggggcaccttgggggacctcgtagccagaatgagatgcgtatactgagtaaagtctagaaccaagagtctggcagagaggtcccggaaatgccctttctcagtaccttctttgggtgaggagacgaagcatccttcgtccatgttccaatgtgggtgccagagagtggggctaacatggagaaatgacgtcattaacatgggagtggccccagagctgttcagagcacagtgtttcccaagtgtcatttgatttgaggggaataagggcactcagctctgcctcagctcagaattctgtccttacatttgcaaagtggaggccttcttcccaacagtgctcattcatgttcaggagcagtatcgttgctaagcaaccaggagtcttccacccaaagatcctaaatccagcctaactcatacaagagggccacaggagggcttgagtttcccactcacaggattcgcctcctctcccaggctcactcctaggcaattattatcccatcccactcagaagatgctccccttctcggctgttaaggctagtgatatctgatggatgggtatcacagagcctaattaaattatggggcttttctttataagatctgggtccaaatcatgccctttgtgatcttaagataatcaagaagagcacagtaactgtggtgtaacttgggctgcagtctgtaatccacctcttcagctatgagtaggggacacgtgaaaaaaaaaagactctgctggagaagaccatggccaacacctgagctttctcaaactgcttccaatagtaaattctgtcgctggtgttgaaaaaaaaaaaaaaaaaaaaaaaaaaaaaaaaaaaaaaaaaag

SEQ ID NO: 10013 - protein, 399 aa, Rattus norvegicus; identical to SEQ ID NO: 6648
  ref <308>: DATABASE ACCESSION NUMBER: SWISS-Prot / P27867
  ref <309>: DATABASE ENTRY DATE: 2002-06-15

SEQ ID NO: 10014 - DNA, 2519 bp, Homo sapiens; identical to SEQ ID NO: 6649
  ref <308>: DATABASE ACCESSION NUMBER: EMBL / L29008
  ref <309>: DATABASE ENTRY DATE: 1999-07-02

SEQ ID NO: 10015 - protein, 356 aa, Homo sapiens; identical to SEQ ID NO: 6650
  ref <308>: DATABASE ACCESSION NUMBER: SWISS-Prot / Q00796
  ref <309>: DATABASE ENTRY DATE: 2002-06-15

SEQ ID NO: 10016 - DNA, 3810 bp, Rattus norvegicus
  ref <308>: DATABASE ACCESSION NUMBER: EMBL / X74800
  ref <309>: DATABASE ENTRY DATE: 1993-09-22
gatagactcgagcggaatcgacgccggaggtcccaaggcccactcccacccagcctggccaggccggctacagtgggatccaggggtcgagactccgatccccctaagccaaagggcctgcaaggggcagtgcgggggggggggctagcccctccctcggtgaccgtgcgccggagcactgattaacgcgggcacggagcagggcaccaggtcgcaggatgcgctaccgggcgtcggccctgggcagtgacggggtacgagtgaccatggagagcgccttgactgcccgagaccgggtgggggtgcaagactttgttctgctggagaacttcaccagtgaggctgccttcattgagaacctccggcgtcgattccgggagaacctcatttatacctacattggccctgtcctggtctctgtcaacccctaccgggacctacagatctacacacggcaacatatggaacgctaccgtggcgtcagtttctatgaagtgccgcctcatctgtttgcagtggctgacactgtataccgggcgcttcgtactgagcgtcgggaccaagcagtgatgatttctggagagagtggggcagggaagacagaggccaccaagagattgctccagttctatgcagagacctgcccagcccctgaaaggggtggcgcagtgcgagaccgcctgttgcagagcaaccctgtgctggaggcctttgggaatgccaagactctccgcaacgacaactccagccgctttgggaagtacatggatgtgcagtttgacttcaagggtgcccctgtgggaggccacattctcagttacctcctggagaagtctcgagtggtacaccagaatcacggagaacggaacttccacgtcttttaccagctcctggaggggggggaggaggaggctcttcgtcgtctgggcttggaacggaacccccagagctacttgtacctggtgaagggccagtgtgccaaggtctcctccatcaatgacaagagtgactggaaggttgtgaggaaggcgctgtcagtcattgacttcactgaggatgaagtggaggacttgctaagcatcgtggccagcgtcctacatctgggcaatatccactttgctgctgatgaggacagcaatgcccaggttactactgagaaccagctcaaatatctgaccaggctccttggtgtggaaggcacaacactgagggaagccctgacccacaggaagatcatcgccaagggggaagagctcctgagcccactgaaccttgaacaggctgcatatgcaagggatgctcttgccaaggctgtgtacagccgcactttcacctggttggtcagaaagatcaataggtctctggcctctaaggacgctgagagccccagctggcgaagcaccacagttcttgggctcctggacatttatggcttcgaagtgtttcagcataacagcttcgagcagttctgcatcaactattgcaatgagaagctgcagcagctcttcattgagctgactctcaagtccgagcaggaggaatacgaggcagagggcatcgcgtgggaacctgtccaatacttcaacaacaagatcatctgtgacctggtggaggagaaattcaagggcatcatctccatcttggatgaagagtgcctgcgtcctggggaggccacagacctgaccttcctggagaagctggaggacacaatcaagcaccaccctcacttcctgacgcacaagcttgctgaccagaagaccaggaaatccctcgaccgaggggagttccgccttcttcattatgcgggagaggtgacctacagcgtgactgggtttctggataaaaacaatgacctcctcttccggaacctgaaggagaccatgtgcagctccacgaaccccatcatggcccagtgctttgacaagagtgagctcagtgacaagaagcggccagagacggtggccacccagttcaagatgagcctcttgcagctagtggagatcctgaggtctaaggaacctgcttatatccggtgcatcaagccaaatgacgccaaacagccgggtcgctttgatgaggtgctcatccgacaccaagtgaagtacctgggacttatggagaatctgcgtgtgcgcagagctggctttgcctaccgtcgaaaatatgaggctttcctgcagaggtacaagtcactgtgcccagagacatggcccgtgtggacaggacggccccaggatggggtggctgtgttggtcagacaccttggctataagccagaagagtacaaaatgggcaggactaagatcttcatccgattccccaagaccttgtttgccacagaggactccctggaagtccgacggcagagtctagccaccaagatccaggcggcgtggaggggctttcattggcggcagaaatttctccgggtgaagcgatcagccatctgtatccagtcctggtggcgcggtacactgggccggaggaaggcagccaaaaggaagtgggcagcccagactatccgtagactcatccgtggcttcattttgcgtcatgcaccccggtgccctgagaatgccttcttcctggaccacgtgcgcacgtcatttttgcttaacctgaggcgacaactaccccggaatgttctggacacctcctggcccacacccccacctgccctgagagaggcctcggagctgctccgggagctatgcatgaagaacatggtgtggaaatactgccggagtatcagccctgagtggaagcagcagctgcagcaaaaggcggtggctagtgaaattttcaagggcaagaaggacaattacccccagagtgtccccagacttttcatcagcacacggcttggcacagaggagatcagccccagagtgcttcaggccttgggctctgaacccatccagtatgcagtgcctgtggtaaaatacgaccgtaagggctacaagcctcgttcccggcagctgctgctcacacccagtgctgtggtcatcgtggaggatgccaaagtcaagcagagaattgattatgccaacctaactggaatctccgtcagtagcctgagtgatagcctgtttgtgcttcacgtgcagcgtgaagacagcaagcagaagggagatgtggtactgcagagcgatcatgtgatcgagacactaaccaagacggccctcagtgctgaccgtgtgaataatatcaacatcaaccagggcagcatcacgtttgcagggggtccaggcagggatggcatcatcgacttcacatctggctcagagcttctcatcaccaaggctaagaatggccacctggctgtggtggccccacggctgaattctcggtgatgaaggtgccggtggacccctcctgactcctgatgctttgcttagtcccctcctcccctcccagttaccaaagactcaagcttccagacagggatccagggacaccctcaaagcccacctgcagactcctgccccctgctcatcctctcttgaggtgatcaggaaccagggagcttccccaggagtgggccaggccgggccaagcaatagaaaagcagaggtctgagcaggccaggccagccctctgctgatgccaaatatctaagagaagggaattttaactgaggttttctctgagactttttgatgctttataggaaactatttttttaaaaaagtcattttcctatcctaaacacactggatgtgttttccctgactcaaacaggacaaggaatgtagctgaaagactgactgggctggctgaggccccccctctctgccaagcctctcctca

SEQ ID NO: 10017 - protein, 1028 aa, Rattus norvegicus
  ref <308>: DATABASE ACCESSION NUMBER: SWISS-Prot / CAA52807
  ref <309>: DATABASE ENTRY DATE: 2002-06-01
MESALTARDRVGVQDFVLLENFTSEAAFIENLRRRFRENLIYTYIGPVLVSVNPYRDLQIYTRQHMERYRGVSFYEVPPHLFAVADTVYRALRTERRDQAVMISGESGAGKTEATKRLLQFYAETCPAPERGGAVRDRLLQSNPVLEAFGNAKTLRNDNSSRFGKYMDVQFDFKGAPVGGHILSYLLEKSRVVHQNHGERNFHVFYQLLEGGEEEALRRLGLERNPQSYLYLVKGQCAKVSSINDKSDWKVVRKALSVIDFTEDEVEDLLSIVASVLHLGNIHFAADEDSNAQVTTENQLKYLTRLLGVEGTTLREALTHRKIIAKGEELLSPLNLEQAAYARDALAKAVYSRTFTWLVRKINRSLASKDAESPSWRSTTVLGLLDIYGFEVFQHNSFEQFCINYCNEKLQQLFIELTLKSEQEEYEAEGIAWEPVQYFNNKIICDLVEEKFKGIISILDEECLRPGEATDLTFLEKLEDTIKHHPHFLTHKLADQKTRKSLDRGEFRLLHYAGEVTYSVTGFLDKNNDLLFRNLKETMCSSTNPIMAQCFDKSELSDKKRPETVATQFKMSLLQLVEILRSKEPAYIRCIKPNDAKQPGRFDEVLIRHQVKYLGLMENLRVRRAGFAYRRKYEAFLQRYKSLCPETWPVWTGRPQDGVAVLVRHLGYKPEEYKMGRTKIFIRFPKTLFATEDSLEVRRQSLATKIQAAWRGFHWRQKFLRVKRSAICIQSWWRGTLGRRKAAKRKWAAQTIRRLIRGFILRHAPRCPENAFFLDHVRTSFLLNLRRQLPRNVLDTSWPTPPPALREASELLRELCMKNMVWKYCRSISPEWKQQLQQKAVASEIFKGKKDNYPQSVPRLFISTRLGTEEISPRVLQALGSEPIQYAVPVVKYDRKGYKPRSRQLLLTPSAVVIVEDAKVKQRIDYANLTGISVSSLSDSLFVLHVQREDSKQKGDVVLQSDHVIETLTKTALSADRVNNININQGSITFAGGPGRDGIIDFTSGSELLITKAKNGHLAVVAPRLNSR

SEQ ID NO: 10018 - DNA, 3384 bp, Homo sapiens
  ref <308>: DATABASE ACCESSION NUMBER: EMBL / X98507
  ref <309>: DATABASE ENTRY DATE: 2001-06-25
tccaagctgaattcgcggccgcgtcgaccacgccggccctgggcagtgacggggttcgggtgaccatggacagtgcgctcaccgcccgtgacagggtgggggtgcaggatttcgtgctgctggagaacttcaccagcgaggccgccttcatcgagaacctacggcggcgatttcgggagaatctcatctacacctacattggccccgtcctggtctctgtcaatccctaccgggacctgcagatctacagccggcaacatatggagcgttaccgtggcgtcagcttctatgaagtgccccctcacctgtttgccgtggcggacactgtgtaccgagcactgcgcacggagcgtcgggaccaggctgtgatgatctctggggagagcggggcaggcaagaccgaagccaccaagaagctgctgcagttctatgcagagacctgcccagccccccaacgcggaggtgccgtgcgggaccggctgctacagagcaacccggtgctggaggcctttggaaatgccaagaccctccggaacgataactccagcaggttcgggaagtacatggatgtgcagtttgacttcaagggtgcccccgtgggtggccacatcctcagttacctcctggaaaagtcacgagtggtgcaccagaatcatggggagcggaacttccacatcttctaccagctgctggaggggggcgaggaagaaactcttcgcaggctgggcttggaacggaacccccagagctacctgtacctggtgaagggccagtgtgccaaagtctcctccatcaacgacaagagtgactggaaggtcgtcaggaaggctctgacagtcattgatttcaccgaggatgaagtggaggacctgctaagcatcgtggccagcgtccttcatttgggcaacatccactttgctgccaacgaggacagcaatgcccaggtcaccaccgagaaccagctcaagtatctgaccaggctcctcagcgtggaaggctcgacgctgcgagaagccctgacacacaggaagatcatcgccaagggggaagagctcctgagcccgctgaacctggaacaggccgcgtacgcacgaaacgccctcgccaaggctgtgtacagccgcacttttacctggctcgtcgggaaaatcaacaggtcgctggcctccaaggacgtggagagccccagctggcggagcaccacggttctcgggctcctggatatttatggcttcgaagtgtttcagcataacagctttgagcagttctgcatcaattactgcaacgaaaagctgcagcagctcttcatcgaactcccgctcaagtcggagcaggaggaatacgaggcagagggcatcgcgtgggaacccgtccagtatttcaacaacaaaatcatctgtgatctggtggaggagaagtttaagggcatcatctcgattttggatgaggagtgtctgcgcccgggggaggccacagacctgaccttcctggagaagctggaggatactgtcaagcaccatccacacttcctgacgcacaagctggctgaccagaggaccaggaaatctctgggccgaggggaattccgccttctgcactatgcgggggaggtgacctacagcgtgaccgggtttctggacaaaaacaatgaccttctcttccggaaccttaaggagaccatgtgtagctcaaagaatcccattatgagccagtgcttcgaccggagcgagctcagtgacaagaagcggccagagacggtcgccacccagttcaagatgagcctcctgcagctggtggagatcctgcagtctaaggagcccgcctacgtccgctgcatcaaacccaatgatgccaaacagcccggccgctttgacgaggtgctgatccgccaccaggtgaagtacctggggctgttggaaaacctgcgtgtgcgcagagctggctttgcctatcgccgcaaatacgaagctttcctgcaaaggtacaagtcactgtgcccagagacgtggcccacgtgggcaggacggccgcaggatggggtggctgtgctggtccgacacctgggctacaagccagaagagtacaagatgggcaggaccaagatcttcatccgcttccccaagaccctgtttgccacagaggatgccctggaggtccggcggcagagcctggccacaaagatccaagctgcctggaggggctttcactggcggcagaaattcctccgggtgaagagatcagccatctgcatccagtcgtggtggcgtggaacactgggccggaggaaggcagccaagaggaagtgggcggcacagaccatccggcggctcatccgaggcttcatcctgcgccacgccccccgctgccccgagaacgccttcttcttggaccatgtgcgcacgtcttttttgctaaacctgaggcggcagctgccccggaatgtcctggacacctactggcccacgcccccacctgccctgcgagaggcctcagagcttctgcgggagttgtgcataaagaacatggtgtggaaatactgccggagtatcagccctgagtggaagcagcagctgcagcagaaggccgtggctagtgagatcttcaagggcaagaaggataattaccctcagagtgtacccaggctcttcatcagcactcggcttggtacagatgagatcagcccccgagtgctgcaggccttgggctctgagcccattcagtatgcggtgcctgttgtgaaatacgaccgcaagggctacaagcctcgctcccggcagctgctgctcacgcccaacgccgtcgtcatcgtggaggacgccaaagtcaagcagaggattgattacgccaacctgaccggaatctctgtcagcagcctgagcgacagtctttttgtgcttcatgtacagcgtgcggacataaagcaaaagggagatgtggtgctgcagagtgaccacgtgattgagacgctgaccaagacagccctcagtgccaaccgcgtgaacagcatcaacatcaaccagggcagcataacgtttgcagggggccccggcagggatggcaccattgacttcacacccggctcggagctgctcatcaccaaggccaagaacgggcacctggctgtggtcgccccacggctgaattatcggtgataaaggcgcccactggaccatcccaacgcccaaagctttgcttttctcctcctccccttcccagttaccaaagagtcgaatttccagacagggacccagggacaccccgaagcccacctgcaatttcccacctcctgcccatccctttcttgagggagcagcaggggccaggagctaccccaggagtgggccaggccgggccacagcaataggaaagccagggccagagcga

SEQ ID NO: 10019 - protein, 1028 aa, Homo sapiens
  ref <308>: DATABASE ACCESSION NUMBER: SWISS-Prot / O00159
  ref <309>: DATABASE ENTRY DATE: 2001-10-16
MDSALTARDRVGVQDFVLLENFTSEAAFIENLRRRFRENLIYTYIGPVLVSVNPYRDLQIYSRQHMERYRGVSFYEVPPHLFAVADTVYRALRTERRDQAVMISGESGAGKTEATKKLLQFYAETCPAPQRGGAVRDRLLQSNPVLEAFGNAKTLRNDNSSRFGKYMDVQFDFKGAPVGGHILSYLLEKSRVVHQNHGERNFHIFYQLLEGGEEETLRRLGLERNPQSYLYLVKGQCAKVSSINDKSDWKVVRKALTVIDFTEDEVEDLLSIVASVLHLGNIHFAANEDSNAQVTTENQLKYLTRLLSVEGSTLREALTHRKIIAKGEELLSPLNLEQAAYARNALAKAVYSRTFTWLVGKINRSLASKDVESPSWRSTTVLGLLDIYGFEVFQHNSFEQFCINYCNEKLQQLFIELPLKSEQEEYEAEGIAWEPVQYFNNKIICDLVEEKFKGIISILDEECLRPGEATDLTFLEKLEDTVKHHPHFLTHKLADQRTRKSLGRGEFRLLHYAGEVTYSVTGFLDKNNDLLFRNLKETMCSSKNPIMSQCFDRSELSDKKRPETVATQFKMSLLQLVEILQSKEPAYVRCIKPNDAKQPGRFDEVLIRHQVKYLGLLENLRVRRAGFAYRRKYEAFLQRYKSLCPETWPTWAGRPQDGVAVLVRHLGYKPEEYKMGRTKIFIRFPKTLFATEDALEVRRQSLATKIQAAWRGFHWRQKFLRVKRSAICIQSWWRGTLGRRKAAKRKWAAQTIRRLIRGFILRHAPRCPENAFFLDHVRTSFLLNLRRQLPRNVLDTYWPTPPPALREASELLRELCIKNMVWKYCRSISPEWKQQLQQKAVASEIFKGKKDNYPQSVPRLFISTRLGTDEISPRVLQALGSEPIQYAVPVVKYDRKGYKPRSRQLLLTPNAVVIVEDAKVKQRIDYANLTGISVSSLSDSLFVLHVQRADIKQKGDVVLQSDHVIETLTKTALSANRVNSININQGSITFAGGPGRDGTIDFTPGSELLITKAKNGHLAVVAPRLNYR

SEQ ID NO: 10020 - DNA, 1832 bp, Rattus norvegicus
  ref <308>: DATABASE ACCESSION NUMBER: EMBL / X74834
  ref <309>: DATABASE ENTRY DATE: 1999-09-14
ctggtggggcctgatagagctggcagggttggctgggaggggcgtgtaggctgacacaggacactccaaccccccaaccccaagacctgtaaagctactgtcctactcatcactgggcagaactgaggcaccatgcacgggggccagggacctcagctcctcttgctgctgctggctacctgcctgggggcccagagccgcaaccaagaggagcggctgcttgcggacctgatgcgcaactacgacccccatctgcggccggctgagcgtgactcagatgtggttaatgtcagcctgaagcttaccttaaccaacctcatctcccttaatgagcgagaggaggccctcacgactaatgtctggatagaaatgcaatggtgcgactatcgcctacgctgggacccgaaagactacgaaggcctgtggatattgagggtgccatctaccatggtctggcagcccgatatcgtgctgggaaacaatgtggacggtgtcttcgaggtggcgctctactgcaatgtgctcgtgtcccctgatggttgtatctactggctgccgcctgccatcttccgctcctcctgctccatctctgtcacctacttccccttcgattggcagaactgctccctcgtcttccagtcccagacttacagcaccagcgagatcaacttgcagctgagccaggaggatgggcaagccattgagtggatcttcattgaccccgaggctttcacagagaatggggaatgggccatccggcatcgaccagccaaaatgctactggatcctgtgactccagcagaggaggcaggccaccagaaggtggtgttctacctgctcatccaacgcaagcccctcttctatgtcatcaacatcatcgtcccctgtgtgctcatctcctcagttgcgatcctcatctacttccttcctgccaaggcgggcggccagaagtgcacagtggccaccaacgtgctcctggcccagaccgtcttccttttcctcgtggctaagaaggtgcctgagacctcccaggcagtgccgctcatcagcaagtacctgaccttcctcatggtggtgaccatcctcatcgttgtgaactctgtggtcgtgctcaatgtgtccttgaggtccccacacacacactccatggcccggggggtccgcaaggtgtttttgaggctcctgccccagctgttacggatgcatgtgcatcctcgggctcctgctgctgtccaggatgcccggctgcgactccagaatggctcttcctcagggtggcccatcatgactcgagaggaaggggacctctgtttgcctcgaagcgaactcctctttaggcaaaggcagcgcaatggattggtgcaggcagtactggagaagttagagaatggtccagaaatgaggcagagccaggagttctgtggcagcctgaagcaagcctccccggccatccaggcctgtgtggatgcctgtaacctcatggcgcgtgcccgacaccagcaaagtcactttgacagtgggaatgaggagtggttgctggtgggccgagtgctggaccgagtctgtttcctagccatgctctccctcttcatctgcggcactgctggcatcttcctcatggcccactacaaccaggtgcctgacctgccattccctggagacccccgcccctacttgcctttgccagactgagccaaccaatcactcctgcgccctggagtcagccatgtgggtcatgctgtttatggagctgtattctctgttgatcctgatgggctcctggggagcaatcattcttgggagaagatagaggaataaaggaataggaataa

SEQ ID NO: 10021 - protein, 519 aa, Rattus norvegicus
  ref <308>: DATABASE ACCESSION NUMBER: SWISS-Prot / P18916
  ref <309>: DATABASE ENTRY DATE: 2002-06-15
MHGGQGPQLLLLLLATCLGAQSRNQEERLLADLMRNYDPHLRPAERDSDVVNVSLKLTLTNLISLNEREEALTTNVWIEMQWCDYRLRWDPKDYEGLWILRVPSTMVWQPDIVLGNNVDGVFEVALYCNVLVSPDGCIYWLPPAIFRSSCSISVTYFPFDWQNCSLVFQSQTYSTSEINLQLSQEDGQAIEWIFIDPEAFTENGEWAIRHRPAKMLLDPVTPAEEAGHQKVVFYLLIQRKPLFYVINIIVPCVLISSVAILIYFLPAKAGGQKCTVATNVLLAQTVFLFLVAKKVPETSQAVPLISKYLTFLMVVTILIVVNSVVVLNVSLRSPHTHSMARGVRKVFLRLLPQLLRMHVHPRAPAAVQDARLRLQNGSSSGWPIMTREEGDLCLPRSELLFRQRQRNGLVQAVLEKLENGPEMRQSQEFCGSLKQASPAIQACVDACNLMARARHQQSHFDSGNEEWLLVGRVLDRVCFLAMLSLFICGTAGIFLMAHYNQVPDLPFPGDPRPYLPLPD

SEQ ID NO: 10022 - DNA, 1563 bp, Homo sapiens
  ref <308>: DATABASE ACCESSION NUMBER: Refseq / NM_005199
  ref <309>: DATABASE ENTRY DATE: 2002-11-05
atgcatgggggccaggggccgctgctcctcctgctgctgctggctgtctgcctgggtgggacacaaaggaatctccggaaccaggaggagcgcctgctcgcagacctgatgcaaaactacgaccccaacctgcggcccgcggaacgagactcggatgtggtcaatgtcagcctgaagctaaccctcaccaacctcatctccctgaacgagcgagaggaagccctcaccaccaatgtctggatagagatgcagtggtgcgactatcgcctgcgctgggatccgcgagactacgaaggcctgtgggtgctgagggtgccgtccaccatggtgtggcggccggatatcgtgctggagaacaacgtggacggtgtcttcgaggtggccctctactgcaatgtgctcgtgtcccctgacggctgtatctactggctgccgcctgccatcttccgttccgcctgctctatctcagtcacctacttccccttcgactggcagaactgctcccttatcttccagtcccagacttacagcaccaatgagattgatctgcagctgagtcaggaagatggccagaccatcgagtggattttcattgaccctgaggccttcacagagaatggggagtgggccatccagcaccgaccagccaagatgctcctggacccagcggcgccagcccaggaagcaggccaccagaaggtggtgttctacctgctcatccagcgcaagcccctcttctacgtcatcaacatcatcgccccctgtgtgctcatctcctctgtcgccatcctcatccacttccttcctgccaaggctgggggccagaagtgtaccgtcgccatcaacgtgctcctggcccagactgtcttcctcttccttgtggccaagaaggtgcctgaaacctcccaggcggtgccactcatcagcaagtacctgaccttcctcctggtggtgaccatcctcattgtcgtgaatgctgtggttgtgctcaatgtctccttgcggtctccacacacacactccatggcccgaggggtccgcaaggtgttcctgaggctcttgccccagctgctgaggatgcacgttcgcccgctggccccggcagctgtgcaggacacccagtcccggctacagaatggctcctcgggatggtcgatcacaactggggaggaggtggccctctgcctgcctcgcagtgaactcctcttccagcagtggcagcggcaagggctggtggcggcagcgctggagaagctagagaaaggcccggagttagggctgagccagttctgtggcagcctgaagcaggctgccccagccatccaggcctgtgtggaagcctgcaacctcattgcctgtgcccggcaccagcagagtcactttgacaatgggaatgaggagtggttcctggtgggccgagtgctggaccgcgtctgcttcctggccatgctctcgctcttcatctgtggcacagctggcatcttcctcatggcccactacaaccgggtgccggccctgccattccctggagatccacgcccctacctgccctcaccagactga

SEQ ID NO: 10023 - protein, 520 aa, Homo sapiens
  ref <308>: DATABASE ACCESSION NUMBER: Refseq / NP_005190
  ref <309>: DATABASE ENTRY DATE: 2002-11-05
MHGGQGPLLLLLLLAVCLGGTQRNLRNQEERLLADLMQNYDPNLRPAERDSDVVNVSLKLTLTNLISLNEREEALTTNVWIEMQWCDYRLRWDPRDYEGLWVLRVPSTMVWRPDIVLENNVDGVFEVALYCNVLVSPDGCIYWLPPAIFRSACSISVTYFPFDWQNCSLIFQSQTYSTNEIDLQLSQEDGQTIEWIFIDPEAFTENGEWAIQHRPAKMLLDPAAPAQEAGHQKVVFYLLIQRKPLFYVINIIAPCVLISSVAILIHFLPAKAGGQKCTVAINVLLAQTVFLFLVAKKVPETSQAVPLISKYLTFLLVVTILIVVNAVVVLNVSLRSPHTHSMARGVRKVFLRLLPQLLRMHVRPLAPAAVQDTQSRLQNGSSGWSITTGEEVALCLPRSELLFQQWQRQGLVAAALEKLEKGPELGLSQFCGSLKQAAPAIQACVEACNLIACARHQQSHFDNGNEEWFLVGRVLDRVCFLAMLSLFICGTAGIFLMAHYNRVPALPFPGDPRPYLPSPD

SEQ ID NO: 10024 - DNA, 1696 bp, Rattus norvegicus
  ref <308>: DATABASE ACCESSION NUMBER: EMBL / X74835
  ref <309>: DATABASE ENTRY DATE: 1999-09-14
atggcagggcctgtgcccacactggggctgctggctgcccttgttgtgtgtggcagctggggcctgaatgaggaacaaaggctgatccagcacctgtttgaggaaaaaggctacaacaaagaacttcggccggtggctcgaaaggaggacatagtggatgtcgccttaagtctgaccctctccaacctcatctccctgaaagaagtggaggagaccctcaccaccaatgtgtggatagatcatgcatggatagacagccggctacaatggaatgccaacgagtttgggaacatcaccgtcctgcgcctgccctctgacatggtgtggctaccagaaattgtactggagaacaacaatgacggctcattccagatttcttacgcctgcaatgtgcttgtttctgactcgggccatgtgacctggctgccacccgccatcttccgctcctcctgccccatctcggtcacctacttccctttcgattggcagaactgctccctcaaattcagttcactcaagtataccgccaaggagatcagacttagcctgaagcaggaggaggaagacaaccgcagttaccccattgagtggatcatcattgaccctgagggtttcacagagaacggtgagtgggaaatagttcaccgggcagccaaggtcaacgtggaccccagtgtcccaatggacagcaccaaccaccaagacgtcaccttctacctcatcatccgccgcaagccgctcttctacatcatcaacatcctggtaccctgtgtgctcatctccttcatgatcaacctggtcttctacctgccaggcgactgtggagagaagacctcggtggccatctcagtgctcctggcccaatctgtcttcctgttgcttatctccaagaggctgccggccacatccatggccattcctttggtaggcaagttcctgctttttggcatggtgctggtcaccatggttgtggtgatctgcgtcatcgtgctcaacatccacttccgaacacccagcacgcatgttctgtctgagggagtcaagaagttcttcctggagaccctgcccaaactcctgcacatgtcccgcccagaagaggaagacccgggccccagggctctcatccggaggaccagctctctgggatacatctccaaggcagaggagtacttctcacttaagtcccgcagtgacctcatgtttgagaagcaatcagagcggcatgggctggcccggcgcctcaccacagcccgcaagccaccagcaagctctgagcaggtccaacaggagcttttcaatgagatgaagccagccgtggatggggcgaacttcatcgtcaaccacatgagggaccagaacagttacaatgaggagaaggacaactggaaccaggtggcccgcacagtggaccgtctctgcttgtttgtggtgacgcccgtcatggtggtgggcacagcctggatcttcctgcagggtgtctacaaccagcccccaccccagcctttccctggggaccccttctcctatgatgaacaggacaggcgcttcatttagagcaggcatgagtaaaacagtcaggcagacggcggtctgagaattgtccttgagcttgtgcctatctggggctgtgtggctgggcagaggtcatgggaggaagagctccctcccaggagcaattcctttctaaataaaggag

SEQ ID NO: 10025 - protein, 517 aa, Rattus norvegicus
  ref <308>: DATABASE ACCESSION NUMBER: SWISS-Prot / P25110
  ref <309>: DATABASE ENTRY DATE: 2002-06-15
MAGPVPTLGLLAALVVCGSWGLNEEQRLIQHLFEEKGYNKELRPVARKEDIVDVALSLTLSNLISLKEVEETLTTNVWIDHAWIDSRLQWNANEFGNITVLRLPSDMVWLPEIVLENNNDGSFQISYACNVLVSDSGHVTWLPPAIFRSSCPISVTYFPFDWQNCSLKFSSLKYTAKEIRLSLKQEEEDNRSYPIEWIIIDPEGFTENGEWEIVHRAAKVNVDPSVPMDSTNHQDVTFYLIIRRKPLFYIINILVPCVLISFMINLVFYLPGDCGEKTSVAISVLLAQSVFLLLISKRLPATSMAIPLVGKFLLFGMVLVTMVVVICVIVLNIHFRTPSTHVLSEGVKKFFLETLPKLLHMSRPEEEDPGPRALIRRTSSLGYISKAEEYFSLKSRSDLMFEKQSERHGLARRLTTARKPPASSEQVQQELFNEMKPAVDGANFIVNHMRDQNSYNEEKDNWNQVARTVDRLCLFVVTPVMVVGTAWIFLQGVYNQPPPQPFPGDPFSYDEQDRRFI

SEQ ID NO: 10026 - DNA, 1741 bp, Homo sapiens
  ref <308>: DATABASE ACCESSION NUMBER: EMBL / X55019
  ref <309>: DATABASE ENTRY DATE: 1993-07-28
tgggatggaggggccagtgctgacactggggctgctggctgccctggcggtgtgtggcagctgggggctgaacgaggaggagcggctgatccggcacctgtttcaagagaagggctacaacaaggagctccggcccgtggcacacaaagaggagagtgtggacgttgccctggccctcacactctccaacctcatctccctgaaagaagttgaggagaccctcactaccaatgtgtggatagagcacggctggacagacaaccggctgaagtggaatgctgaagaatttggaaacatcagtgtcctgcgcctccccccggacatggtgtggctcccagagattgtgctggagaacaacaatgacggctccttccagatctcctactcctgcaacgtgcttgtctaccactacggcttcgtgtactggctgccacctgccatcttccgctcctcctgccccatctctgtcacctatttccccttcgactggcagaactgctccctcaagttcagttccctcaagtatacggccaaagagatcaccctgagcctgaaacaggatgccaaggagaaccgcacctaccccgtggagtggatcatcattgatcctgaaggcttcacagagaacggggagtgggagatagtccaccggccggccagggtcaacgtggaccccagagcccctctggacagccccagccgccaggacatcaccttctacctcatcatccgccgcaagcccctcttctacatcatcaacatcctggtgccctgcgtgctcatctccttcatggtcaacctggtcttctacctaccggctgacagtggtgagaagacatcagtggccatctcggtgctcctggctcagtctgtcttcctgctgctcatctccaagcgtctgcctgccacatccatggccatcccccttatcggcaagttcctgctcttcggcatggtgctggtcaccatggttgtggtgatctgtgtcatcgtgctcaacatccacttccgaacacccagcacccatgtgctgtctgagggggtcaagaagctcttcctggagaccctgccggagctcctgcacatgtcccgcccagcagaggatggacccagccctggggccctggtgcggaggagcagctccctgggatacatctccaaggccgaggagtacttcctgctcaagtcccgcagtgacctcatgttcgagaagcagtcagagcggcatgggctggccaggcgcctcaccactgcacgccggcccccagcaagctctgagcaggcccagcaggaactcttcaatgagctgaagccagctgtggatggggcaaacttcattgttaaccacatgagggaccagaacaattacaatgaggagaaagacagctggaaccgagtggcccgcacagtggaccgcctctgcctgtttgtggtgacgcctgtcatggtggtgggcacagcctggatcttcctgcagggcgtttacaaccagccaccaccccagccttttcctggggacccctactcctacaacgtgcaggacaagcgcttcatctagggtgggcctgttggggagccaggagacagcagggtctgagagaggagccacagtccctaatgacacccactcctagccctgaggctcgtgcccctcagactggggaagagtccaaggaagggagggagcagccactcctcaatgctcaatggctcccctgaaatcaagacaggggccacccga

SEQ ID NO: 10027 - protein, 517 aa, Homo sapiens
  ref <308>: DATABASE ACCESSION NUMBER: SWISS-Prot / Q07001
  ref <309>: DATABASE ENTRY DATE: 2002-06-15
MEGPVLTLGLLAALAVCGSWGLNEEERLIRHLFQEKGYNKELRPVAHKEESVDVALALTLSNLISLKEVEETLTTNVWIEHGWTDNRLKWNAEEFGNISVLRLPPDMVWLPEIVLENNNDGSFQISYSCNVLVYHYGFVYWLPPAIFRSSCPISVTYFPFDWQNCSLKFSSLKYTAKEITLSLKQDAKENRTYPVEWIIIDPEGFTENGEWEIVHRPARVNVDPRAPLDSPSRQDITFYLIIRRKPLFYIINILVPCVLISFMVNLVFYLPADSGEKTSVAISVLLAQSVFLLLISKRLPATSMAIPLIGKFLLFGMVLVTMVVVICVIVLNIHFRTPSTHVLSEGVKKLFLETLPELLHMSRPAEDGPSPGALVRRSSSLGYISKAEEYFLLKSRSDLMFEKQSERHGLARRLTTARRPPASSEQAQQELFNELKPAVDGANFIVNHMRDQNNYNEEKDSWNRVARTVDRLCLFVVTPVMVVGTAWIFLQGVYNQPPPQPFPGDPYSYNVQDKRFI

SEQ ID NO: 10028 - DNA, 1460 bp, Rattus norvegicus
  ref <308>: DATABASE ACCESSION NUMBER: EMBL / X74978
  ref <309>: DATABASE ENTRY DATE: 1994-10-11
ttggtctttctttcagcgtcgctgtaaaagaacaaccagttgccagtgtaatcaggaaaagagttaggtcaaacttgtgggtctgccggggatccatgattagcacaaagaactctattgctgaaggattcgaagattttgcttgagcgggtgagtaaagctgccctgggaatgtctgatgtaaaaacaggtttcagacgaagcctaccaagttagcgtgcaagcatgaaaaagaagacacttatcccaggctaatgggcaaaggacctgattcacctgacaacaacgctcacctgttcccctgccttctctcacgaggcaaaaagatgagacaggaggacacctggaggagttttccatacccagcctagaacgatcagattttatatgtatgtcaaaagacgctgggtagcagaactgaataataaaagcctcttggtgtccattcacgttccttccaaagaaactaaaaaatcaaactttctggtaagctccatatatatggcatccatacagcagctcctggaaggcacttgtattcaatgaataacaagagcaagatataccgacacagcacctcagaggtgagaatgctgtgcagagggtcccccaaaactccaatgcctgcgatgcagaatctaaagttgatacataagaggagatgtgaggacacacacacacacacacacacacacacacaccactgaaacaaaatgagatattctagatgcctctgagtccaaaacttattggcacactgagtgtagctgcaaaatctgctcagaggacaaacaatgttcaaggctttgatcccggcaccttcagaagccatagccaagtgccagcctatggccactgctatgtatgcacaaagctgtgcccacatgatactctttagagtctcgactggccgtgtggcagaacagacctgtgtttctaaacggtggatgaagatgaatggctcctggcaagtggcctccactggaagccagacctagaccatttcatgactaacccaagacatggcttgagaagctcctttgtgttatttttccccatgtaaagaactgtcttctagcagtaaggcagtgaaaggcggtggataaaagcatcataattaggaagtcgaaagggagatgcttaaataatgaactttgaaaagcttctgtttatttcgttagaataaaatttctgcaatcagacttgagggctctcctttttaccttgggggtgggggacagaagttgtgtgatagaagtgactgttaatataatataaaattactcagctgggtttttaagttaatattttacattaaaatatagtttgaacttcttctgataaaaaattagcagtagatagctcgaccacagctactcaagatagaatttggcaagaaaacatccttaggaagtttacagtgtgttacagaagtgatatgtcttacttggaacgagaac

SEQ ID NO: 10029 - protein, 381 aa, Rattus norvegicus; identical to SEQ ID NO: 3641
  ref <308>: DATABASE ACCESSION NUMBER: Refseq / NP_064457
  ref <309>: DATABASE ENTRY DATE: 2001-10-19

SEQ ID NO: 10030 - DNA, 1786 bp, Homo sapiens
  ref <308>: DATABASE ACCESSION NUMBER: Refseq / XM_039822
  ref <309>: DATABASE ENTRY DATE: 2002-08-01
gaagtggtagcagttcctcctaactcctgccagaaacagctctcctcaacatgagagctgcacccctcctcctggccagggcagcaagccttagccttggcttcttgtttctgctttttttctggctagaccgaagtgtactagccaaggagttgaagtttgtgactttggtgtttcggcatggagaccgaagtcccattgacacctttcccactgaccccataaaggaatcctcatggccacaaggatttggccaactcacccagctgggcatggagcagcattatgaacttggagagtatataagaaagagatatagaaaattcttgaatgagtcctataaacatgaacaggtttatattcgaagcacagacgttgaccggactttgatgagtgctatgacaaacctggcagccctgtttcccccagaaggtgtcagcatctggaatcctatcctactctggcagcccatcccggtgcacacagttcctctttctgaagatcagttgctatacctgcctttcaggaactgccctcgttttcaagaacttgagagtgagactttgaaatcagaggaattccagaagaggctgcacccttataaggattttatagctaccttgggaaaactttcaggattacatggccaggacctttttggaatttggagtaaagtctacgaccctttatattgtgagagtgttcacaatttcactttaccctcctgggccactgaggacaccatgactaagttgagagaattgtcagaattgtccctcctgtccctctatggaattcacaagcagaaagagaaatctaggctccaagggggtgtcctggtcaatgaaatcctcaatcacatgaagagagcaactcagataccaagctacaaaaaactcatcatgtattctgcgcatgacactactgtgagtggcctacagatggcgctagatgtttacaacggactccttcctccctatgcttcttgccacttgacggaattgtactttgagaagggggagtactttgtggagatgtactatcggaatgagacgcagcacgagccgtatcccctcatgctacctggctgcagccccagctgtcctctggagaggtttgctgagctggttggccctgtgatccctcaagactggtccacggagtgtatgaccacaaacagccatcaagttctaaaggtcatctttgctgttgccttttgcctgatatctgctgtcctaatggtactactgtttatccacattcgccgtggactctgctggcagagagaatcctatgggaacatctgaacagacagctggataagccaggccaacctcctgtgacacagcatctctcagtggtgccgcatctaaaggacaggcttttgccatgtgggcattgccatcctcacaccctgccttttgaatctgcccagagcagggtctgaactcacagtgacccacaggctgctgctggatgaacactcaggctacctaggtcttctcataatggagtggtagtgcaggctgcttgttcagctagaaagaggctgttatgcataggatggttgtattctctgccacagttgtccggagagaaataagaagccaaactccaatcagccttttacctgcaaagagtgaagggtgagaaggtggacaaagacatagattagaaaaatactggatattgggggaagttagactagaagtattattatacagggtgattcttacgaaagaagacccaatcataaattataaataaactttttatttagctatta

SEQ ID NO: 10031 - protein, 418 aa, Homo sapiens
  ref <308>: DATABASE ACCESSION NUMBER: Refseq / XP_039822
  ref <309>: DATABASE ENTRY DATE: 2002-08-01
MRAAPLLLARAASLSLGFLFLLFFWLDRSVLAKELKFVTLVFRHGDRSPIDTFPTDPIKESSWPQGFGQLTQLGMEQHYELGEYIRKRYRKFLNESYKHEQVYIRSTDVDRTLMSAMTNLAALFPPEGVSIWNPILLWQPIPVHTVPLSEDQLLYLPFRNCPRFQELESETLKSEEFQKRLHPYKDFIATLGKLSGLHGQDLFGIWSKVYDPLYCESVHNFTLPSWATEDTMTKLRELSELSLLSLYGIHKQKEKSRLQGGVLVNEILNHMKRATQIPSYKKLIMYSAHDTTVSGLQMALDVYNGLLPPYASCHLTELYFEKGEYFVEMYYRNETQHEPYPLMLPGCSPSCPLERFAELVGPVIPQDWSTECMTTNSHQVLKVIFAVAFCLISAVLMVLLFIHIRRGLCWQRESYGNI

SEQ ID NO: 10032 - DNA, 1454 bp, Rattus norvegicus
  ref <308>: DATABASE ACCESSION NUMBER: EMBL / X75207
  ref <309>: DATABASE ENTRY DATE: 1995-02-17
ccgtcgacggccattaccaatcgcgaaaccggcgcagtagcagagagctgcagactccgcgcgctccggagaccggtcgtagagcgcgaggcagcgtcagcagcagacaccggagcccaacccggaccacagccctccccaggcggccgcgcatggaacaccagctcctgtgctgcgaagtggagaccatccgccgcgcgtaccctgacaccaatctcctcaacgaccgggtgctgcgagccatgcttaagactgaggagacctgcgcgccctccgtttcttacttcaagtgcgtgcagagggagattgtgccatccatgcggaaaatcgtggccacctggatgctagaggtctgcgaggagcagaagtgcgaagaggaggtcttcccgctggccatgaactacctggaccggttcttgtctctggagcccctgaagaagagccgcctgcagcttctgggggccacctgcatgttcgtggcctctaagatgaaggagaccattcccctgactgccgagaagttgtgcatctacactgacaactctatccgccccgaggagttgctgcaaatggaactgcttctggtgaacaagctcaaatggaacctggccgccatgactccccacgatttcatcgaacacttcctctccaaaatgccagaggcggatgagaacaagcagatcatccgcaaacatgcacagacctttgtggccctctgtgccacagatgtgaagttcatttccaacccaccctccatggtggctgctgggagtgtggtggccgcgatgcagggcctgaacctgggcagccccaacaacttcctctcctgctaccgcacaacgcactttctttccagagtcatcaagtgtgacccggactgcctccgtgcctgccaggaacagattgaagcccttctggagtcaagcctgcgccaggcccagcagaacatcgatcccaaggccaccgaggaggaaggggaagtggaggaagaagctggtctggcttgcacacccaccgacgtccgagatgtggacatctgagggccaccggcaggcgggagtcaccaagtagtggcatcgcgaagagaaaggagccagcccgggtgctcctgacgaggtccccttgggatgtgttgttaccagaaggggaagttttgttctctttgttggttgtttttccttaatctttctcctttctatctgatttaagcaaaagagaaaaaaaatacctgaaagctgtcttaaagagagagagagagatagaattcgcatcaccctgagtatagggagacgggggggtgctacaaaaatagaattctgtaccccagtaatcaactagttttctattaatgtgcttgtctgttctaagaataggattaacacacaggaagtcttgagaaggatttttgattcttttatgtgtttaagaaaaaaaagcttaagaaacattgcttt

SEQ ID NO: 10033 - protein, 295 aa, Rattus norvegicus; identical to SEQ ID NO: 1720
  ref <308>: DATABASE ACCESSION NUMBER: SWISS-Prot / P39948
  ref <309>: DATABASE ENTRY DATE: 1999-07-15

SEQ ID NO: 10034 - DNA, 1260 bp, Homo sapiens
  ref <308>: DATABASE ACCESSION NUMBER: EMBL / BC000076
  ref <309>: DATABASE ENTRY DATE: 2001-07-13
ggcacgaggcagtagcagcgagcagcagagtccgcacgctccggcgaggggcagaagagcgcgagggagcgcggggcagcagaagcgagagccgagcgcggacccagccaggacccacagccctccccagctgcccaggaagagccccagccatggaacaccagctcctgtgctgcgaagtggaaaccatccgccgcgcgtaccccgatgccaacctcctcaacgaccgggtgctgcgggccatgctgaaggcggaggagacctgcgcgccctcggtgtcctacttcaaatgtgtgcagaaggaggtcctgccgtccatgcggaagatcgtcgccacctggatgctggaggtctgcgaggaacagaagtgcgaggaggaggtcttcccgctggccatgaactacctggaccgcttcctgtcgctggagcccgtgaaaaagagccgcctgcagctgctgggggccacttgcatgttcgtggcctctaagatgaaggagaccatccccctgacggccgagaagctgtgcatctacaccgacaactccatccggcccgaggagctgctgcaaatggagctgctcctggtgaacaagctcaagtggaacctggccgcaatgaccccgcacgatttcattgaacacttcctctccaaaatgccagaggcggaggagaacaaacagatcatccgcaaacacgcgcagaccttcgttgccctctgtgccacagatgtgaagttcatttccaatccgccctccatggtggcagcggggagcgtggtggccgcagtgcaaggcctgaacctgaggagccccaacaacttcctgtcctactaccgcctcacacgcttcctctccagagtgatcaagtgtgacccggactgcctccgggcctgccaggagcagatcgaagccctgctggagtcaagcctgcgccaggcccagcagaacatggaccccaaggccgccgaggaggaggaagaggaggaggaggaggtggacctggcttgcacacccaccgacgtgcgggacgtggacatctgagggcgccaggcaggcgggcgccaccgccacccgcagcgagggcggagccggccccaggtgctcccctgacagtccctcctctccggagcattttgataccagaagggaaagcttcattctccttgttgttggttgttttttcctttgctctttcccccttccatctctgacttaagcaaaaaaaaaaaaaaaaaaaaaaaaaaaaaaaaaaaaaaaaaaa

SEQ ID NO: 10035 - protein, 295 aa, Homo sapiens; identical to SEQ ID NO: 1722
  ref <308>: DATABASE ACCESSION NUMBER: SWISS-Prot / P24385
  ref <309>: DATABASE ENTRY DATE: 2002-06-15

SEQ ID NO: 10036 - DNA, 1454 bp, Rattus norvegicus; identical to SEQ ID NO: 10032
  ref <308>: DATABASE ACCESSION NUMBER: EMBL / X75207
  ref <309>: DATABASE ENTRY DATE: 1995-02-17

SEQ ID NO: 10037 - protein, 295 aa, Rattus norvegicus; identical to SEQ ID NO: 1720
  ref <308>: DATABASE ACCESSION NUMBER: SWISS-Prot / P39948
  ref <309>: DATABASE ENTRY DATE: 1999-07-15

SEQ ID NO: 10038 - DNA, 1260 bp, Homo sapiens; identical to SEQ ID NO: 10034
  ref <308>: DATABASE ACCESSION NUMBER: EMBL / BC000076
  ref <309>: DATABASE ENTRY DATE: 2001-07-13

SEQ ID NO: 10039 - protein, 295 aa, Homo sapiens; identical to SEQ ID NO: 1722
  ref <308>: DATABASE ACCESSION NUMBER: SWISS-Prot / P24385
  ref <309>: DATABASE ENTRY DATE: 2002-06-15

SEQ ID NO: 10040 - DNA, 1700 bp, Rattus norvegicus
  ref <308>: DATABASE ACCESSION NUMBER: EMBL / X76724
  ref <309>: DATABASE ENTRY DATE: 1994-06-14
acccatctttaggattcccagaacccaccatgcctgtttcacacatctgaaattctctattagcgctcctattgtgtttggagttttaaaaaaaattctaaagatttagcgtctcgtggatccagtgctggtccagggggtcgcccaatccgccgccacccacgcgaggagtcccgacctgagggataccgctcactcagcacagaacccgccccgcgtcacttttacgtcaaggtagcgcggccaatgagagccagagttcaatgattctgactctacgcgcgcggaccaatcgacgcatcggcgggagctgcaggatttgcatggactccgaaggccactgccaatgagactgtgactggcgtgaatcatagccaataataggatgctaggggcgtggccgcgggcgtcccacgaggtaaagatgctgcgggcggaacctgccggagcaagcgggattcgggggtgctgaagtcgcaagggcagggcgggaaggaagatccggaacggggcgtgggatccggagctggaggcccccaggatttcccctctgtgaaaagacacgctgatctagataagtgaggccggccccatgtatccggaatcaaccacggggtctccagctcgactctccctgcggcagacaggctcccccgggatgatctacagtactcggtatgggagtcccaaaagacagctccagttttacaggaatctgggcaaatctggccttcgggtctcctgcctggggcttggaacatgggtgaccttcggaggccagatcacagatgagatggcagagcacctaatgaccttggcctatgacaatggcatcaacctgttcgatacggcggaggtctacgcagctggcaaggctgaagtggtattagggaacatcattaagaagaaggggtggagacggtccagccttgtcatcaccaccaagatcttctggggcggaaaggcagagaccgagagaggcctttcccggaagcacataatcgaaggactgaaagcttccctggagaggctgcagctggagtacgtggatgtggtttttgccaaccgcccagaccccaacacacccatggaagagactgtgcgggccatgacccatgtcatcaaccaagggatggccatgtactggggcacatcacgctggagctccatggagatcatggaggcctactcggtggctcggcagttcaacctgatcccgcccatctgcgagcaagcggaataccacatgttccagagggagaaggtagaggtccagctgccagagctgttccacaagataggagtaggtgccatgacctggtcccctctggcctgcggcattgtctcagggaagtatgacagtggcatcccaccctactccagagcctctctgaagggctaccagtggttgaaggacaagatcctgagtgaggagggtcgccgccagcaagccaaactgaaggaactgcaggccattgcagagcgcctaggctgcaccctcccacagctggccatagcctggtgcctgaggaacgagggcgtcagctccgtgctcctgggtgcttccaatgcagaacaacttatggagaacattggagcaatacaggtccttccaaaattgtcgtcctccatcgtccacgagatcgacagcattctgggcaataaaccctacagcaaaaaggactatagatcctaagtca

SEQ ID NO: 10041 - protein, 367 aa, Rattus norvegicus; identical to SEQ ID NO: 7583
  ref <308>: DATABASE ACCESSION NUMBER: SWISS-Prot / Q64284
  ref <309>: DATABASE ENTRY DATE: 2001-10-16

SEQ ID NO: 10042 - DNA, 1104 bp, Homo sapiens
  ref <308>: DATABASE ACCESSION NUMBER: EMBL / AF029749
  ref <309>: DATABASE ENTRY DATE: 2000-03-03
atgtatccagaatcaacgacgggctccccggctcggctctcgctgcggcagacgggctcccccgggatgatctacagtactcggtatgggagtcccaaaagacagctccagttttacaggaacctgggcaagtctggcctgcgggtctcctgcctgggacttggaacatgggtgaccttcggaggccagatcaccgatgagatggcagagcagctcatgaccttggcctatgataatggcatcaacctcttcgatacagcagaagtctacgcagccggcaaggctgaagtggtactgggaaacatcattaagaagaaaggatggaggcggtccagcctcgtcatcaccaccaagatcttctggggcggaaaggcggagacggagcggggcctgtccaggaagcacataatcgaaggtctgaaagcttccctggagcgactgcagctggagtacgtggatgtggtgtttgccaaccgcccggaccccaacaccccgatggaagagaccgtccgcgccatgacccacgtcatcaaccaggggatggccatgtactggggcacgtcacgctggagctccatggagatcatggaggcctactccgtggcccggcagttcaacctgaccccgcccatctgcgagcaggctgagtaccacatgttccagcgtgagaaagtggaggtgcagctgccggagctgttccacaagataggagtgggcgccatgacctggtcccctctggcctgtggcattgtttctggcaagtacgacagtggcatcccaccctactcaagagcctccttgaagggctaccagtggctgaaggacaagatcctcagtgaggagggccggcgccagcaagccaagctgaaggagctgcaggccatcgccgagcgcctgggctgcaccctgccccagctggccatagcctggtgcctgaggaatgagggagtcagctccgtgctcctgggggcctccaatgcggaccagctcatggagaacattggggcaatacaggtccttccgaaactgtcgtcttccattatccacgagattgatagtattttgggcaataaaccctacagcaaaaaggactacagatcctaa

SEQ ID NO: 10043 - protein, 367 aa, Homo sapiens; identical to SEQ ID NO: 7585
  ref <308>: DATABASE ACCESSION NUMBER: SWISS-Prot / Q13303
  ref <309>: DATABASE ENTRY DATE: 2001-10-16

SEQ ID NO: 10044 - DNA, 2725 bp, Rattus norvegicus
  ref <308>: DATABASE ACCESSION NUMBER: EMBL / X76988
  ref <309>: DATABASE ENTRY DATE: 1997-03-07
aagcaggctgcgccgtggctggccccacagtgggctgggaaaggattggccacggtgacagccgccccgtggccagcacaatgaagtgctcccttcgagtgtggttcctctctatggccttcctgctggtgttcattatgtctctgctcttcacgtactcacaccacagcatggctaccttgccctacctggactcggggactctgggcggaacacaccgagtgaagctggtaccgggctatactgggcaacagcgccttgtcaaggaggggctttcggggaaaagttgtacctgcagtcgctgcatgggtgatgccggcacctctgagtggtttgacagccactttgacagtaacatctcacctgtctggacgagagataacatgaacctcaccccggatgtccagcggtggtggatgatgctgcaaccccaattcaagtcacacaacaccaatgaagtgctggagaagctcttccagatcgtgcccggtgagaacccctaccgcttccgggacccccagcagtgccggcgctgtgctgtggtcgggaactcaggcaaccttcggggctctggctatgggcaagaagtggacagccacaactttatcatgaggatgaatcaggcaccgactgtaggctttgagaaggatgttggcagccgaacaactcaccatttcatgtacccggagagtgccaagaacctgcctgccaacgtgagctttgtgctggtgcccttcaaggccctggacctgatgtggattgccagcgccctctccacaggacagatccgattcacctatgctccagtgaagtccttccttcgagtggacaaagagaaggtccagatttacaacccagccttcttcaagtacatccatgacaggtggaccgagcaccatggccgctacccctccacaggaatgctggtgctcttctttgcactacacgtgtgtgatgaggtgaacgtgtatgggttcggggccgacagccgtggcaactggcaccactactgggagaacaaccggtacgcgggcgagttccggaagacaggcgtgcatgatgccgacttcgaagcccacatcattgacattctggccaaggccagcaagattgaagtctaccgagggaactgagcagcctcaggcgccttcagaaccagtcacttcagggtctggcaagcgccggttgccgcccaccaatcagactgcgccgtccccagcaaccaatcagtgctgcagttgggaggagcttctttcttagccaatcacacaactcaaggagaacttccggcgccgccgtctccaccaatcatggccttgggaggcggcgggcctggaccccctcccccaacccccaacccccaaccccgctttggatgagaatttttctgctttttaagaggccggtctgggtctgggagggagcaccttgaactgctcatttccagcttagtcccgatgggtgagtgaagcccgccaaagaaatgtggtcccggcgagatactttccagggcattctgtggctcaccagctagtagggggttgtattcactccctagttgggttaactcattaagaatgggaaattattatgtggacactgaagggaagtgttttctggggcctgaggcattcactgaagccctttctcccaaatgaacctcaactttgacctaggtcaagtcatgcaaatagcttccagttgtaacccgattcttgactcaccagccctttaggagctggaaagtaggttagaacaggcgagtaagcatggtaaaggggcggacaggaggagccatgcatggcagataccaatctgctcctccccagcaaagctccgagccatctgcaaggcctgcaaacaactgtcaagcgatcttggttggatagccatccctggcagctggagggtaactaaagtatgaatccaaagcaaatccaacacccaagcaagaggctgcctgctcctctttggggtgacaatgaaagaaaaagatacatgcacagggcactcctttccagcctactgtccaaccctgctgctctcgccttagggctaaagacttgggccgcgtgtgtgagagcacaagcagcggagtcccggtggtctcattttgtctccaaatcaacaggtgagctggagaggagacccaggacctaaggacagacgctgagaaggtggtggggaacaggagtgagggcacacgtgagagaagcaccttgcatgtgacccggtggagcttcctacccgttcctgacactaatgaggccctagggaggtcgacattaacaagcagcttcctggttgggggacagtcacacgtaaggagtgtgttaaagtttggtatgaggcaagtacccctaaaaactaatatatgaagaactttgcttgaatttgttccttccaagtttcaaaagcaggggtagagaaaaagggagtataccgagaagggctgtagcggaacctctcagggctctaatcatcgtgcagtcactgtaccagtggccgttcttgcctgtctccgctctcccaagaagctgctgtgatgagaagtgggaaagtactgcgattacgacaaacagtattgagaagaagaatttatttttcctccttttgttttgcttaaaccatgagtcaccattctagaaaaggtaggtcccagcacccacatcctttttcttctacagttatttaaacattcaatttttccctctgtttcttttcc

SEQ ID NO: 10045 - protein, 350 aa, Rattus norvegicus; identical to SEQ ID NO: 5017
  ref <308>: DATABASE ACCESSION NUMBER: SWISS-Prot / Q11205
  ref <309>: DATABASE ENTRY DATE: 2002-06-15

SEQ ID NO: 10046 - DNA, 1623 bp, Homo sapiens; identical to SEQ ID NO: 5018
  ref <308>: DATABASE ACCESSION NUMBER: EMBL / X96667
  ref <309>: DATABASE ENTRY DATE: 1997-09-12

SEQ ID NO: 10047 - protein, 350 aa, Homo sapiens
  ref <308>: DATABASE ACCESSION NUMBER: Refseq / NP_008858
  ref <309>: DATABASE ENTRY DATE: 2002-10-15
MKCSLRVWFLSVAFLLVFIMSLLFTYSHHSMATLPYLDSGALDGTHRVKLVPGYAGLQRLSKERLSGKSCACRRCMGDAGASDWFDSHFDGNISPVWTRENMDLPPDVQRWWMMLQPQFKSHNTNEVLEKLFQIVPGENPYRFRDPHQCRRCAVVGNSGNLRGSGYGQDVDGHNFIMRMNQAPTVGFEQDVGSRTTHHFMYPESAKNLPANVSFVLVPFKVLDLLWIASALSTGQIRFTYAPVKSFLRVDKEKVQIYNPAFFKYIHDRWTEHHGRYPSTGMLVLFFALHVCDEVNVYGFGADSRGNWHHYWENNRYAGEFRKTGVHDADFEAHIIDMLAKASKIEVYRGN

SEQ ID NO: 10048 - DNA, 1973 bp, Rattus norvegicus
  ref <308>: DATABASE ACCESSION NUMBER: EMBL / X77237
  ref <309>: DATABASE ENTRY DATE: 1995-02-01
tcgctttgcggcatggcgatggcggagggcgagcggactgagtgtgctgagcccccccgggacgaacccccggccgaaggcactctgaagcgggcagaggagctcaagacacaggccaacgactacttcaaagccaaggactacgagaacgctatcaagttctacagtcaggccatcgagttgaaccccagcaatgccatctactatggcaaccgcagcctggcctacctgcgcaccgagtgctatggctatgcactgggcgatgccacacgggctatcgagcttgacaagaagtacatcaaaggttactaccgccgggcggctagcaacatggcactgggcaagttccgggctgccctgcgtgactacgagacggtggtgaaggtgaagcctaatgacaaggatgccaagatgaagtaccaggagtgcagcaagattgtgaagcagaaggcctttgagagggccattgcaggcgacgagcacagacgctctgtcgtggactctctggacatcgaaagcatgaccattgaagatgaatacagtgggcccaagcttgaggatggcaaagtgacaatcaccttcatgaaagacctcatgcagtggtacaaggatcagaagaaactgcaccggaagtgcgcctaccagatcctagtgcaggtgaaggaagtcctctgcaagctgagcacgctggtggagacaacgctgaaagagacagagaagattacagtgtgtggggacacccatggccagttttatgacctcctcaacatatttgagctcaacggtttaccctcagagaccaacccctatatatttaacggcgactttgtggaccgtggttccttctccgttgaagtgatcctcaccctctttggcttcaagctcctgtatccagatcattttcatctacttcgaggcaaccacgagacggacaacatgaaccagatctatggcttcgagggcgaggtgaaggccaagtacacagcccaaatgtatgagctcttcagcgaggtgttcgagtggcttccgctggcacagtgtatcaatggcaaagtgctgatcatgcatggaggcctattcagcgaagatggtgtcactctggatgacatccggaagattgagcggaatcggcagcccccagactcaggtcccatgtgtgacctgctgtggtcagatccccagccacagaatgggcgctccgtcagcaagcgtggtgtgagttgtcagtttgggcccgatgtcaccaaggccttcctggaggagaatcaactggactacatcatccgcagccatgaagtcaaagctgagggctacgaggtggcccatggtggccgctgtgtcaccgtcttctctgcccccaattattgtgaccagatgggaaacaaagcctcctacatccacctccagggttccgacctgcggccccagttccaccaattcacagcagtgcctcaccccaacgtcaagcccatggcatacgccaacacgctgctgcagctaggaatgatgtgaggcagtctacagcagtaaccagggcctgcacagctggagggccccgccttcggcctgctgccccgccccagggcagcgttggacccccttttactttgtaaagtttgtatttattcccctttaggttgcagagggggtgggggcagcgtggggcagcagacgacaggctcctggtcagagaaaggaggagttgaaattgggggtagggcacagcctgggcatttggaggaaggccaacctgggtaggggtagggccgagaggaggtcctgccccctcgcctgcatggctcctcccctggtaaagcaataggaccctgccataggaagaccccaaaagagggtcatcagggaggcctcctcctggtagcctcagggtggggcgaggctggggcccaccccccagctattttatgttctgtaattaaatatgttaaaataaaataaagtcattattgtaagtc

SEQ ID NO: 10049 - protein, 499 aa, Rattus norvegicus
  ref <308>: DATABASE ACCESSION NUMBER: SWISS-Prot / P53042
  ref <309>: DATABASE ENTRY DATE: 2001-10-16
MAMAEGERTECAEPPRDEPPAEGTLKRAEELKTQANDYFKAKDYENAIKFYSQAIELNPSNAIYYGNRSLAYLRTECYGYALGDATRAIELDKKYIKGYYRRAASNMALGKFRAALRDYETVVKVKPNDKDAKMKYQECSKIVKQKAFERAIAGDEHRRSVVDSLDIESMTIEDEYSGPKLEDGKVTITFMKDLMQWYKDQKKLHRKCAYQILVQVKEVLCKLSTLVETTLKETEKITVCGDTHGQFYDLLNIFELNGLPSETNPYIFNGDFVDRGSFSVEVILTLFGFKLLYPDHFHLLRGNHETDNMNQIYGFEGEVKAKYTAQMYELFSEVFEWLPLAQCINGKVLIMHGGLFSEDGVTLDDIRKIERNRQPPDSGPMCDLLWSDPQPQNGRSVSKRGVSCQFGPDVTKAFLEENQLDYIIRSHEVKAEGYEVAHGGRCVTVFSAPNYCDQMGNKASYIHLQGSDLRPQFHQFTAVPHPNVKPMAYANTLLQLGMM

SEQ ID NO: 10050 - DNA, 2075 bp, Homo sapiens
  ref <308>: DATABASE ACCESSION NUMBER: EMBL / BC001970
  ref <309>: DATABASE ENTRY DATE: 2001-07-13
cgcgacggttcggccgggtgccgctggcggccgttgccagggtaggggtcgctttgcggcatggcgatggcggagggcgagaggactgagtgtgctgagcccccccgggacgaacccccggctgatggagctctgaagcgggcagaggagctcaagactcaggccaatgactacttcaaagccaaggactacgagaacgccatcaagttctacagccaggccatcgagctgaaccccagcaatgccatctactatggcaaccgcagcctggcctacctgcgcactgagtgctatggctacgcgctgggagacgccacgcgggccattgagctggacaagaagtacatcaagggttattaccgccgggctgccagcaacatggcactgggcaagttccgggccgcgctgcgagactacgagacggtggtcaaggtgaagccccatgacaaggatgccaaaatgaaataccaggagtgcaacaagatcgtgaagcagaaggcctttgagcgggccatcgcgggcgacgagcacaagcgctccgtggtggactcgctggacatcgagagcatgaccattgaggatgagtacagcggacccaagcttgaagacggcaaagtgacaatcagtttcatgaaggagctcatgcagtggtacaaggaccagaagaaactgcaccggaaatgtgcctaccagattctggtacaggtcaaagaggtcctctccaagctgagcacgctcgtggaaaccacactcaaagagacagagaagattacagtatgtggggacacccatggccagttctatgacctcctcaacatattcgagctcaacggtttaccctcggagaccaacccctatatatttaatggtgactttgtggaccgaggctccttctctgtagaagtgatcctcacccttttcggcttcaagctcctgtacccagatcactttcacctccttcgaggcaaccacgagacagacaacatgaaccagatctacggtttcgagggtgaggtgaaggccaagtacacagcccagatgtacgagctctttagcgaggtgttcgagtggctcccgttggcccagtgcatcaacggcaaagtgctgatcatgcacggaggcctgttcagtgaagacggtgtcaccctggatgacatccggaaaattgagcggaatcgacaacccccagattcagggcccatgtgtgacctgctctggtcagatccacagccacagaacgggcgctcgatcagcaagcggggcgtgagctgtcagtttgggcctgacgtcaccaaggccttcttggaagagaacaacctggactatatcatccgcagccacgaagtcaaggccgagggctacgaggtggctcacggaggccgctgtgtcaccgtcttctctgcccccaactactgcgaccagatggggaacaaagcctcctacatccacctccagggctctgacctacggcctcagttccaccagttcacagcagtgcctcatcccaacgtcaagcccatggcctatgccaacacgctgctgcagctaggaatgatgtgaggtgacgggcggggcggcctgcatcccagggcccctccaatcccaccggacccaggccctgggctaggggcagagcaggccccgccccagggcaatgttggacccccttttactttgtaaagtttgtatttattcccctttaggtttgcagagggggtaggggcagagtcaggggctggccagagggtctgctccctggacagagaggaaggaggtggagcagctggggctgggggcacagcctgggcattctgtggggaggccgtcctcggggtggggtggggccgagtggctgccctgcccccctcatttgcatggctcctcccccactcaagcaatagggccccgccataggaagacccccagagagagggtcagcaggggggccccgcctgcgcctcccctcctatagccccatggtggggctaggctggggctcacccccctccccagctattttatgtctgtaattaaatatgttaaaataaagtcattatcggaaaaaaaaaaaaaaa

SEQ ID NO: 10051 - protein, 499 aa, Homo sapiens
  ref <308>: DATABASE ACCESSION NUMBER: SWISS-Prot / P53041
  ref <309>: DATABASE ENTRY DATE: 2002-06-15
MAMAEGERTECAEPPRDEPPADGALKRAEELKTQANDYFKAKDYENAIKFYSQAIELNPSNAIYYGNRSLAYLRTECYGYALGDATRAIELDKKYIKGYYRRAASNMALGKFRAALRDYETVVKVKPHDKDAKMKYQECNKIVKQKAFERAIAGDEHKRSVVDSLDIESMTIEDEYSGPKLEDGKVTISFMKELMQWYKDQKKLHRKCAYQILVQVKEVLSKLSTLVETTLKETEKITVCGDTHGQFYDLLNIFELNGLPSETNPYIFNGDFVDRGSFSVEVILTLFGFKLLYPDHFHLLRGNHETDNMNQIYGFEGEVKAKYTAQMYELFSEVFEWLPLAQCINGKVLIMHGGLFSEDGVTLDDIRKIERNRQPPDSGPMCDLLWSDPQPQNGRSISKRGVSCQFGPDVTKAFLEENNLDYIIRSHEVKAEGYEVAHGGRCVTVFSAPNYCDQMGNKASYIHLQGSDLRPQFHQFTAVPHPNVKPMAYANTLLQLGMM

SEQ ID NO: 10052 - DNA, 1969 bp, Rattus norvegicus
  ref <308>: DATABASE ACCESSION NUMBER: EMBL / X77934
  ref <309>: DATABASE ENTRY DATE: 2000-03-08
agacgcttctgggtcgcgttagggagacgctctggtccggttgtgcgtgagaggaggagagcccagcgccacagcgacccggagagggatggcggccaccgggaccgcggccgctgcggccaccggcaagcttcttgtcctgctgctgctcgggctcacggcacccgcagcggctctggctggctatatcgaggctctcgcagccaatgctggaacaggctttgcggttgctgaacctcagattgcgatgttctgtgggaagctgaacatgcatgtgaacattcagactgggaagtgggagcctgacccaaccggcaccaagagctgcctgggaacaaaggaggaagttcttcagtactgccaggagatatatccagagctgcagatcacaaatgtgatggaagcaaaccagccagtcaatattgatagttggtgccgaagggacaaaaaacagtgcaggagtcacattgttataccattcaagtgtcttgtgggtgaatttgtaagtgatgttctgctagttccagaaaactgccagtttttccaccaagagcggatggaggtgtgtgagaagcatcagcggtggcacacagtcgtcaaggaggcatgtctgactgaggggatgaccttatatagctatggcatgctgctgccctgtggggtagaccagttccatggcactgagtatgtgtgctgccctcagacaaaggttgttgactctgactccactatgtccaaagaagaggaggaagaagaggaagaggatgaagaagaagactatgctcttgataaaagtgaatttcctaccgaagcagatctggaagacttcacagaagcagctgcagatgaggacgaggatgaggaggaggaggaggaggaggaaggggaggaagtggtagaagaccgtgattactactatgactcctttaaaggagatgattacaatgaggagaacccaactgaacccagcagcgatggcaccatctcagacaaggagattgctcacgatgttaaagctgtctgctcccaggaggccatgacggggccctgccgggccgtgatgcctcgttggtacttcgacctctccaagggaaagtgcgtacgctttatatatggcggctgcggcggcaacaggaacaattttgagtctgaggattattgtatggctgtgtgtaaaacgatgattcccccgactcccctgccaaccaatgatgtggacgtgtattttgagacgtcggctgatgacaatgagcacgcccgctttcagaaggctaaggagcagttggaaattcggcatcgcagccgaatggacagggtaaaaaaggagtgggaagaagcagaacttcaagccaagaacctccccaaggcagagcgacagaccctcattcagcatttccaagctatggttaaagccttagagaaggaagcagccagtgagaagcagcagcttgtggagacccatttggcccgagtagaagcaatgctgaatgaccgtcggcgcatagctctggaaaactacctggctgccctgcagtctgaccctcctcggccacatcgcattcttcaagctcttcgtcgttacgtccgtgctgagaacaaagatcgcctgcacaccattcgtcattaccaacatgtgttggctgttgacccagaaaaggctgcgcagatgaaatcccaggtgatgacacacctccatgtcattgaagaaagaaggaaccaaagtctctctctgctgtacaaagtgccttatgtggctcaagagattcaggaggaaattgatgagctccttcaggaacagcgagcagatatggaccagtttacctcctccatctcagagaaccctgtggatgtccgggtgagctctgaggaaagtgaggagatcccgccgttccaccctttccatcccttcccatccttgtctgagaacgaagacactcagccggagttgtaccacccaatgaaaaaagga

SEQ ID NO: 10053 - protein, 765 aa, Rattus norvegicus
  ref <308>: DATABASE ACCESSION NUMBER: SWISS-Prot / CAA54906
  ref <309>: DATABASE ENTRY DATE: 2001-10-16
MAATGTAAAAATGKLLVLLLLGLTAPAAALAGYIEALAANAGTGFAVAEPQIAMFCGKLNMHVNIQTGKWEPDPTGTKSCLGTKEEVLQYCQEIYPELQITNVMEANQPVNIDSWCRRDKKQCRSHIVIPFKCLVGEFVSDVLLVPENCQFFHQERMEVCEKHQRWHTVVKEACLTEGMTLYSYGMLLPCGVDQFHGTEYVCCPQTKVVDSDSTMSKEEEEEEEEDEEEDYALDKSEFPTEADLEDFTEAAADEDEDEEEEEEEEGEEVVEDRDYYYDSFKGDDYNEENPTEPSSDGTISDKEIAHDVKAVCSQEAMTGPCRAVMPRWYFDLSKGKCVRFIYGGCGGNRNNFESEDYCMAVCKTMIPPTPLPTNDVDVYFETSADDNEHARFQKAKEQLEIRHRSRMDRVKKEWEEAELQAKNLPKAERQTLIQHFQAMVKALEKEAASEKQQLVETHLARVEAMLNDRRRIALENYLAALQSDPPRPHRILQALRRYVRAENKDRLHTIRHYQHVLAVDPEKAAQMKSQVMTHLHVIEERRNQSLSLLYKVPYVAQEIQEEIDELLQEQRADMDQFTSSISENPVDVRVSSEESEEIPPFHPFHPFPSLSENEDTQPELYHPMKKGSGMAEQDGGLIGAEEKVINSKNKMDENMVIDETLDVKEMIFNAERVGGLEEEPDSVGPLREDFSLSSSALIGLLVIAVAIATVIVISLVMLRKRQYGTISHGIVEVHPMLTPEERHLNKMQNHGYENPTYKYLEQMQI

SEQ ID NO: 10054 - DNA, 3727 bp, Homo sapiens
  ref <308>: DATABASE ACCESSION NUMBER: Refseq / NM_001642
  ref <309>: DATABASE ENTRY DATE: 2002-11-04
gtcgcggtgtgctaagcgaggagtccgagtgtgtgagcttgagagccgcgcgctagagcgacccggcgagggatggcggccaccgggaccgcggccgccgcagccacgggcaggctcctgcttctgctgctggtggggctcacggcgcctgccttggcgctggccggctacatcgaggctcttgcagccaatgccggaacaggatttgctgttgctgagcctcaaatcgcaatgttttgtgggaagttaaatatgcatgtgaacattcagactgggaaatgggaacctgatccaacaggcaccaagagctgctttgaaacaaaagaagaagttcttcagtactgtcaggagatgtatccagagctacagatcacaaatgtgatggaggcaaaccagcgggttagtattgacaactggtgccggagggacaaaaagcaatgcaagagtcgctttgttacacctttcaagtgtctcgtgggtgaatttgtaagtgatgtcctgctagttccagaaaagtgccagtttttccacaaagagcggatggaggtgtgtgagaatcaccagcactggcacacggtagtcaaagaggcatgtctgactcagggaatgaccttatatagctacggcatgctgctcccatgtggggtagaccagttccatggcactgaatatgtgtgctgccctcagacaaagattattggatctgtgtcaaaagaagaggaagaggaagatgaagaggaagaggaagaggaagatgaagaggaagactatgatgtttataaaagtgaatttcctactgaagcagatctggaagacttcacagaagcagctgtggatgaggatgatgaggatgaggaagaaggggaggaagtggtggaggaccgagattactactatgacaccttcaaaggagatgactacaatgaggagaatcctactgaacccggcagcgacggcaccatgtcagacaaggaaattactcatgatgtcaaagctgtctgctcccaggaggcgatgacggggccctgccgggccgtgatgcctcgttggtacttcgacctctccaagggaaagtgcgtgcgctttatatatggtggctgcggcggcaacaggaacaattttgagtctgaggattattgtatggctgtgtgtaaagcgatgattcctccaactcctctgccaaccaatgatgttgatgtgtatttcgagacctctgcagatgataatgagcatgctcgcttccagaaggctaaggagcagctggagattcggcaccgcaaccgaatggacagggtaaagaaggaatgggaagaggcagagcttcaagctaagaacctccccaaagcagagaggcagactctgattcagcacttccaagccatggttaaagctttagagaaggaagcagccagtgagaagcagcagctggtggagacccacctggcccgagtggaagctatgctgaatgaccgccgtcggatggctctggagaactacctggctgccttgcagtctgacccgccacggcctcatcgcattctccaggccttacggcgttatgtccgtgctgagaacaaagatcgcttacataccatccgtcattaccagcatgtgttggctgttgacccagaaaaggcggcccagatgaaatcccaggtgatgacacatctccacgtgattgaagaaaggaggaaccaaagcctctctctgctctacaaagtaccttatgtagcccaagaaattcaagaggaaattgatgagctccttcaggagcagcgtgcagatatggaccagttcactgcctcaatctcagagacccctgtggacgtccgggtgagctctgaggagagtgaggagatcccaccgttccaccccttccaccccttcccagccctacctgagaacgaagacactcagccggagttgtaccacccaatgaaaaaaggatctggagtgggagagcaggatgggggactgatcggtgccgaagagaaagtgattaacagtaagaataaagtggatgaaaacatggtcattgacgagactctggatgttaaggaaatgattttcaatgccgagagagttggaggcctcgaggaagagcgggaatccgtgggcccactgcgggaggacttcagtctgagtagcagtgctctcattggcctgctggtcatcgcagtggccattgccacggtcatcgtcatcagcctggtgatgctgaggaagaggcagtatggcaccatcagccacgggatcgtggaggttgatccaatgctcaccccagaagagcgtcacctgaacaagatgcagaaccatggctatgagaaccccacctacaaatacctggagcagatgcagatttaggtggcagggagcgcggcagccctggcggagggatgcaggtgggccggaagatcccacgattccgatcgactgccaagcagcagccgctgccaggggctgcgtctgacatcctgacctcctggactgtaggactatataaagtactactgtagaactgcaatttccattcttttaaatgggtgaaaaatggtaatataacaatatatgatatataaaccttaaatgaaaaaaatgatctattgcagatatttgatgtagttttcttttttaaattaatcagaaaccccacttccattgtattgtctgacacatgctctcaatatataataaatgggaaatgtcgattttcaataatagacttatatgcaggctgtcgttccggttatgttgtgtaagtcaactcttcagcctcattcactgtcctggcttttatttaaagaaaaaaaaggcagtattccctttttaaatgagctttcaggaagttgctgagaaatggggtggaatagggaactgtaatggccactgaagcacgtgagagaccctcgcaaaatgatgtgaaaggaccagtttcttgaagtccagtgtttccacggctggatacctgtgtgtctccataaaagtcctgtcaccaaggacgttaaaggcattttattccagcgtcttctagagagcttagtgtatacagatgagggtgtccgctgctgctttccttcggaatccagtgcttccacagagattagcctgtagcttatatttgacattcttcactgtctgttgtttacctaccgtagctttttaccgttcacttccccttccaactatgtccagatgtgcaggctcctcctctctggactttctccaaaggcactgaccctcggcctctactttgtcccctcacctccaccccctcctgtcaccggccttgtgacattcactcagagaagaccacaccaaggaggggccgcggctggcccaggagagaacacggggaggtttgtttgtgtgaaaggaaagtagtccaggctgtccctgaaactgagtctgtggacactgtggaaagctttgaacaattgtgttttcgtcacaggagtctttgtaatgcttgtacagttgatgtcgatgctcactgcttctgctttttctttctttttattttaaaaaatctgaaggttctggtaacctgtggtgtatttttattttcctgtgactgtttttgttttgtttttttcctttttcctcccctttagccctattcatgtctctacccactatgcacagattaaacttcacctacaaactccttaatatgatctgtggagaatgtacacagtttaaacacatcaataaatactttaacttccaa

SEQ ID NO: 10055 - protein, 763 aa, Homo sapiens
  ref <308>: DATABASE ACCESSION NUMBER: SWISS-Prot / Q06481
  ref <309>: DATABASE ENTRY DATE: 2001-10-16
MAATGTAAAAATGRLLLLLLVGLTAPALALAGYIEALAANAGTGFAVAEPQIAMFCGKLNMHVNIQTGKWEPDPTGTKSCFETKEEVLQYCQEMYPELQITNVMEANQRVSIDNWCRRDKKQCKSRFVTPFKCLVGEFVSDVLLVPEKCQFFHKERMEVCENHQHWHTVVKEACLTQGMTLYSYGMLLPCGVDQFHGTEYVCCPQTKIIGSVSKEEEEEDEEEEEEEDEEEDYDVYKSEFPTEADLEDFTEAAVDEDDEDEEEGEEVVEDRDYYYDTFKGDDYNEENPTEPGSDGTMSDKEITHDVKAVCSQEAMTGPCRAVMPRWYFDLSKGKCVRFIYGGCGGNRNNFESEDYCMAVCKAMIPPTPLPTNDVDVYFETSADDNEHARFQKAKEQLEIRHRNRMDRVKKEWEEAELQAKNLPKAERQTLIQHFQAMVKALEKEAASEKQQLVETHLARVEAMLNDRRRMALENYLAALQSDPPRPHRILQALRRYVRAENKDRLHTIRHYQHVLAVDPEKAAQMKSQVMTHLHVIEERRNQSLSLLYKVPYVAQEIQEEIDELLQEQRADMDQFTASISETPVDVRVSSEESEEIPPFHPFHPFPALPENEDTQPELYHPMKKGSGVGEQDGGLIGAEEKVINSKNKVDENMVIDETLDVKEMIFNAERVGGLEEERESVGPLREDFSLSSSALIGLLVIAVAIATVIVISLVMLRKRQYGTISHGIVEVDPMLTPEERHLNKMQNHGYENPTYKYLEQMQI

SEQ ID NO: 10056 - DNA, 1969 bp, Rattus norvegicus; identical to SEQ ID NO: 10052
  ref <308>: DATABASE ACCESSION NUMBER: EMBL / X77934
  ref <309>: DATABASE ENTRY DATE: 2000-03-08

SEQ ID NO: 10057 - protein, 765 aa, Rattus norvegicus; identical to SEQ ID NO: 10053
  ref <308>: DATABASE ACCESSION NUMBER: SWISS-Prot / CAA54906
  ref <309>: DATABASE ENTRY DATE: 2001-10-16

SEQ ID NO: 10058 - DNA, 3727 bp, Homo sapiens; identical to SEQ ID NO: 10054
  ref <308>: DATABASE ACCESSION NUMBER: Refseq / NM_001642
  ref <309>: DATABASE ENTRY DATE: 2002-11-04

SEQ ID NO: 10059 - protein, 763 aa, Homo sapiens; identical to SEQ ID NO: 10055
  ref <308>: DATABASE ACCESSION NUMBER: SWISS-Prot / Q06481
  ref <309>: DATABASE ENTRY DATE: 2001-10-16

SEQ ID NO: 10060 - DNA, 2400 bp, Rattus norvegicus
  ref <308>: DATABASE ACCESSION NUMBER: EMBL / X78593
  ref <309>: DATABASE ENTRY DATE: 1994-12-19
ggtgaggccgactgactccgttctagctggaggttcctgacttccctgctcgccgacccctggcgtgtgacgaccgatctcaggctgagcaatggcgtttcaaaaggtagtgaaagggactattcttatgggtggaggagctctggccactgttttgggactctctcagtttgctcactacagaaggaagcaagtaagcctggcgtatgtggaagcagcaacatgcttctcagagcccgtgaacagggagcctccttccagagaagctcagctcatgactctgcagaacacatcggaatttgacatcctcgtcattggaggaggagccacaggatgtggctgtgcgctagacgccgtcaccagaggactgaaaacagcccttgtagagagaaatgacttcgcatcagggactagcagcagaagcactaaattgatccatggtggcgtacgatacctccagaaggctatcacgaacttggatgttgaacagtataggatggtgaaagaggcccttcatgaacgtgccaacttactagaaatcgctccccatctatcagctccgctgcctataatgctgccactttataagtggtggcagttaccttattactgggtgggaatcaagatgtatgatctggttgcaggaagtcattgcctgaagagcagttatgtcctcagtaaatccagagcccttgagcatttccccatgctccagaaggacaagctggtcggagccattgtctactatgatggacagcacaatgacgcccggatgaacctcgccatcgccctcaccgctgccaggtacggggctgccacggccaattacatggaggtggtgagcttgctcaagaagacagaccccgaaactgggaaagagcgcgtgagtggtgcccggtgcaaggacgtgctcacagggcatgagtttaacgtgagagctaaatgcgttatcaatgccaccggccctttcacagactccgtgcgcaaaatggatgataacgatgttgttcccatctgccagcccagtgcaggggttcacattgtgatgcccgggtactacagccccgagaacatgggacttcttgatcctgcaaccagtgatggcagagttattttcttcttgccttgggagaagatgacaattgcgggtaccactgattcgccaacggacgtcacgcaccatcctattccttcggaagacgacattaacttcatcttaaatgaagtgcggaactacctgagttgcgacgttgaagtgagaagaggggatgtcctggcagcgtggagtggcattcgcccgcttgttaccgatcccaagtctgcaaacactcagtccatctctcgaaatcatgttgtggaagtcagcgacagtggcctcatcacaatagcaggtgggaagtggaccacatatcgctccatggcagaagatactgtgaacaaagctgtcaagcttcacaacttgaatgcaggacccagtaggaccgttgggctcttccttcaaggaggcaaagattggagccccacactctacatcaggcttgtccaggactatgggcttgagagtgaggttgcacaacacctggccaaaacctatggtgacaaggctttcgacgtggccaaaatggcaagtgtgactggaaaacggtggcctgttgttggagtgcgtcttgtgtcagaatttccgtacatcgaagcagaggtgaaatatgggattaaggagtacgcatgcaccgctgttgacatgatttcacgtcgcacccgcctggcctttcttaatgttcaggctgcagaggaagccctgcccaagattgttgagttaatgggaagagaattgaactggagtgaattgaggaaacaggaagaacttgaaacagccacgaggtttctgtactatgaaatgggctataagtctcgaacagaacaactcacagatagtactgaaatcagcctgctgcctccagacatcgatcggtacaagaagagatttcacatgtttgatgaagacgaaaaaggcttcattaccattgttgatgttcaacgtgtgctagagagtatcaatgtacaaatggacgaagacacactacatgaaattctctgtgaagtagacttgaacaagaatggtcaggttgagctccatgagtttctgcagctgatgagcgcagttcatacaggaagggtgtctggaagccggcttgccatcctcatgaagactgccgaggagaacttggaccgtagagttccaatccccgtggatcgtagttgtggaggattgtgagtctgaccaataaatccacaaccaacaagcctaggacagtcagcactatgtacaaccagagacgacttaaaccactctaaaatagtggccattgtagctgcctttttttttttttttttttaaaa

SEQ ID NO: 10061 - protein, 727 aa, Rattus norvegicus
  ref <308>: DATABASE ACCESSION NUMBER: SWISS-Prot / P35571
  ref <309>: DATABASE ENTRY DATE: 2002-06-15
MAFQKVVKGTILMGGGALATVLGLSQFAHYRRKQVSLAYVEAATCFSEPVNREPPSREAQLMTLQNTSEFDILVIGGGATGCGCALDAVTRGLKTALVERNDFASGTSSRSTKLIHGGVRYLQKAITNLDVEQYRMVKEALHERANLLEIAPHLSAPLPIMLPLYKWWQLPYYWVGIKMYDLVAGSHCLKSSYVLSKSRALEHFPMLQKDKLVGAIVYYDGQHNDARMNLAIALTAARYGAATANYMEVVSLLKKTDPETGKERVSGARCKDVLTGHEFNVRAKCVINATGPFTDSVRKMDDNDVVPICQPSAGVHIVMPGYYSPENMGLLDPATSDGRVIFFLPWEKMTIAGTTDSPTDVTHHPIPSEDDINFILNEVRNYLSCDVEVRRGDVLAAWSGIRPLVTDPKSANTQSISRNHVVEVSDSGLITIAGGKWTTYRSMAEDTVNKAVKLHNLNAGPSRTVGLFLQGGKDWSPTLYIRLVQDYGLESEVAQHLAKTYGDKAFDVAKMASVTGKRWPVVGVRLVSEFPYIEAEVKYGIKEYACTAVDMISRRTRLAFLNVQAAEEALPKIVELMGRELNWSELRKQEELETATRFLYYEMGYKSRTEQLTDSTEISLLPPDIDRYKKRFHMFDEDEKGFITIVDVQRVLESINVQMDEDTLHEILCEVDLNKNGQVELHEFLQLMSAVHTGRVSGSRLAILMKTAEENLDRRVPIPVDRSCGGL

SEQ ID NO: 10062 - DNA, 2425 bp, Homo sapiens
  ref <308>: DATABASE ACCESSION NUMBER: EMBL / AK022596
  ref <309>: DATABASE ENTRY DATE: 2002-08-06
tataattatatgttaaataaggcacataaccagtttccaaggtcatcatggttgcttaaagtctttccccttctgtactccatggaaatattctcagtaaaccaaaaacaaaaatggaaaaataatcaccaacccccatcccgacacacacacacagtccaaagcaaaagtcagtgtgtattgaatttaacaagtaatgcagtttgggatgcttttgctacattttggtggcattttaactagttatctgaatatttattaatcgtacttcctcttgtaaagttaactacttacttttttgttgttgtttttttaacatcaggttctgtatctaataggagatgtaacactttatttcatggcaggtttttattgcagagacttgaagtcttagttttttaaactggcacataaaacactttttgctgttatttttatttatgtcaatactgcagagtatctttatgccttattcaagtggattctgagcctgtatgtcacaatgtaaacactggaggttcactcacctacgcactcacccaccacctctgaaagaaacagaaactgcagagaaagacagcatcttagctcattttgtttttaaatgaggttttagacgcttgccacttcctaagggaaatcctaaaacagagcaagtgatgctcccaggtatcactgtgaacttttttctttcaaagtgtgaatttttacactggctttttcatttttttaaagtaattgaagcttgtggctttacaacttagtgttttttgctatccagataacaagtttcattgtttagaacccagtgacacttaataggtagataaattgtcctttaaaatatcccagatgatatacacaatatggtacatttgtgctctctctctctgtttttctctctttctctttctagttagatcaagataacgatgacttgtaccctccctgattctgttacagtagggcccgggcagatctgtgtttgttaaacaggccttgtttgtgcatgctttgctatgaatgaagttcctttaaggacaaagaaaagcacacttttcttcttttgagcatatctgcttttactttaaatctgctaatttctaaaatgtagagtccttcaccaatcccagagactcaatttggaaatgaactgatttcaagccgttactgtgaataaagcaccccagcattttgtataagctcttaattaaacctgtacagcttctttacctgatttaagaaagggagacaagcaataggggggaataagcttcttcaaaattcattccaagcacaaaagaaattttttccctttgcatataaacttgacatcagttgattctgttggggtcggggtgggtatgcagggattgccttttattatcaagtgatttatttcaagagcctttgaggggattcaggtgaaggaacccccatctgtgctggagagttggatactcctttaaatagcccccaccacagtcataacaataatgataatgctggattatttgttaagccaaggttgtctgcctcatatccatcatgctgtttgcaatattcttgctttcaatcaatttatactgagtgtaactttaggatttctgctattaaatgcatgctctctatcctgcttcagtttctggctttgctttgtctgtttcaaaatatgtagcttcctcttttgtacaacaaaaaactcattctcacttttactaaatatactgtaggagtcatcattgatgttatttttcccttatgtatctgtaaagatttttggcatatgaatgtaatattaaagtcaatgatgctataacttgcgatgtttgcatcatgtcaacctttttgaaggagtgaaaaagccctactatgtttttaaatagcaagtgtaagctcagtgctagagtggatatacacaccgcatgttttcatatgtggcacttttatgtatcatgttgggttattgttctagactggactgttaaatactatgtttgaggctgggttgtcatttttataactgtcttggtgttttatggccattatttattacttttgatacacagaatgagctgcatgcatttatagagcaataagaggatgtatttaatgtgccttgtttttaactgaataagaactggaagcatgaatcaataaaactgattaaaatggtctatttgctagcattttgatgttacttgcagtcagataactttgattactgttgaagtttaaaaaaagtttgaaaatatttttacaaactgtgtttttgatgacacaaaagtgaaatatctacagagatagatgtaattttataagactgccagaattatttgtattaatttgttgctgtagcctttagggcatgacttctgtatttgtgcaatcctattctacaattacattcatcctattacaactc

SEQ ID NO: 10063 - protein, 727 aa, Homo sapiens
  ref <308>: DATABASE ACCESSION NUMBER: SWISS-Prot / AAB60403
  ref <309>: DATABASE ENTRY DATE: 2002-06-15
MAFQKAVKGTILVGGGALATVLGLSQFAHYRRKQMNLAYVKAADCISEPVNREPPSREAQLLTLQNTSEFDILVIGGGATGSGCALDAVTRGLKTALVERDDFSSGTSSRSTKLIHGGVRYLQKAIMKLDIEQYRMVKEALHERANLLEIAPHLSAPLPIMLPVYKWWQLPYYWVGIKLYDLVAGSNCLKSSYVLSKSRALEHFPMLQKDKLVGAIVYYDGQHNDARMNLAIALTAARYGAATANYMEVVSLLKKTDPQTGKVHVSGARCKDVLTGQEFDVRAKCVINATGPFTDSVRKMDDKDAAAICQPSAGVHIVMPGYYSPESMGLLDPATSDGRVIFFLPWQKMTIAGTTDTPTDVTHHPIPSEEDINFILNEVRNYLSCDVEVRRGDVLAAWSGIRPLVTDPKSADTQSISRNHVVDISESGLITIAGGKWTTYRSMAEDTINAAVKTHNLKAGPSRTVGLFLQGGKDWSPTLYIRLVQDYGLESEVAQHLAATYGDKAFEVAKMASVTGKRWPIVGVHLVSEFPYIEAEVKYGIKEYACTAVDMISRRTRLAFLNVQAAEEALPRIVELMGRELNWDDYKKQEQLETARKFLYYEMGYKSRSEQLTDRSEISLLPSDIDRYKKRFHKFDADQKGFITIVDVQRVLESINVQMDENTLHEILNEVDLNKNGQVELNEFLQLMSAIQKGRVSGSRLAILMKTAEENLDRRVPIPVDRSCGGL

SEQ ID NO: 10064 - DNA, 2400 bp, Rattus norvegicus; identical to SEQ ID NO: 10060
  ref <308>: DATABASE ACCESSION NUMBER: EMBL / X78593
  ref <309>: DATABASE ENTRY DATE: 1994-12-19

SEQ ID NO: 10065 - protein, 727 aa, Rattus norvegicus; identical to SEQ ID NO: 10061
  ref <308>: DATABASE ACCESSION NUMBER: SWISS-Prot / P35571
  ref <309>: DATABASE ENTRY DATE: 2002-06-15

SEQ ID NO: 10066 - DNA, 2425 bp, Homo sapiens; identical to SEQ ID NO: 10062
  ref <308>: DATABASE ACCESSION NUMBER: EMBL / AK022596
  ref <309>: DATABASE ENTRY DATE: 2002-08-06

SEQ ID NO: 10067 - protein, 727 aa, Homo sapiens; identical to SEQ ID NO: 10063
  ref <308>: DATABASE ACCESSION NUMBER: SWISS-Prot / AAB60403
  ref <309>: DATABASE ENTRY DATE: 2002-06-15

SEQ ID NO: 10068 - DNA, 2400 bp, Rattus norvegicus; identical to SEQ ID NO: 10060
  ref <308>: DATABASE ACCESSION NUMBER: EMBL / X78593
  ref <309>: DATABASE ENTRY DATE: 1994-12-19

SEQ ID NO: 10069 - protein, 727 aa, Rattus norvegicus; identical to SEQ ID NO: 10061
  ref <308>: DATABASE ACCESSION NUMBER: SWISS-Prot / P35571
  ref <309>: DATABASE ENTRY DATE: 2002-06-15

SEQ ID NO: 10070 - DNA, 2425 bp, Homo sapiens; identical to SEQ ID NO: 10062
  ref <308>: DATABASE ACCESSION NUMBER: EMBL / AK022596
  ref <309>: DATABASE ENTRY DATE: 2002-08-06

SEQ ID NO: 10071 - protein, 727 aa, Homo sapiens; identical to SEQ ID NO: 10063
  ref <308>: DATABASE ACCESSION NUMBER: SWISS-Prot / AAB60403
  ref <309>: DATABASE ENTRY DATE: 2002-06-15

SEQ ID NO: 10072 - DNA, 2400 bp, Rattus norvegicus; identical to SEQ ID NO: 10060
  ref <308>: DATABASE ACCESSION NUMBER: EMBL / X78593
  ref <309>: DATABASE ENTRY DATE: 1994-12-19

SEQ ID NO: 10073 - protein, 727 aa, Rattus norvegicus; identical to SEQ ID NO: 10061
  ref <308>: DATABASE ACCESSION NUMBER: SWISS-Prot / P35571
  ref <309>: DATABASE ENTRY DATE: 2002-06-15

SEQ ID NO: 10074 - DNA, 2425 bp, Homo sapiens; identical to SEQ ID NO: 10062
  ref <308>: DATABASE ACCESSION NUMBER: EMBL / AK022596
  ref <309>: DATABASE ENTRY DATE: 2002-08-06

SEQ ID NO: 10075 - protein, 727 aa, Homo sapiens; identical to SEQ ID NO: 10063
  ref <308>: DATABASE ACCESSION NUMBER: SWISS-Prot / AAB60403
  ref <309>: DATABASE ENTRY DATE: 2002-06-15

SEQ ID NO: 10076 - DNA, 943 bp, Rattus norvegicus
  ref <308>: DATABASE ACCESSION NUMBER: EMBL / X78603
  ref <309>: DATABASE ENTRY DATE: 1995-12-05
actccgcccgtgctgggtctgtcgatcctcgttccgtcaaggaccgtgaaggggtcaacgtgaggtcggtggggttagtaacgcggtggcggcggctcctcctccaaaatttgagcaggtacagggtgccaaacaggatgtacacgctgctttccgggctgtacaagtacatgttccagaaggatgaatactgcatcctgatcctgggcctggacaatgctgggaagacgaccttcctggaacagtcaaaaacacgatttaacaagaactacaagggaatgagtctatccaaaatcaccactaccgtgggtctaaacattggcactgtggacgtaggaaaggctcgtctcatgttttgggacttaggtgggcaggaagagctgcagtcgttgtgggacaagtactatgcagagtgccatggtgtcatctatgtcattgattccactgatgaggagaggctgtcagaatcaaaagaggcatttgagaaggtggtttcgagtgaagcactggacggtgttcccatcctggtgttggccaacaagcaggatgtggagacttgcctctccattcctgacatcaagactgcattcagtgactgtacctgcaagattggcaggcgagattgtttgacccaggcctgctctgccctcacaggcaagggagttcgagagggcatcgaatggatggtgaagtgtgtcgtacggaatgttcaccggccaccacggcagagggacatcacataagcaccttcatcctcacagtcttggactgttcatcccctagtgttggaagagtattctctgctggcttctgtcctcctgatgctgggggttgagctgggtttgtctgttcatttttatttgctttatgttttctctaagacaaacttttctctgtgtctggaaaagtgtaggtattcagagacaaaaaaaaaaaaaaaaaa

SEQ ID NO: 10077 - protein, 201 aa, Rattus norvegicus
  ref <308>: DATABASE ACCESSION NUMBER: SWISS-Prot / Q63055
  ref <309>: DATABASE ENTRY DATE: 2001-10-16
MYTLLSGLYKYMFQKDEYCILILGLDNAGKTTFLEQSKTRFNKNYKGMSLSKITTTVGLNIGTVDVGKARLMFWDLGGQEELQSLWDKYYAECHGVIYVIDSTDEERLSESKEAFEKVVSSEALDGVPILVLANKQDVETCLSIPDIKTAFSDCTCKIGRRDCLTQACSALTGKGVREGIEWMVKCVVRNVHRPPRQRDIT

SEQ ID NO: 10078 - DNA, 1559 bp, Homo sapiens
  ref <308>: DATABASE ACCESSION NUMBER: EMBL / X91504
  ref <309>: DATABASE ENTRY DATE: 1995-12-05
cgcagggcaggatgtacacgctgctgtcgggcttgtacaagtacatgtttcagaaggacgagtactgcatcctgatcctgggcctggacaatgctgggaagacgaccttcctggagcagtcgaaaacccgatttaacaagaactacaaggggatgagtctatccaaaatcaccaccaccgtgggcctaaacatcggcactgtggatgtgggaaaggctcggctcatgttctgggacttaggagggcaggaagagctgcagtctttgtgggacaagtattatgcggagtgtcacggcgtcatctacgtcattgactccaccgacgaggagaggctggctgagtccaagcaggcgtttgagaaggtggtgaccagcgaggcgctgtgcggtgtccccgtcttggtgctggccaacaagcaggatgtggagacgtgcctctcaatccctgacatcaagacggccttcagcgactgcaccagcaagatcggcaggcgcgattgcctgacccaggcctgctcggccctcacaggcaaaggggtgcgcgagggcatcgagtggatggtgaagtgtgtcgtgcggaatgtgcaccggccgccgcggcagagggacatcacgtagcggcagccgcgctgccgtcgggacggctggtcccctggtgctggaggagtggcctcctgttggctcccatgctgctgatctggggggtgggtttgctttgctttggggttcttctatttactttgttttctcgaagacaaactttcctctatgtctggaaaagcgtaggcatccggaggctttggaggggagtctggcagcccggctggcccaggccctgcagcggcagcctttccacagggcgcagcggcggcctttcgaggccctttctggggggtctgagggagacctggttgggaattggggctccagtgctcaggctggcttgggctgcatgaggacagccctgtgggaccctcgggagaccccgtggctgtctccgccccatcgaggaggaggcccgtcagccatggctgccatctggcttctgccctgtgaccccgtgaccccggaagtggtctggggctgatcttgccttgaggaagacccaggccatgttcccaaaggccagcgggggccctggattgtgatgcagcctcgggacagggctgaggcctgcgggggaagacctataccccacgcctgggcctggcttcacctcaccctaatcccccgggagggagctgactgatgcaaaaagctgagggggcctgctgggagtggctgtttttatgccccagccccgcaagttggggagtgtttgtgggggtccagagccctcccccagccaggagagaacctcccggaggggttctctgtggggccctgtgtcccctgctcgggagtaaggctggtcctggggtcctccctgcacggaccccactgggcctgccgagtgctgtgttcttcctcagtctggctgtgggcaggagcggcctgcccagtgtcacccagggtgagtgcaaaataaagacggcgagtgtgaaaaaaaaaaaaaaaaaa

SEQ ID NO: 10079 - protein, 201 aa, Homo sapiens
  ref <308>: DATABASE ACCESSION NUMBER: SWISS-Prot / Q13795
  ref <309>: DATABASE ENTRY DATE: 2002-06-15
MYTLLSGLYKYMFQKDEYCILILGLDNAGKTTFLEQSKTRFNKNYKGMSLSKITTTVGLNIGTVDVGKARLMFWDLGGQEELQSLWDKYYAECHGVIYVIDSTDEERLAESKQAFEKVVTSEALCGVPVLVLANKQDVETCLSIPDIKTAFSDCTSKIGRRDCLTQACSALTGKGVREGIEWMVKCVVRNVHRPPRQRDIT

SEQ ID NO: 10080 - DNA, 1483 bp, Rattus norvegicus
  ref <308>: DATABASE ACCESSION NUMBER: EMBL / X78606
  ref <309>: DATABASE ENTRY DATE: 1996-08-29
ccagcatcctcggacaccatgtcagactctgaggaggagagccaggaccggcaactgaaaatcgtcgtgctgggggacggcacctccgggaagacttccttagctacgtgttttgctcaagagacatttgggaaacagtacaagcagactataggactggatttctttttgagaaggattaccttaccaggaaatttgaatgttactcttcaagtttgggatataggagggcagacaataggtggcaagatgttggataaatacatctatggagcacagggaatcctcttggtatatgatattacaaactaccaaagctttgagaatttggaagattggtattctgtggtgaagacagtaagcgaagagtcagaaactcagcccctggttgctttagtaggcaataaaattgacttggagcatatgcgaacagtaaaacctgataaacacttacgattttgccaggaaaatggttttagtagccactttgtttcagccaagacgggagactctgtcttcctgtgttttcagaaagttgcggcagaaatcctgggaatcaagttaaacaaagcagaaatagaacagtcacagagagtggtgaaggcagatattgtaaactacaaccaggagcccatgtcaagaactgttaatccacctcggagctccatgtgtgcagttcagtgagcacacactgtattgatagttctggctgctcttccctggattgggcccaagctgcctaggaacatgttttatcagtgactgtctctgtagtcagctcacacttcctcctgctctgctccttcatcccttagtcgcctcagagtatcgggcagctccctggacaggaaggaattcagatttggaaccacatgttttgaaatctgaatggaaagtccattctctggattgagactgcctcctcgctccagaagaaccatgttgcttctttatctcttcttttttcccagatttaaaaaatttaaacagatatgaagatgctccacgctttgatcatcattttctatttgaacttgtatatgtgaacgtgtacttgagagcactgatggtggaagttatcaagaaggtgttcctttgctggctattaagagtaaactatacaaagctgcatctgattgaaagtgcttcaaatgaggctgcaatagaaatattttttcatttttaaaaggagcctaatgtgtttatattgtagtttataactcacaagtactgagtatttgatattgtatttttattactgtatcatggtcattgcatattttatcatatttggcttagatggctttatgaattttgataaatggttcagctgatcctccacatggaatttctcctacaggctgtatgagagtgcttccagatgagtcatgatatccttggatcattgtggatcgatcacactgtacctgatgttctgatgtttttctcacataaataaatttatttaaattaaaaaaaaaaa

SEQ ID NO: 10081 - protein, 221 aa, Rattus norvegicus
  ref <308>: DATABASE ACCESSION NUMBER: SWISS-Prot / P51158
  ref <309>: DATABASE ENTRY DATE: 1997-11-01
MSDSEEESQDRQLKIVVLGDGTSGKTSLATCFAQETFGKQYKQTIGLDFFLRRITLPGNLNVTLQVWDIGGQTIGGKMLDKYIYGAQGILLVYDITNYQSFENLEDWYSVVKTVSEESETQPLVALVGNKIDLEHMRTVKPDKHLRFCQENGFSSHFVSAKTGDSVFLCFQKVAAEILGIKLNKAEIEQSQRVVKADIVNYNQEPMSRTVNPPRSSMCAVQ

SEQ ID NO: 10082 - DNA, 1597 bp, Homo sapiens
  ref <308>: DATABASE ACCESSION NUMBER: EMBL / BC018067
  ref <309>: DATABASE ENTRY DATE: 2002-09-02
ggggaggtgggcaagatggcgcttgccgagtgattctcctcgaatacctcctgccggcgcggagacaccggggcgggggtcctgccgcaactacctcccttcctcctctcccccgcccccggagccttcatccttcccttccccccccacctcgaggggcgggcctggttcccgggacaccatgtcggactctgaggaggagagccaggaccggcaactgaaaatcgtcgtgctgggggacggcgcctccgggaagacctccttaactacgtgttttgctcaagaaacttttgggaaacagtacaaacaaactataggactggatttctttttgagaaggataacattgccaggaaacttgaatgttacccttcaaatttgggatataggagggcagacaataggaggcaaaatgttggataaatatatctatggagcacagttgatttggagcatatgcgaacaataaaacctgaaaaacacttacggttttgccaggaaaatggttttagtagccactttgtctcagccaagacaggagactctgtcttcctgtgctttcagaaagttgctgctgaaatccttgggatcaaattaaacaaagcagaaatagaacagtcacagagggtggtgaaggcagatattgtaaactacaaccaggaacctatgtcaaggactgttaaccctcctagaagctctatgtgtgcagttcagtgagcgcatttttcttttgtgttgatagttctggctgcccttcacctctgggtgggcccgaggacttctaggaacttgttttatcagtgaccatctctgtagttcagttaacactttactcccaacttgcttcatcattgctattgcctcacagtggcaggcagctccttggatttgaaagaattcaactttgggaccacacactttgaattcaaaatggaaaacccattccctggaattagactgcttcattgcaaaagaatgatgttgtttctttgtatgtccttgcttcttttttcattgatgtaaatttttttaacttaatatgaaaactctccaagtcttgatcatcatccaggattttgccacagcaatttcattctcttatcggaacttgtatgtgtcaaagtatacttcagagtgcaaacattaagcaagtaatatattttacctacagatacttatgaagacattctttcgctatcgtgagtaaaagtatataaagctgtttctaactgaaaatgcttgaaataagcctgtaatagaaatattttttcattttttaaaaaagggcctaaattgtttatattgtagtttgtaactcacaaagtaatatttgatattgtatttttattactgtatcgttgtcgttatgtattgtgtaatactcaggtttgaaggctttctgaattctgataaatgttcagctgatgctccacgtggaatttctcttgcaaactgcataagagtactcccgagaatgagttatgacattgtggatcagactgtacctgatgttcagatgtttttctttcacaaataaacttatttaaattaaaaaaaaaaaaaaaaaaaaaaaaaaaaaagaaaaaaaaaaaaaaaa

SEQ ID NO: 10083 - protein, 221 aa, Homo sapiens
  ref <308>: DATABASE ACCESSION NUMBER: SWISS-Prot / P51157
  ref <309>: DATABASE ENTRY DATE: 2002-06-15
MSDSEEESQDRQLKIVVLGDGTSGKTSLTTCFAQETFGKQYKQTIGLDFFLRRITLPGNLNVTLQIWDIGGQTIGGKMLDKYIYGAQGVLLVYDITNYQSFENLEDWYTVVKKVSEESETQPLVALVGNKIDLEHMRTIKPEKHLRFCQENGFSSHFVSAKTGDSVFLCFQKVAAEILGIKLNKAEIEQSQRVVKADIVNYNQEPMSRTVNPPRSSMCAVQ

SEQ ID NO: 10084 - DNA, 1838 bp, Rattus norvegicus
  ref <308>: DATABASE ACCESSION NUMBER: EMBL / X78949
  ref <309>: DATABASE ENTRY DATE: 1995-03-14
gaattccgcgggattccgccttcctcacggcccgctatccaggtgtgtgaacctgtggggtgctccaagatgatctggggtgtattaatgatggggattctacttcctcagtgttcagcccatccaggcttttttacttcaattggtcagatgactgacttgatccataatgagaaagacctggtgacgtcactaaaagattacattaaagcagaagaggacaagttagagcaaatcaaaaaatgggcagagaagttagaccggctaacaagtacagcaacaaaagatccagaagggtttgtcggacaccctgtaaatgcattcaagttaatgaaacgtctgaacaccgagtggagtgagttggagaatctgatcctcaaggatatgtcagatggcttcatctctaacctgaccattcagaggcagtacttccctaacgacgaagaccaggttggggctgcaaaagctttgtttcgtctgcaagacacctacaacctagacacgaataccatctcgaagggcaatcttccaggagtgaaacacaagtcttttctaacagctgaggactgctttgagttgggcaaagtggcctatacagaagcagattattaccacacagaactctggatggagcaggctctgatgcagctggaggagggagagatgtctactgtagacaaagtctcggttctagattatttgagctatgcagtgtaccagcagggtgacctggataaggcacttctgcttacaaagaaacttcttgaactagatcctgaacaccagagagccaatggtaacttagtatattttgagtatataatgagtaaagaaaaagatgccaataagtctgcttcgggtgagcgggctgatcagaaaactacaccaaagaaaaaggggattgctgtggactacctgccagagagacagaagtacgaaatgctgtgccgtggggagggtatcaaaatgactcctcggagacaaaaaaggctgttctgccgctaccatgatggaaaccggaatcctaaatttatcctggccccagccaagcaggaggatgagtgggacaagcctcgcatcattcgtttccatgacatcatctcagatgccgagattgagatcgtcaaagatttagcaaagcccaggctgagccgagctacagtacatgaccctgagactgggaaattgaccacagcacagtacagagtatctaagagtgcttggctgtctggctatgaagatcctgtggtgtctcgaattaatatgagaatacaagatctcacaggactggatgtttccacggcagaggaattacaggtagcaaattatggagttggaggacagtatgaaccccattttgactttgccaggaaagacgagccggatgcttttagagagcttgggacaggaaataggattgccacgtggctcttctacatgagtgatgtgtctgctggaggcgctactgtttttcctgaagtgggagccagtgtttggcccaaaaaaggcactgctgtcttctggtacaatctgtttgccagtggagaaggagattacagtacacggcacgcagcctgtcctgtgctagtgggaaacaaatgggtatccaacaaatggctccatgaacgtggacaggaatttcgaaggccgtgtaccctgtcagaattggaatgacaaccaggcttcccgtggctcctctcgtcctctaacgcaccaggcatgatcgctgactgtaacattcagaagtttacagctgactaacactccatgattaattcggccgtgaaccccatcccatgtttcatctgtggacaatcacttatttttgtgaatttttt

SEQ ID NO: 10085 - protein, 534 aa, Rattus norvegicus
  ref <308>: DATABASE ACCESSION NUMBER: SWISS-Prot / P54001
  ref <309>: DATABASE ENTRY DATE: 2002-06-15
MIWGVLMMGILLPQCSAHPGFFTSIGQMTDLIHNEKDLVTSLKDYIKAEEDKLEQIKKWAEKLDRLTSTATKDPEGFVGHPVNAFKLMKRLNTEWSELENLILKDMSDGFISNLTIQRQYFPNDEDQVGAAKALFRLQDTYNLDTNTISKGNLPGVKHKSFLTAEDCFELGKVAYTEADYYHTELWMEQALMQLEEGEMSTVDKVSVLDYLSYAVYQQGDLDKALLLTKKLLELDPEHQRANGNLVYFEYIMSKEKDANKSASGERADQKTTPKKKGIAVDYLPERQKYEMLCRGEGIKMTPRRQKRLFCRYHDGNRNPKFILAPAKQEDEWDKPRIIRFHDIISDAEIEIVKDLAKPRLSRATVHDPETGKLTTAQYRVSKSAWLSGYEDPVVSRINMRIQDLTGLDVSTAEELQVANYGVGGQYEPHFDFARKDEPDAFRELGTGNRIATWLFYMSDVSAGGATVFPEVGASVWPKKGTAVFWYNLFASGEGDYSTRHAACPVLVGNKWVSNKWLHERGQEFRRPCTLSELE

SEQ ID NO: 10086 - DNA, 2722 bp, Homo sapiens
  ref <308>: DATABASE ACCESSION NUMBER: EMBL / M24487
  ref <309>: DATABASE ENTRY DATE: 2000-03-04
gagcgggctgagggtaggaagtagccgctccgagtggaggcgactgggggctgaagagcgcgccgccctctcgtcccactttccaggtgtgtgatcctgtaaaattaaatcttccaagatgatctggtatatattaattataggaattctgcttccccagtctttggctcatccaggcttttttacttcaattggtcagatgactgatttgatccatactgagaaagatctggtgacttctctgaaagattatattaaggcagaagaggacaagttagaacaaataaaaaaatgggcagagaagttagatcggctaactagtacagcgacaaaagatccagaaggatttgttgggcatccagtaaatgcattcaaattaatgaaacgtctgaatactgagtggagtgagttggagaatctggtccttaaggatatgtcagatggctttatctctaacctaaccattcagagaccagtactttctaatgatgaagatcaggttggggcagccaaagctctgttacgtctccaggatacctacaatttggatacagataccatctcaaagggtaatcttccaggagtgaaacacaaatcttttctaacggctgaggactgctttgagttgggcaaagtggcctatacagaagcagattattaccatacggaactgtggatggaacaagccctaaggcaactggatgaaggcgagatttctaccatagataaagtctctgttctagattatttgagctatgcggtatatcagcagggagacctggataaggcacttttgctcacaaagaagcttcttgaactagatcctgaacatcagagagctaatggtaacttaaaatattttgagtatataatggctaaagaaaaagatgtcaataagtctgcttcagatgaccaatctgatcagaaaactacaccaaagaaaaaaggggttgctgtggattacctgccagagagacagaagtacgaaatgctgtgccgtggggagggtatcaaaatgacccctcggagacagaaaaaactcttttgccgctaccatgatggaaaccgtaatcctaaatttattctggctccagctaaacaggaggatgaatgggacaagcctcgtattattcgcttccatgatattatttctgatgcagaaattgaaatcgtcaaagacctagcaaaaccaaggctgaggcgagccaccatttcaaacccaataacaggagacttggagacggtacattacagaatttctaaaagtgcctggctctctggctatgaaaatcctgtggtgtctcgaattaatatgagaatacaagatctaacaggactagatgtttccacagcagaggaattacaggtagcaaattatggagttggaggacagtatgaaccccattttgactttgcacggaaagatgagccagatgctttcaaagagctggggacaggaaatagaattgctacatggctgttttatatgagtgatgtgtctgcaggaggagccactgtttttcctgaagttggagctagtgtttggcccaaaaaaggaactgctgttttctggtataatctgtttgccagtggagaaggagattatagtacacggcatgcagcctgtccagtgctagttggcaacaaatgggtatccaataaatggctccatgaacgtggacaagaatttcgaagaccttgtacgttgtcagaattggaatgacaaacaggcttccctttttctcctattgttgtactcttatgtgtctgatatacacatttccatagtcttaactttcaggagtttacaattgactaacactccatgattgattcagtcatgaacctcatcccatgtttcatctgtggacaattgcttactttgtgggttcttttaaaagtaacacgaaatcatcatattgcataaaaccttaaagttctgttggtatcacagaagacaaggcagagtttaaagtgaggaattttatatttaaagaactttttggttggataaaaacataatttgagcatccagttttagtatttcactacatctcagttggtgggtgttaagctagaatgggctgtgtgataggaaacaaatgccttacagatgtgcctaggtgttctgtttacctagtgtcttactctgttttctggatctgaagactagtaataaactaggacactaactgggttccatgtgattgccctttcatatgatcttctaagttgatttttttcctcccaagtcttttttaaagaaagtatactgtattttaccaaccccctctcttttcttttagctcctctgtggtgaattaaacgtacttgagttaaaatatttcgattttttttttttttttaatggaaagtcctgcataacaacactgggccttcttaactaaaatgctcaccacttagcctgtttttttatcccttttttaaaatgacagatgattttgttcaggaattttgctgtttttcttagtgctaataccttgcctcttattcctgctacagcagggtggtaatattggcattctgattaaatactgtgccttaggagactggaagtttaaaaatgtacaagtcctttcagtgatgagggaattgattttttttaaaagtctttttcttagaaagccaaaatgtttgtttttttaagattctgaaatgtgttgtgacaacaatgacctatttatgatcttaaatctttttt

SEQ ID NO: 10087 - protein, 534 aa, Homo sapiens
  ref <308>: DATABASE ACCESSION NUMBER: SWISS-Prot / P13674
  ref <309>: DATABASE ENTRY DATE: 2002-06-15
MIWYILIIGILLPQSLAHPGFFTSIGQMTDLIHTEKDLVTSLKDYIKAEEDKLEQIKKWAEKLDRLTSTATKDPEGFVGHPVNAFKLMKRLNTEWSELENLVLKDMSDGFISNLTIQRQYFPNDEDQVGAAKALLRLQDTYNLDTDTISKGNLPGVKHKSFLTAEDCFELGKVAYTEADYYHTELWMEQALRQLDEGEISTIDKVSVLDYLSYAVYQQGDLDKALLLTKKLLELDPEHQRANGNLKYFEYIMAKEKDVNKSASDDQSDQKTTPKKKGVAVDYLPERQKYEMLCRGEGIKMTPRRQKKLFCRYHDGNRNPKFILAPAKQEDEWDKPRIIRFHDIISDAEIEIVKDLAKPRLRRATISNPITGDLETVHYRISKSAWLSGYENPVVSRINMRIQDLTGLDVSTAEELQVANYGVGGQYEPHFDFARKDEPDAFKELGTGNRIATWLFYMSDVSAGGATVFPEVGASVWPKKGTAVFWYNLFASGEGDYSTRHAACPVLVGNKWVSNKWLHERGQEFRRPCTLSELE

SEQ ID NO: 10088 - DNA, 1838 bp, Rattus norvegicus; identical to SEQ ID NO: 10084
  ref <308>: DATABASE ACCESSION NUMBER: EMBL / X78949
  ref <309>: DATABASE ENTRY DATE: 1995-03-14

SEQ ID NO: 10089 - protein, 534 aa, Rattus norvegicus; identical to SEQ ID NO: 10085
  ref <308>: DATABASE ACCESSION NUMBER: SWISS-Prot / P54001
  ref <309>: DATABASE ENTRY DATE: 2002-06-15

SEQ ID NO: 10090 - DNA, 2722 bp, Homo sapiens; identical to SEQ ID NO: 10086
  ref <308>: DATABASE ACCESSION NUMBER: EMBL / M24487
  ref <309>: DATABASE ENTRY DATE: 2000-03-04

SEQ ID NO: 10091 - protein, 534 aa, Homo sapiens; identical to SEQ ID NO: 10087
  ref <308>: DATABASE ACCESSION NUMBER: SWISS-Prot / P13674
  ref <309>: DATABASE ENTRY DATE: 2002-06-15

SEQ ID NO: 10092 - DNA, 5240 bp, Rattus norvegicus
  ref <308>: DATABASE ACCESSION NUMBER: EMBL / X79321
  ref <309>: DATABASE ENTRY DATE: 1994-12-22
cctcccctggggaggttcgcgttcccgtggctcgcgcctgctgcccgccggcctcgagaacgcgctctctcggccgcggcgctcacagtctccgccacccaccagctccagcaccagcagcagcgccggcgccaccgcccaccttctgctgtcgccgccgccacaaccaccttcccctccgctgtcctcttctgtcctcgcctcctgtcgattatcaggctttgaagcagcatggctgaaccccgccaggagtttgacacaatggaagaccaggccggagattacactatgctccaagaccaagaaggagacatggaccatggcttaaaagctgaagaagcaggcatcggagacaccccgaacatggaggaccaagctgctgggcatgtgactcaagctcgagtggccggcgtaagcaaagacaggacaggaaatgacgagaagaaagcgaagggggccgatggcaaaacgggggcgaagatcgccacacctcggggagcagccactccgggccagaaaggcacatccaatgccaccaggatcccagccaagaccacacccagcccaaagactcctccaggatcaggtgaaccaccaaaatccggagaacgaagcggctacagcagccccggctcgcccggaacccctggcagtcgctcccgtaccccatccctaccaacgccgcccacccgagagcccaaaaaggtggcagtggttcgcactccccctaagtcaccgtctgccagtaagagccgcctacagactgcccctgtgcccatgccagacctaaagaacgtcaggtccaagattggctccactgagaacctgaagcaccagccgggaggcggcaaggtgcagataattaataagaagctggatcttagcaacgtccagtccaagtgtggctcaaaggacaatatcaaacacgtcccgggcggaggcagtgtgcaaatagtctacaagccagtggacctgagcaaggtgacctccaagtgtggttccttagggaacatccatcacaagccaggaggtggccaggtagaagtaaaatcagagaagctggacttcaaggatagagtccagtcgaagattggctccttggataacatcacccatgtccctggaggagggaataagaagattgaaacccacaagctgaccttcagggagaatgccaaagccaagacagaccatggagcagaaatcgtgcacaagtcacctgtggtgtctggggacacatctccacggcacctcagcaacgtctcctccacgggcagcatcgacatggtggactctccacagcttgccacgttagccgatgaagtgtccgcctctttggccaagcagggtttgtgatcaggcccctggggccgtcactgatcatggagagaagagagagtgagagtgtggaaaaaaaaaaaaaaagaatgacctggcccctcaccctctgccctccccgctgctcctcatagacaggctgaccagcttgtcacctaacctgcttttgtggctcgggtttggctcgggacttcaaaatcagtgatgggaaaaagtaaatttcatctttccaaattgatttgtgggctagtaataaaatatttttaaggaaggaaaaaaaaaacacgtaaaaccatggccaaacaaaacccaacatttccttggcaattgttattgaccccgcccccccctctgagttttagagggtgaaggaggctttggatagaggctgcttctggggattggctgagggactagggcaactaattgcccacagccccatcttaggggcatcagggacagcggcagacatgaaagacttgggacttggtgtgtttgtggagccgtaaggcgtatgttaactttgtgtgggtttgagggaggactgtgatagtgaaggctgagagatgggtgggctgggagtcagaggagagaggtgaggaagacaggttgggagagggggcattgcgtccttgccaaggagcttgggaagcacaggtagccctggctgcagcagtcttagctagcacagatgcctgcctgagaaagcacagtggggtacagtgggtgtgtgtgccccttctgaagggcagcccatgggagaaggggtattgggcagaaggaaggtaggccccagaaggtggcaccttgtagattggttctctgaaggctgaccttgccatcccagggcactgctcccaccctccaggaggaggtctgagctgaggagcttccttttcgatctcacaggaaaacctgtgttactgagttctgaagtttggaactacagccatgattttggccaccatacagacctgggactttagggctaaccagttctttgtaaggacttgtgcctcttgcgggaacatctgcctgttctcaagcctggtcctctggcacttctgcagtggtgagggatgggggtggtattctgggatgtgggtcccaggcctcccatccctcgcacagccactgtatcccctctacctgtcctatcatgcccacgtctgccacgagagccagtcactgccgtccgtacatcacgtctcaccgtcctgagtgcccagcctcccaagcccaatccctggacccctgggtagttatggccaatctgctctacactaggggttggagtccagggaaggcaaagatttgggccttggtctctagtcctacgttgccagaatccaaccagtgtgcctcccacaaggaaccttacaaccttgtttggtttgctccatcaggcgtttggcgccatcgtggatggagtccgtgtgtgcctggagattaccctggacacctctgctttttttttttttactttagcggttgcctcctaggcctgactccttcccatgttgaactggaggcagccaagttaggtgtcaatgtcctggcatcagtatgaacagtcagtagtcccagggcagggccacacttctcccatcttctgcttccaccccagcttgtgattgctagcctcccagagctcagccgccattaagtccccatgcacgtaatcagcccttccataccccaatttggggaacataccccttgattgaaatgttttccctccagtcctatggaagcggtgctgcctgcctgctggagcagccagccatctcagagacgcagccctttctctcctgtccgcaccctgctgcgctgtagtcggattcgtctgtttgtctgggttcaccagagtgactatgatagtgaaaagaaaaagaaaaagaaaaaagaaaaaagaaaaaaaaaaaaggacgcatgttatcttgaaatatttgtcaaaaggttgtagcccaccgcagggattggagggcctgatattccttgtcttcttcgtgacttaggtccaggccggtcgagtgctaccctgctggacatcccatgttttgaagggtttcttcttcatctgggacccctgcagacactggattgtgacattggaggtctatacattggccaaggctgaagcacaggacccgttagaggcagcaggctccgactgtcagggagagcttgtggctggcctgtttctctgagtgaagatggtcctctctaatcacaacttcaagtcccacagcagccctggcagacatctaagaactcctgcatcacaagagaaaaggacactagtaccagcagggagagctgtggccctagaaattccatgactctccactactatccgtgggtcctttccaagccttgcctcgtcaccaagggcttgggatggactgccccactgatgaaagggacatctttggagacccccttggtttccaaggcgtcagccccctgaccttgcatgacctcctacagctgaaggatgaggcctttaaagattaggaacctcaggcccaggtcggccactttgggcttgggtacagttagggacgatgcggtagaaggaggtggccaacctttccatataagagttctgtgtgcccagagctaccctattgtgagctccccactgctgatggactttagctgtccttagaagtgaagagtccaacggaggaaaaggaagtgtggtttgatggtctgtggtcccttcatcatggttacctgttgtggttttctctgtatacccccatttacccatcctgcagttcctgtccttgaataggggtgggggtactctgccatatctcttgtaggcagtcagcccccaagtcatagtttggagtgatctggtcagtgctaataggcagtttacaaggaattctggcttgttacttcagtgaggacaatcccccaaggccctggcacctgtcctgtctttccatggctctccactgcagagccaatgtctttgggtgggctagatagggtgtacaatttgcctggaacctccaagctcttaatccactttatcaatagttccatttaaattgacttcaatataagagtgtatccatttgagattgcttgtgttgtggggtaaaggggggaggaggaacatgttaagataattgacatgggcaaggggaagtcttgaagtgtagcagttaaaccatcttgtagccccattcatgatgttgaccacttgctagagagaagaggtgccataaggctagaacctagaggcttggctgtccaccaacaggcaggcttttgcaaggcagaggcagccagctaggtccctgacttcccagccaggtgcagctctaagaactgctcttgcctgctgccttcttgtggtgtccagagcccacagccaatgcctcctcaaaaccctggcttccttccttctaatccactggcacatcagcatcacctccggattgacttcagatccacagcctacactactagcagtgggtaagaccacttcctttgtccttgtctgttctccagaaaagtgggcatggaggcggtgttaataactataggtctgtggctttatgagccttcaaacttctctctagcttctgaaagggttacttttgggcagtattgcagtctcaccctccgatggctgtagcctgtgcagttgctgtactgggcatgatctccagtgcttgcaagtcccatgatttctttggtgttttgagggtggggggagggacatgaatcatcttagcttagcttcctgtctgtgaatgtccatatagtgtactgtgttttaacaaacgatttacactgactgttgctgtacaagtgaatttggaaataaagttattactctgattaaacaaaaaaaaaaaaaaaaaaaaaaaaaaaaaaaa

SEQ ID NO: 10093 - protein, 751 aa, Rattus norvegicus
  ref <308>: DATABASE ACCESSION NUMBER: SWISS-Prot / P19332
  ref <309>: DATABASE ENTRY DATE: 2002-06-15
AEPRQEFDTMEDQAGDYTMLQDQEGDMDHGLKESPPQPPADDGSEEPGSETSDAKSTPTAEDVTAPLVEERAPDKQATAQSHTEIPEGTTAEEAGIGDTPNMEDQAAGHVTQEPQKVEIFSQSLLVEPGRREGQAPDSGISDWTHQQVPSMSGAPLPPQGLREATHQPLGTRPEDVERSHPASELLWQESPQKEAWGKDRLGSEEEVDEDITMDESSQESPPSQASLAPGTATPQARSVSASGVSGETTSIPGFPAEGSIPLPADFFSKVSAETQASPPEGPGTGPSEEGHEAAPEFTFHVEIKASAPKEQDLEGATVVGAPAEEQKARGPSVGKGTKEASLLEPTDKQPAAGLPGRPVSRVPQLKARVAGVSKDRTGNDEKKAKTSTPSCAKTPSNRPCLSPTRPTPGSSDPLIKPSSPAVCPEPATSPKYVSSVTPRNGSPGTKQMKLKGADGKTGAKIATPRGAATPGQKGTSNATRIPAKTTPSPKTPPGSGEPPKSGERSGYSSPGSPGTPGSRSRTPSLPTPPTREPKKVAVVRTPPKSPSASKSRLQTAPVPMPDLKNVRSKIGSTENLKHQPGGGKVQIINKKLDLSNVQSKCGSKDNIKHVPGGGSVHIVYKPVDLSKVTSKCGSLGNIHHKPGGGQVEVKSEKLDFKDRVQSKIGSLDNITHVPGGGNKKIETHKLTFRENAKAKTDHGAEIVYKSPVVSGDTSPRHLSNVSSTGSIDMVDSPQLATLADEVSASLAKQGL

SEQ ID NO: 10094 - DNA, 2296 bp, Homo sapiens
  ref <308>: DATABASE ACCESSION NUMBER: EMBL / AF456477
  ref <309>: DATABASE ENTRY DATE: 2002-01-09
gcggccgcgtcgaccatgtatcttgaaatgcttgtaaagaggtttctaacccaccctcacgaggtgtctctcacccccacactgggactcgtgtggcctgtgtggtgccaccctgctggggcctcccaagttttgaaaggctttcctcagcacctgggacccaacagagaccagcttctagcagctaaggaggccgttcagctgtgacgaaggcctgaagcacaggattaggactgaagcgatgatgtccccttccctacttccccttggggctccctgtgtcagggcacagactaggtcttgtggctggtctggcttgcggcgcgaggatggttctctctggtcatagcccgaagtctcatggcagtcccaaaggaggcttacaactcctgcatcacaagaaaaaggaagccactgccagctggggggatctgcagctcccagaagctccgtgagcctcagccacccctcagactgggttcctctccaagctcgccctctggaggggcagcgcagcctcccaccaagggccctgcgaccacagcagggattgggatgaattgcctgtcctggatctgctctagaggcccaagctgcctgcctgaggaaggatgacttgacaagtcaggagacactgttcccaaagccttgaccagagcacctcagcccgctgaccttgcacaaactccatctgctgccatgagaaaagggaagccgcctttgcaaaacattgctgcctaaagaaactcagcagcctcaggcccaattctgccacttctggtttgggtacagttaaaggcaaccctgagggacttggcagtagaaatccagggcctcccctggggctggcagcttcgtgtgcagctagagctttacctgaaaggaagtctctgggcccagaactctccaccaagagcctccctgccgttcgctgagtcccagcaattctcctaagttgaagggatctgagaaggagaaggaaatgtggggtagatttggtggtggttagagatatgcccccctcattactgccaacagtttcggctgcatttcttcacgcacctcggttcctcttcctgaagttcttgtgccctgctcttcagcaccatgggccttcttatacggaaggctctgggatctcccccttgtgggggcaggctcttggggccagcctaagatcatggtttagggtgatcagtgctggcagataaattgaaaaggcacgctggcttgtgatcttaaatgaggacaatccccccagggctgggcactcctcccctcccctcacttctcccacctgcagagccagtgtccttgggtgggctagataggatatactgtatgccggctccttcaagctgctgactcactttatcaatagttccatttaaattgacttcagtggtgagactgtatcctgtttgctattgcttgttgtgctatggggggaggggggaggaatgtgtaagatagttaacatgggcaaagggagatcttggggtgcagcacttaaactgcctcgtaacccttttcatgatttcaaccacatttgctagagggagggagcagccacggagttagaggcccttggggtttctcttttccactgacaggctttcccaggcagctggctagttcattccctccccagccaggtgcaggcgtaggaatatggacatctggttgctttggcctgctgccctctttcaggggtcctaagcccacaatcatgcctccctaagaccttggcatccttccctctaagccgttggcacctctgtgccacctctcacactggctccagacacacagcctgtgcttttggagctgagatcactcgcttcaccctcctcatctttgttctccaagtaaagccacgaggtcggggcgagggcagaggtgatcacctgcgtgtcccatctacagacctgcggcttcataaaacttctgatttctcttcagctttgaaaagggttaccctgggcactggcctagagcctcacctcctaatagacttagccccatgagtttgccatgttgagcaggactatttctggcacttgcaagtcccatgatttcttcggtaattctgagggtggggggagggacatgaaatcatcttagcttagctttctgtctgtgaatgtctatatagtgtattgtgtgttttaacaaatgatttacactgactgttgctgtaaaagtgaatttggaaataaagttattactctgattaaaaaaaaaaaaaaaaaaaaaaaaaaaaaaaaaaaaaaaaaaaaaaaaaaaaaaaaaaaaa

SEQ ID NO: 10095 - protein, 383 aa, Homo sapiens
  ref <308>: DATABASE ACCESSION NUMBER: Refseq / NP_058518
  ref <309>: DATABASE ENTRY DATE: 2001-02-03
MAEPRQEFEVMEDHAGTYGLGDRKDQGGYTMHQDQEGDTDAGLKAEEAGIGDTPSLEDEAAGHVTQARMVSKSKDGTGSDDKKAKGADGKTKIATPRGAAPPGQKGQANATRIPAKTPPAPKTPPSSGEPPKSGDRSGYSSPGSPGTPGSRSRTPSLPTPPTREPKKVAVVRTPPKSPSSAKSRLQTAPVPMPDLKNVKSKIGSTENLKHQPGGGKVQIINKKLDLSNVQSKCGSKDNIKHVPGGGSVQIVYKPVDLSKVTSKCGSLGNIHHKPGGGQVEVKSEKLDFKDRVQSKIGSLDNITHVPGGGNKKIETHKLTFRENAKAKTDHGAEIVYKSPVVSGDTSPRHLSNVSSTGSIDMVDSPQLATLADEVSASLAKQGL

SEQ ID NO: 10096 - DNA, 1374 bp, Rattus norvegicus
  ref <308>: DATABASE ACCESSION NUMBER: EMBL / X80130
  ref <309>: DATABASE ENTRY DATE: 1994-07-29
aggcctgccaccagcgccagcccagctgaacccagccgcccaaagcacgcctacagatcccacagaagctgtaccaggatgtgtgacgacgaggagaccacagctttggtgtgcgacaatggctccggactggtgaaggctggctttgcgggtgatgatgctcccagagctgtcttcccatccatcgtgggtcgcccacgccaccagggtgtcatggtaggtatggggcagaaagactcctatgtaggtgacgaggctcagagcaagcgaggcatcctgactctgaagtaccccatagagcacggcattatcaccaactgggacgacatggagaagatctggcaccacaccttctacaatgagctccgtgtggcccctgaggagcacccgaccctgctcactgaggccccactgaaccccaaggccaaccgtgagaagatgacacagatcatgtttgagaccttcaatgtgcctgccatgtatgtggccatccaggcggtgctgtccctgtacgcttctgggagaaccacaggcattgttctggattctggcgacggtgtgactcataacgtccccatctatgagggttatgccttaccccatgccatcatgcgtctggatctagctggtcgggacctcactgactaccttatgaagatcctcactgagcgcgggtactcctttgtcaccaccgctgaacgtgaaattgtccgagacatcaaagaaaaactgtgttatgtcgccctggattttgagaatgagatggccaccgctgcatcttcctcctctctggagaagagctacgaacttcccgatggccaggtcatcaccattggcaacgagcgtttccgctgtcctgagactctcttccagccctctttcattggtatggagtctgccggcattcacgaaactacttataacagcatcatgaagtgtgacatcgatatccgcaaagacctgtacgccaacaatgtcctgtctggaggcaccaccatgtaccctgggattgctgatcgtatgcaaaaggaaataactgcactggctcccagcaccatgaagattaagattattgctccccctgagcgtaaatactctgtctggattgggggctccatcctggcctctctgtctaccttccaacaaatgtggatcagcaagcaagagtacgatgaggccgggccctccattgtccaccgcaagtgcttctgaggcggctaccttacactcaggacgacagtattgtgcttggaatcctctgaggccctctcccatctcccatcagtcattgtacagtttgtttacacacgtgcagtttgtttgtgcttcaaatatttattgctttataaataaaccagaccaggacttgcaacc

SEQ ID NO: 10097 - protein, 377 aa, Rattus norvegicus
  ref <308>: DATABASE ACCESSION NUMBER: SWISS-Prot / CAA56429
  ref <309>: DATABASE ENTRY DATE: 2002-06-15
MCDDEETTALVCDNGSGLVKAGFAGDDAPRAVFPSIVGRPRHQGVMVGMGQKDSYVGDEAQSKRGILTLKYPIEHGIITNWDDMEKIWHHTFYNELRVAPEEHPTLLTEAPLNPKANREKMTQIMFETFNVPAMYVAIQAVLSLYASGRTTGIVLDSGDGVTHNVPIYEGYALPHAIMRLDLAGRDLTDYLMKILTERGYSFVTTAEREIVRDIKEKLCYVALDFENEMATAASSSSLEKSYELPDGQVITIGNERFRCPETLFQPSFIGMESAGIHETTYNSIMKCDIDIRKDLYANNVLSGGTTMYPGIADRMQKEITALAPSTMKIKIIAPPERKYSVWIGGSILASLSTFQQMWISKQEYDEAGPSIVHRKCF

SEQ ID NO: 10098 - DNA, 1294 bp, Homo sapiens
  ref <308>: DATABASE ACCESSION NUMBER: Refseq / NM_005159
  ref <309>: DATABASE ENTRY DATE: 2002-11-05
atgtgtgacgacgaggagaccaccgccctggtgtgcgacaacggctctgggctggtgaaggccggctttgcgggcgatgacgcgccccgcgctgtcttcccgtccatcgtgggccgcccgcggcaccagggagttatggtgggtatgggtcagaaggactcctacgtaggtgatgaagcccagagcaagagaggcatcctgaccctgaagtatcccatcgagcatggtatcatcaccaactgggacgacatggagaagatctggcaccacaccttctacaatgagctccgtgttgctcccgaggagcaccccaccctgctcacagaggccccgctgaaccccaaggccaaccgggagaagatgactcagatcatgtttgagaccttcaatgtccctgccatgtacgtggccatccaggcagtgctatccctgtatgcttctggccgtaccacaggcattgttctggactctggggatggtgtaactcacaatgtccccatctatgagggctacgctttgccccatgccatcatgcgtctggatctggctggtcgggacctcactgactacctcatgaagatcctcactgagcgtggctactcctttgtcaccactgctgaacgtgaaattgtccgtgacattaaagagaagctgtgctatgtcgccctggattttgagaatgagatggccacagctgcctcttcctcctccttggagaagagctatgaactgcctgatggccaagtcatcactatcggcaatgagcgcttccgctgtcctgagacactcttccagccctccttcattggtatggaatctgctggcatccatgaaacaacttacaatagcatcatgaagtgtgacattgatatccgcaaggacctgtatgccaacaatgtcttatctggaggcaccactatgtaccctggtattgctgatcgtatgcagaaggaaatcactgctctggctcctagcaccatgaagattaagattattgctccccctgagcgtaaatactctgtctggattgggggctccatcttggcctctctgtccaccttccagcaaatgtggattagcaagcaagagtacgatgaggcaggcccatccattgtccaccgcaaatgcttctaagatgccttctctctccatctaccttccagtcaggatgacggtattatgcttcttggagtctcccaaaccaccttccctcatctttcatcaatcattgtacagtttgtttacacacgtgcaatttgtttgtgcttctaatatttattgctttataaataaa

SEQ ID NO: 10099 - protein, 377 aa, Homo sapiens; identical to SEQ ID NO: 10097
  ref <308>: DATABASE ACCESSION NUMBER: SWISS-Prot / P04270
  ref <309>: DATABASE ENTRY DATE: 2002-06-15

SEQ ID NO: 10100 - DNA, 1374 bp, Rattus norvegicus; identical to SEQ ID NO: 10096
  ref <308>: DATABASE ACCESSION NUMBER: EMBL / X80130
  ref <309>: DATABASE ENTRY DATE: 1994-07-29

SEQ ID NO: 10101 - protein, 377 aa, Rattus norvegicus; identical to SEQ ID NO: 10097
  ref <308>: DATABASE ACCESSION NUMBER: SWISS-Prot / CAA56429
  ref <309>: DATABASE ENTRY DATE: 2002-06-15

SEQ ID NO: 10102 - DNA, 1294 bp, Homo sapiens; identical to SEQ ID NO: 10098
  ref <308>: DATABASE ACCESSION NUMBER: Refseq / NM_005159
  ref <309>: DATABASE ENTRY DATE: 2002-11-05

SEQ ID NO: 10103 - protein, 377 aa, Homo sapiens; identical to SEQ ID NO: 10097
  ref <308>: DATABASE ACCESSION NUMBER: SWISS-Prot / P04270
  ref <309>: DATABASE ENTRY DATE: 2002-06-15

SEQ ID NO: 10104 - DNA, 1374 bp, Rattus norvegicus; identical to SEQ ID NO: 10096
  ref <308>: DATABASE ACCESSION NUMBER: EMBL / X80130
  ref <309>: DATABASE ENTRY DATE: 1994-07-29

SEQ ID NO: 10105 - protein, 377 aa, Rattus norvegicus; identical to SEQ ID NO: 10097
  ref <308>: DATABASE ACCESSION NUMBER: SWISS-Prot / CAA56429
  ref <309>: DATABASE ENTRY DATE: 2002-06-15

SEQ ID NO: 10106 - DNA, 1294 bp, Homo sapiens; identical to SEQ ID NO: 10098
  ref <308>: DATABASE ACCESSION NUMBER: Refseq / NM_005159
  ref <309>: DATABASE ENTRY DATE: 2002-11-05

SEQ ID NO: 10107 - protein, 377 aa, Homo sapiens; identical to SEQ ID NO: 10097
  ref <308>: DATABASE ACCESSION NUMBER: SWISS-Prot / P04270
  ref <309>: DATABASE ENTRY DATE: 2002-06-15

SEQ ID NO: 10108 - DNA, 1374 bp, Rattus norvegicus; identical to SEQ ID NO: 10096
  ref <308>: DATABASE ACCESSION NUMBER: EMBL / X80130
  ref <309>: DATABASE ENTRY DATE: 1994-07-29

SEQ ID NO: 10109 - protein, 377 aa, Rattus norvegicus; identical to SEQ ID NO: 10097
  ref <308>: DATABASE ACCESSION NUMBER: SWISS-Prot / CAA56429
  ref <309>: DATABASE ENTRY DATE: 2002-06-15

SEQ ID NO: 10110 - DNA, 1294 bp, Homo sapiens; identical to SEQ ID NO: 10098
  ref <308>: DATABASE ACCESSION NUMBER: Refseq / NM_005159
  ref <309>: DATABASE ENTRY DATE: 2002-11-05

SEQ ID NO: 10111 - protein, 377 aa, Homo sapiens; identical to SEQ ID NO: 10097
  ref <308>: DATABASE ACCESSION NUMBER: SWISS-Prot / P04270
  ref <309>: DATABASE ENTRY DATE: 2002-06-15

SEQ ID NO: 10112 - DNA, 1593 bp, Rattus norvegicus
  ref <308>: DATABASE ACCESSION NUMBER: EMBL / X80395
  ref <309>: DATABASE ENTRY DATE: 1997-03-17
atggaacccaccgcgccaaccggtcaggcccgggcggcggccaccaaactgtcggaagcggtgggagccgcgctacaagagccccagaggcagcggcgcctggtgctggtcatcgtgtgcgttgcactgttactggacaacatgttgtacatggtcatcgtgcccattgttcccgactatatcgcccacatgcgcgggggcagcgagggcccgaccctggtctctgaggtgtgggaacccactctgccgccgcccactctggctaatgccagtgcctacttggccaacacgtcggcgtccccgacggctgccgggtcggctcggtcaatcctgcgacctcgctaccccacagaaagcgaagatgtgaagataggtgtgctgtttgcctccaaggctatcctgcagcttctggtgaaccccttaagcgggcctttcattgatcgcatgagctacgacgtgccgctgcttataggcctgggcgtcatgttcgcctccacagtcatgtttgcctttgcagaagactatgccacgctcttcgctgcgcgcagtctacaaggcctgggctcggccttcgcggacacgtctggcattgccatgatcgccgacaagtatcccgaggagcctgagcgcagtcgtgccctgggcgtggcgctagcctttattagctttggaagcctagtggcgccaccgtttgggggcatcctctacgagttcgcgggcaagcgtgtaccctttctagtgctcgccgctgtgtcccttttcgacgcgctcctgctcctggcggtggctaagcccttctcggctgcggctcgggcgcgagccaacctgccggtgggcacacctatccatcgcctcatgctagacccttacatcgctgtggtagccggcgcgctcaccacttgtaacattccccttgcgttcctcgagcccaccatagccacgtggatgaagcacacaatggccgcatccgagtgggagatgggcatggtttggctgccggctttcgtgccacacgtgttaggcgtctacctcaccgtgcgcctggcggcgcgttatccacacctgcagtggctgtacggcgctctcgggctagcggtaattggagtgagctcttgcgtcgtacctgcctgtcgctcattcgcgccgttagtggtctcgctctgcggactctgcttcggcatcgcgttagtggacacagcgctcctacccacgctcgcctttctggtggacgtgcgccacgtatccgtctatggcagtgtctatgccatagctgacatctcctattctgtggcctacgcgctcgggcccatagtggcaggccacatcgttcactctcttggctttgagcagctcagcctgggcatgggcctggccaacctgctctacgcaccagtccttcttcttttgcgcaatgtaggcctccttacacgctcgcgttcggagcgcgatgtgttgcttgatgaaccgccgcagggtctgtacgacgcggtgcgcctgcgtgaggtgcagggcaaggatggcggcgaaccttgtagcccacctggcccttttgacgggtgcgaggacgactacaactattactcccgcagctag

SEQ ID NO: 10113 - protein, 530 aa, Rattus norvegicus; identical to SEQ ID NO: 8030
  ref <308>: DATABASE ACCESSION NUMBER: SWISS-Prot / CAA56604
  ref <309>: DATABASE ENTRY DATE: 2003-02-01

SEQ ID NO: 10114 - DNA, 2421 bp, Homo sapiens; identical to SEQ ID NO: 8031
  ref <308>: DATABASE ACCESSION NUMBER: Refseq / NM_003055
  ref <309>: DATABASE ENTRY DATE: 2000-10-31

SEQ ID NO: 10115 - protein, 532 aa, Homo sapiens; identical to SEQ ID NO: 8032
  ref <308>: DATABASE ACCESSION NUMBER: Refseq / NP_003046
  ref <309>: DATABASE ENTRY DATE: 2000-10-31

SEQ ID NO: 10116 - DNA, 1694 bp, Rattus norvegicus
  ref <308>: DATABASE ACCESSION NUMBER: EMBL / X82021
  ref <309>: DATABASE ENTRY DATE: 1996-01-14
gcgtcgacgggcttggcatcgggcctccgcagccgcccaccgccagaagcttccagcctcaccactatggatccccgcaaagtgagcgagcttcgggccttcgtgaagatgtgtaggcaggacccgagcgtcctgcacaccgaggaaatgcgtttcctgagggagtgggtggagagcatggggggtaaagtaccacctgctactcataaagcgaagtcagaagaaaacactaaggaagaaaaaagagacaagacgacagaggacaacataaagacagaggagccatcgagtgaggagagcgatctagaaattgacaatgaaggtgtaattgaagcagacactgatgctcctcaggaaatgggagatgaaaatgcagagataactgaggcgatgatggatgaagcaaatgaaaagaagggggctgccatcgacgctctaaatgatggtgagctccagaaagccattgacttgttcacagacgccatcaagctaaaccctcgcttggccattctgtatgccaagagagccagtgttttcgtcaaattacagaagccaaatgctgccatccgagactgtgacagagctattgaaataaaccctgattcagctcagccatacaaatggagagggaaagcgcacagactcctgggtcactgggaagaagcagctcgcgatcttgccctggcctgtaaattggactatgatgaggacgccagtgcaatgctgagagaagtccagcctcgggctcaaaaaattgctgaacatcggagaaagtatgagcgaaaacgtgaagagcgagagataaaagaacgaatagaaagggtgaagaaggctcgagaagagcatgaaaaagcccaaagggaagaagaagccagaagacaatctggatctcagtttggctcttttccaggtggttttcctgggggaatgcctggtaattttcctggaggaatgcctggaatgggaggggccatgccaggaatggcaggaatgcctggactcaacgaaatcctcagtgacccagaggttcttgcagccatgcaggatccagaagtcatggtggctttccaggatgtggcccagaacccatcaaatatgtcaaaatatcagaacaacccaaaggttatgaatctcatcagtaaattgtcagccaagtttggaggtcactcataatgtcaaagcccttgctgaatgaagaacagcttagctcacttactggatgttgcaataatacaaaccagtgtacctctgacctcaccagagagctggggcgcttcgaagataatccctaccctctgcatcatatgcggctgaggcatattacagtggtttgccattagagtgttcattcagataatgttttcctattaggaattacaaacttaaaacatttttcaaccttaaacatattttttaaaaatttaggggatgtcaattcctacatttttcgttactaatctttttgggtttttccttttgaattactgggcaaggaaggtgaatgtggatgatttactgctttcatgaatgaaataaagatttgttagtgggaagcaaataaaacacatttaagttgattgagtcggacatacggttactgcaacatcttgaattgtctttaatgttttacttcacaatgatctatttcagtaaatcttttgggaccaccaaaaaaaaaaaaaaaaaaaaaaaaa

SEQ ID NO: 10117 - protein, 368 aa, Rattus norvegicus
  ref <308>: DATABASE ACCESSION NUMBER: SWISS-Prot / P50503
  ref <309>: DATABASE ENTRY DATE: 1996-10-01
MDPRKVSELRAFVKMCRQDPSVLHTEEMRFLREWVESMGGKVPPATHKAKSEENTKEEKRDKTTEDNIKTEEPSSEESDLEIDNEGVIEADTDAPQEMGDENAEITEAMMDEANEKKGAAIDALNDGELQKAIDLFTDAIKLNPRLAILYAKRASVFVKLQKPNAAIRDCDRAIEINPDSAQPYKWRGKAHRLLGHWEEAARDLALACKLDYDEDASAMLREVQPRAQKIAEHRRKYERKREEREIKERIERVKKAREEHEKAQREEEARRQSGSQFGSFPGGFPGGMPGNFPGGMPGMGGAMPGMAGMPGLNEILSDPEVLAAMQDPEVMVAFQDVAQNPSNMSKYQNNPKVMNLISKLSAKFGGHS

SEQ ID NO: 10118 - DNA, 3145 bp, Homo sapiens
  ref <308>: DATABASE ACCESSION NUMBER: EMBL / U17714
  ref <309>: DATABASE ENTRY DATE: 2000-03-04
gcggtcacgccgagccagcgcctgggcctggaaccgggccgtagccccccagtttcgcccaccacctccctaccatggacccccgcaaagtgaacgagcttcgggcctttgtgaaaatgtgtaagcaggatccgagcgttctgcacaccgaggaaatgcgcttcctgagggagtgggtggagagcatgggtggtaaagtaccacctgctactcagaaagctaaatcagaagaaaataccaaggaagaaaaacctgatagtaagaaggtggaggaagacttaaaggcagacgaaccatcaagtgaggaaagtgatctagaaattgataaagaaggtgtgattgaaccagacactgatgctcctcaagaaatgggagatgaaaatgcggagataacggaggagatgatggatcaggcaaatgataaaaaagtggctgctattgaagccctaaatgatggtgaactccagaaagccattgacttattcacagatgccatcaagctgaatcctcgcttggccattttgtatgccaagagggccagtgtcttcgtcaaattacagaagccaaatgctgccatccgagactgtgacagagccattgaaataaatcctgattcagctcagccttacaagtggcgggggaaagcacacagacttctaggccactgggaagaagcagcccatgatcttgcccttgcctgtaaattggattatgatgaagatgctagtgcaatgctgaaagaagttcaacctagggcacagaaaattgcagaacatcggagaaagtatgagcgaaaacgtgaagagcgagagatcaaagaaagaatagaacgagttaagaaggctcgagaagagcatgagagagcccagagggaggaagaagccagacgacagtcaggagctcagtatggctcttttccaggtggctttcctgggggaatgcctggtaattttcccggaggaatgcctggaatgggagggggcatgcctggaatggctggaatgcctggactcaatgaaattcttagtgatccagaggttcttgcagccatgcaggatccagaagttatggtggctttccaggatgtggctcagaacccagcaaatatgtcaaaataccagagcaacccaaaggttatgaatctcatcagtaaattgtcagccaaatttggaggtcaagcgtaatgtccttctgataaataaagcccttgctgaaggaaaagcaacctagatcaccttatggatgtcgcaataatacaaaccagtgtacctctgaccttctcatcaagagagctggggtgctttgaagataatccctacccctctcccccaaatgcagctgaagcattttacagtggtttgccattagggtattcattcagataatgttttcctactaggaattacaaactttaaacactttttaaatcttcaaaatatttaaaacaaatttaaagggcctgttaattcttatatttttctttactaatcattttggatttttttctttgaattattggcagggaatatacttatgtatggaagattactgctctgagtgaaataaaagttattagtgcgaggcaaacataactcatttgaggataaagtttgtgttggatatgtggttcctgatgcattttgacttgtctttttaaatgctttatctttttctttaaagatttatttcaataaaactaattgggaccacccgtatttcagtaggacctgggtagggattggaagtacttggcagggcagcagcaatcttgctgtgtttgatataacatgcatccttgggcaggttgcccttaaatcttacactgtggtgaagggatgttttttttgtaatgctgcagtagagttggagtacttagttctcttgttgtccagtatatctaataagtgtttttcatattatttccacgtaagggaaataaggtagtacttttctttttatatttctatgcttaaaattctctttcctagtcaaaaattgcccaaatctgtgtttgctttctgcttgctacatttgtctcccttacttttcttgagctaaagacaggctttttccaccggcatcatcactgctatcatcattaacagcgtaattatacaagcatatttaatgctgagtttaatttaatatgtaatacatatggtaattgtagggtaatacccacaacaactgtagtttcttacttggccaagagaatgcttatttaagtgttagacttccattctggcaaaatcttgccttatcagaagacattggaaagagggattccctttggtgtttggtcttctacttagaaaaacctattgcagttagtttatcttgtagtattcatctttgtattctgaagataaggtttgaattaaattgatacacacagaggggaaccgattttttttatccaatgtgaattataaatgagataatccacagttattcattgtggagttgttgagactatgaaagactcattgtctttgtattcagctcttaaatagtgtaactatatccccacctctgcttgctttctttccctcccctccaatgataaagaaaatgataaattttctgttgtgcattcaattcttattttaaataagactaagtataggcattgtacctgacattgctacgtttctaccagtgtttcaatttaaagtgctagtgtttaaaaacattttcaagggataaggccttctgtactttgcttatttgaagaatcagtggtaggagcagtgaagtaaattctatggagtacatttctaaaataccacatttctgaaatcataaataagtttattcaggttctaaccctttgctgtacacaagcagacagaaatgcatctgttacataaatgagaaaaagctattatgctgatggagcatgctttttaaatcctttaaaaacactcaccatataaacttgcatttgagcttgtgtgttcttttgttaatgtgtagagttctcctttctcgaaattgccagtgtgtacttggcttaactcaagaacagtttcttctggattccttatttgatttatttaacctaattatattctaatattgcaaatattaccataagtgggtaaaagtaaaattcctcttctgaaaaaaaaaaaaaaaaaaaaaa

SEQ ID NO: 10119 - protein, 369 aa, Homo sapiens
  ref <308>: DATABASE ACCESSION NUMBER: SWISS-Prot / P50502
  ref <309>: DATABASE ENTRY DATE: 2002-06-15
MDPRKVNELRAFVKMCKQDPSVLHTEEMRFLREWVESMGGKVPPATQKAKSEENTKEEKPDSKKVEEDLKADEPSSEESDLEIDKEGVIEPDTDAPQEMGDENAEITEEMMDQANDKKVAAIEALNDGELQKAIDLFTDAIKLNPRLAILYAKRASVFVKLQKPNAAIRDCDRAIEINPDSAQPYKWRGKAHRLLGHWEEAAHDLALACKLDYDEDASAMLKEVQPRAQKIAEHRRKYERKREEREIKERIERVKKAREEHERAQREEEARRQSGAQYGSFPGGFPGGMPGNFPGGMPGMGGGMPGMAGMPGLNEILSDPEVLAAMQDPEVMVAFQDVAQNPANMSKYQSNPKVMNLISKLSAKFGGQA

SEQ ID NO: 10120 - DNA, 3949 bp, Rattus norvegicus
  ref <308>: DATABASE ACCESSION NUMBER: EMBL / X82669
  ref <309>: DATABASE ENTRY DATE: 1998-02-20
agtttcacttctgctcctaacctgtgtcaggtccttctgcccggacactgacgacactatggccattctcactcccattgggtgctgtgaaccctgtgaaccaatcagcgtcgtcatggtacaggagttataaagtccgcgcagcccgcgggactcagactcgtccggattctcacatgggggcgatggcaccgcgcacgctgctcctgctgctggcggccgccctggcccagacccagacccgcgcgggtgagtgcggggtcgggagggaaacggcctctgcggggaggcgcgggggcggttttggggaagccgggtccccgcgtcgcacaccagacctccgccccttctccacccgcgtcccgagccccgcgccctgctccccgcccggcccgcgctcccgcccgggttcccgggaggaggtcggggtctcaccgcgcgccgcccccaggctcacactcgctgcggtatttcctcaccgccgtgtcccggcccggcctcggggagccccggttcatcgctgtcggctacgtggacgacacggagttcgtgcgctacgacagcgatgcagagaatccgaggatggagccgcgggcgcggtggatggagcgggaggggccggagtattgggagcgggagacgcagggagccaagggacacgagcaggtgaaccgagtgaacctgaggaccctgcgcggctactacaaccagagcgagggcggtgagtgaccccgggtcggaggtcacgacccctccgcgtccccacacggccggggacttccgggtcccaagtccgaggttcgggagcagaaccgacccgggcccggtttccctttcagtttggaggagtccgcgggcggggcggggctggggcggggtctgaccgcggggtcctgcaggctctcacaccatccaggtgatgtttggctgtgacgtggggacggactggagcctcctccgcggatataggcaggacgcctacgacggccgcgattacatcgccctgaacgaagacctgaagacgtggacggcggcggactttgctgcacagatcacccggaacaagttggagcgggatggtgatgcagattattacaaggcctacctggagggcacgtgcttggagtcgctccgcagatacctggagctcgggaaggagaggctgctgcgctcaggtacgtggaccgcgggcttctcctcctctgcccttaggctggggctcagtcctggggaagaagaaaccctcagctgggtgatgcccctgtctcagaggggagacagcgtccctgggtctcctgatccctcatcacagtgactgcactgcctctcccagggcccagccttctccctggagagttctgagtccctctcaggagggcaaggagagaatttcccacttaacagcaagggctccctgctgtcagccatggcctctcccaggccaggttctctgctccgactctctgaggacactgactcctgtcctgctgagtgtgtcagcgttacacctcaggaccagaagtctcctttacctcatgggagacatggactccactacactaggctggttccccagtttctagaactttccaaagaacacattctcacagatccctccctgatgtggggtttgcctctcttccacaccccaattctctctcttcctacagtggagaatggtcccatgagcccttgtggggtaccctgaaggaacataaattgtgggatttcttttttcttttttctctctttttcttatcttttactttcttttttctttccttttctttccctttttttttttgaaggattattttgcttccagtcaagatttctctgcaaacacatattaaatcaattattttccattccctctttattctgtgaccacccatctcatgctataaaacatcacataaggacggccatgttgacccactcgaatcatgtggatttcctcttagcttctgagtccctcaggaaagtgtgcagttctgtgctgagggcaccagctctccctgcagctcactagtgagatgacagttgaagtgtcagacacacacagttcagtgtcatcattgatttaactgtgtcttgtgtagatttcagtttgtcttgttaactgtgtgatttcttaaatcttccacacagatcccccagaggcacatgtgacccttcaccccagacctgaaggtgatgtcaccctgaggtgctgggccctgggcttctaccctgctgacatcaccctgacctggcagttgaatggggaggacctgacccaggacatggagcttgtggagaccaggcctgcaggggatggaaccttccagaagtgggcatctgtggtggtgcctcttgggaaggagcagaattacacatgccttgtggagcatgaggggctgcctgagccactttcccagagatggggtaaggagggagccttctgtagaccctgagctggtcagggctgagagctggggtcatgacccccaccttcatttcttgaacctgtccttcccagagccttctccatcgaccaactccaacatggaaaccaatgtcatttatgtcgcccttggagccatcattggaactctggccatcattggaattgtggtggctgttgtgaggaagaggaggagaaacacaggtaggaaaggacagggtctgtttcccctcagcttcctttagaagagtgctgctcattaatgggaagcacagccacaccccctattgctgctgctccaactgggtcctctgtcagttctggaaacttcctcctgtcaagaccttccttgaactctcacagcttttcttctcacaggtgggaaaggagactacgcccctgctccaggttagtgtgggcgcaggagtgtccctgagggtattggagtgaagctggagatgtggggagctctgggaatccatagtagctcctccaaatcttctggggctgcagttgtactgtgcgtgatatgaatacatacatacgcatatacatatacacacacacatatacatgtgttttgttttaccctaggcagggacagctcccagagctctgatgtgtctctcccagattgtaaaggtgactctggggtttgactgggaagggacaatgtggacatgattgggttcatggactcccagaatcctctgtttcatggactcccagaatcctctgggagtgttgtcttcacagtgatggtttgtgactctcgttctgtagcatgaagacagctgcctggagtggactgagtgacagacgatgtgttcaggtctctcctgtgacatccagagtcctcagttctctttagacaccagtgtctcatgttccctgtgattctatggcttcagtgtgaagaactgtggagcccagcctgccctgcacacctggaccctgtccctgcacctgccctgcattcctttccacctgccaaccttgctggtccagcctggggtaggggtaatgggacacgcacctgtcactccttgctgccctgagccttcagcccctcactccacactgagaataagactctgagtgtgaacttgattgttcacatccttgacccaagtgtggatggctttttaattactggattgagaatacttagaggttttttgttttggggttttgctttgttttgttttgtttttgaaaaaaataaatggcagatgaagaagcttccagaatctgtgtcactaagctgtgtgtgtctggtgggacagggtgaggtggtgggagctgagtgtggacagggctgtgcccaggtgtgctcagtcagttcttgtctttgatgggttcaggcctcagctctgtcacctccaggctgtgccctctccatcactgtgaacacatggggagagtctgtgatcgcgatgacacagggaaggccagagccttgtcctgtccccaggattatgagcccccgcggctgaagatcac

SEQ ID NO: 10121 - protein, 319 aa, Rattus norvegicus; identical to SEQ ID NO: 3253
  ref <308>: DATABASE ACCESSION NUMBER: SWISS-Prot / P15978
  ref <309>: DATABASE ENTRY DATE: 1999-07-15

SEQ ID NO: 10122 - DNA, 1089 bp, Homo sapiens
  ref <308>: DATABASE ACCESSION NUMBER: EMBL / L36318
  ref <309>: DATABASE ENTRY DATE: 2000-03-04
atgctggtcatggcgccccgaaccgtcctcctgctgctctcggcggccctggccctgaccgagacctgggccggctcccactccatgaggtatttctacacctccgtgtcccggcccggccgcggggagccccgcttcatctcagtgggctacgtggacgacacgcagttcgtgaggttcgacagcgacgccgcgagtccgagagaggagccgcgggcgccgtggatagagcaggaggggccggaatattgggaccggaacacacagatctgcaagaccaacacacagacttaccgagagagcctgcggaacctgcgcggctactacaaccagagcgaggccgggtctcacaccctccagaggatgtacggctgcgacgtggggccggacgggcgcctcctccgcgggcataaccagttcgcctacgacggcaaggattacatcgccctgaacgaggacctgagctcctggaccgcggcggacaccgcggctcagatcacccagcgcaagtgggaggcggcccgtgtggcggagcagctgagaacctacctggagggcacgtgcgtggagtggctccgcagatacctggagaacgggaaggagacgctgcagcgcgcggaccccccaaagacacatgtgacccaccaccccatctctgaccatgaggccaccctgaggtgctgggccctgggcttctaccctgcggagatcacactgacctggcagcgggatggcgaggaccaaactcaggacaccgagcttgtggagaccagaccagcaggagacagaaccttccagaagtgggcagctgtggtggtgccttctggagaagagcagagatacacatgccatgtacagcatgaggggctgccgaagcccctcaccctgagatgggagccatcttcccagtccaccgtccccatcgtgggcattgttgctggcctggctgtcctagcagttgtggtcatcggagctgtggtcgctgctgtgatgtgtaggaggaagagttcaggtggaaaaggagggagctactctcaggctgcgtccagcgacagtgcccagggctctgatgtgtctctcacagcttga

SEQ ID NO: 10123 - protein, 362 aa, Homo sapiens [sequence omitted]

SEQ ID NO: 10124 - DNA, 3949 bp, Rattus norvegicus; identical to SEQ ID NO: 10120
  ref <308>: DATABASE ACCESSION NUMBER: EMBL / X82669
  ref <309>: DATABASE ENTRY DATE: 1998-02-20

SEQ ID NO: 10125 - protein, 319 aa, Rattus norvegicus; identical to SEQ ID NO: 3253
  ref <308>: DATABASE ACCESSION NUMBER: SWISS-Prot / P15978
  ref <309>: DATABASE ENTRY DATE: 1999-07-15

SEQ ID NO: 10126 - DNA, 1089 bp, Homo sapiens; identical to SEQ ID NO: 10122
  ref <308>: DATABASE ACCESSION NUMBER: EMBL / L36318
  ref <309>: DATABASE ENTRY DATE: 2000-03-04

SEQ ID NO: 10127 - protein, 362 aa, Homo sapiens [sequence omitted]

SEQ ID NO: 10128 - DNA, 2412 bp, Rattus norvegicus
  ref <308>: DATABASE ACCESSION NUMBER: EMBL / X83537
  ref <309>: DATABASE ENTRY DATE: 1999-12-12
gagcaaagaggcatttccaggagcaattccctcacctccaaggcgactgcgctctaggaatcacattccgttcctttagaagacaaaggcgcccaagagagcagcggcgcgaccccagggcgttggccccgccgcggagccctcactgcccgacgccccgacgccggggaccatgtctcccgcccctcgaccctcccggagtctcctgctccccctgctcacgctcggcaccacgctcgcctccctcgggtgggcccaaagcagcaacttcagccccgaagcttggctgcagcagtatggctacctacctccaggggacctgcgtacccacacacaacgctcaccccagtcactctcagctgccattgccgccatacaaaggttctatggtttacaagtgacaggcaaggccgattcggacacgatgaaggctatgaggcgccctcgctgtggtgttccagataagtttgggactgagatcaaggccaatgttcggaggaagcgctatgccattcagggcctcaagtggcagcataatgagatcactttctgcatccagaattatacccccaaggtgggcgagtatgccacattcgaggccattcggaaagccttccgagtatgggagagtgccacgccactgcgcttccgagaagtgccctatgcctacatccgggagggtcatgagaagcaggctgacatcatgatcttgtttgctgagggtttccatggcgacagcacaccctttgatggtgaaggaggcttcctggctcatgcctatttcccaggccccaatatcggaggggatacccactttgattctgctgagccctggactgtccaaaatgaggatctaaatgggaatgacatcttcttggtggctgtgcatgagttggggcatgccctaggcctggaacattccaacgacccctccgacatcatggctcccttttaccagtggatggacaccgagaacttcgtgttgcctgatgacgatcgccgcggtatccagcaactttatggaagcaagtcagggtcacccacaaagatgccccctcaacccagaaccacctctaggccctctgtcccagataagcccagaaaccccacctatgggcccaacatctgtgatgggaactttgacaccgtggccatgctccgaggagagatgtttgtcttcaaggagcgatggttctggcgggtgaggaataaccaagtgatggacggatacccaatgcccattggccaattctggaggggcctgcctgcatccatcaacactgcctatgagaggaaggatggcaaatttgttttcttcaaaggagataagcactgggtgtttgacgaagcttccctggaacccggataccccaagcacattaaggagctgggccgaggactgcccacggacaagattgatgcagctctcttctggatgcccaacgggaagacctacttcttccggggaaataagtactaccgcttcaatgaggagttcagggcagtggacagcgaataccccaaaaacatcaaagtctgggaaggaatccctgagtctcccagaggctcattcatgggtagcgatgaagtcttcacatacttctacaaagggaacaaatactggaaattcaacaaccagaagctgaaggtagagccagggtaccccaagtcagctctgcgggactggatgggctgcccttcggggggccggcccgacgaggggactgaggaggagacggaggtgatcatcatcgaggtggatgaggagggcagcggagccgtgagtgcagctgctgtcgttctgccggtgctgctgctgctcctggtactggcagtgggccttgctgtcttcttctttagacgccatgggacacccaagcgactgctttactgccagcgttcactgctggacaaggtctgacccccaccactggcccacccgcttctaccacaaggactttgcctcctccgaagacagtggcagccggtggtggcaggtgggctgttctcacccatcctgggctccctccctccagcctcccttctcagtccctaattggcttctcccaccctcatagcttggtgtgtgtccaaccctatttgaatgttgtcaaggctctgcacttgaaggcaggaccctctgaccttacaggcaaaggccaaatggggtcatctgcttctcttccatccccctaactacatatcttaaatctctgaactatgacctcaggaggctttgggcatatgagccctatacgtaccaagtgtacccagttggcagcctcccgtcactctgactaaaaagaatcttcagagtgcatatttggaggtggaaagattgttcagttaccctaaagactttgaaagaaagaaagaaagaaagaaaaaaaaaaaaaaaaaaaaaaaaaaaaa

SEQ ID NO: 10129 - protein, 582 aa, Rattus norvegicus
  ref <308>: DATABASE ACCESSION NUMBER: SWISS-Prot / Q10739
  ref <309>: DATABASE ENTRY DATE: 2002-06-15
MSPAPRPSRSLLLPLLTLGTTLASLGWAQSSNFSPEAWLQQYGYLPPGDLRTHTQRSPQSLSAAIAAIQRFYGLQVTGKADSDTMKAMRRPRCGVPDKFGTEIKANVRRKRYAIQGLKWQHNEITFCIQNYTPKVGEYATFEAIRKAFRVWESATPLRFREVPYAYIREGHEKQADIMILFAEGFHGDSTPFDGEGGFLAHAYFPGPNIGGDTHFDSAEPWTVQNEDLNGNDIFLVAVHELGHALGLEHSNDPSDIMAPFYQWMDTENFVLPDDDRRGIQQLYGSKSGSPTKMPPQPRTTSRPSVPDKPRNPTYGPNICDGNFDTVAMLRGEMFVFKERWFWRVRNNQVMDGYPMPIGQFWRGLPASINTAYERKDGKFVFFKGDKHWVFDEASLEPGYPKHIKELGRGLPTDKIDAALFWMPNGKTYFFRGNKYYRFNEEFRAVDSEYPKNIKVWEGIPESPRGSFMGSDEVFTYFYKGNKYWKFNNQKLKVEPGYPKSALRDWMGCPSGGRPDEGTEEETEVIIIEVDEEGSGAVSAAAVVLPVLLLLLVLAVGLAVFFFRRHGTPKRLLYCQRSLLDKV

SEQ ID NO: 10130 - DNA, 2365 bp, Homo sapiens
  ref <308>: DATABASE ACCESSION NUMBER: EMBL / X83535
  ref <309>: DATABASE ENTRY DATE: 1999-12-12
gaattcaagttcagtgcctaccgaagacaaaggcgccccgagggagtggcggtgcgaccccagggcgtgggcccggccgcggagcccacactgcccggctgacccggtggtctcggaccatgtctcccgccccaagaccctcccgttgtctcctgctccccctgctcacgctcggcaccgcgctcgcctccctcggctcggcccaaagcagcagcttcagccccgaagcctggctacagcaatatggctacctgcctcccggggacctacgtacccacacacagcgctcaccccagtcactctcagcggccatcgctgccatgcagaagttttacggcttgcaagtaacaggcaaagctgatgcagacaccatgaaggccatgaggcgcccccgatgtggtgttccagacaagtttggggctgagatcaaggccaatgttcgaaggaagcgctacgccatccagggtctcaaatggcaacataatgaaatcactttctgcatccagaattacacccccaaggtgggcgagtatgccacatacgaggccattcgcaaggcgttccgcgtgtgggagagtgccacaccactgcgcttccgcgaggtgccctatgcctacatccgtgagggccatgagaagcaggccgacatcatgatcttctttgccgagggcttccatggcgacagcacgcccttcgatggtgagggcggcttcctggcccatgcctacttcccaggccccaacattggaggagacacccactttgactctgccgagccttggactgtcaggaatgaggatctgaatggaaatgacatcttcctggtggctgtgcacgagctgggccatgccctggggctcgagcattccagtgacccctcggccatcatggcacccttttaccagtggatggacacggagaattttgtgctgcccgatgatgaccgccggggcatccagcaactttatgggggtgagtcagggttccccaccaagatgccccctcaacccaggactacctcccggccttctgttcctgataaacccaaaaaccccacctatgggcccaacatctgtgacgggaactttgacaccgtggccatgctccgaggggagatgtttgtcttcaaggagcgctggttctggcgggtgaggaataaccaagtgatggatggatacccaatgcccattggccagttctggcggggcctgcctgcgtccatcaacactgcctacgagaggaaggatggcaaattcgtcttcttcaaaggagacaagcattgggtgtttgatgaggcgtccctggaacctggctaccccaagcacattaaggagctgggccgagggctgcctaccgacaagattgatgctgctctcttctggatgcccaatggaaagacctacttcttccgtggaaacaagtactaccgtttcaacgaagagctcagggcagtggatagcgagtaccccaagaacatcaaagtctgggaagggatccctgagtctcccagagggtcattcatgggcagcgatgaagtcttcacttacttctacaaggggaacaaatactggaaattcaacaaccagaagctgaaggtagaaccgggctaccccaagtcagccctgagggactggatgggctgcccatcgggaggccggcccgatgaggggactgaggaggagacggaggtgatcatcattgaggtggacgaggagggcggcggggcggtgagcgctgctgccgtggtgctgcccgtgctgctgctgctcctggtgctggcggtgggactagcagtcttcttcttcagacgccatgggacccccaggcgactgctctactgccagcgttccctgctggacaaggtctgacgcccaccgccggcccgcccactcctaccacaaggactttgcctctgaagaccagtgtcagcaaggtggtggtgggtgggctgctcccatccgtccggagccccctccccgcagcctccttgcttctctcagtcccctggctggcctccttcaccctcaccgcctgtagcttgtgtctgtccagccccatctgaatgtgttgggggctctgcacttgaaggcaggaccctcagacctcgctggtaaaggtcaaatggggtcatctgctccttttccatcccctgacataccttaacctctgaactctgacctcaggaggctctgggcactccagccctgaaagccccaagtgtacccagttggcagcctcccgtcactctgactaaaaagaatcttcagagtgcatatttggaggtggaaagattgttcagttaccctaaagactttgaaagaaagaaagaaagaaagaaaaaaaaaaaaaaaaaaaaaaaaaaaaa

SEQ ID NO: 10131 - protein, 582 aa, Homo sapiens [sequence omitted]

SEQ ID NO: 10132 - DNA, 989 bp, Rattus norvegicus
  ref <308>: DATABASE ACCESSION NUMBER: EMBL / X83579
  ref <309>: DATABASE ENTRY DATE: 1995-01-04
gagcgaaccgtaatgagaaactggacttcctcggagagggacagtttgctactgtctataaggccagagataagaacaccaaccagatcgtcgccattaagaaaatcaaacttggacacaggtcagaagctaaagatggtataaatagaacagccttaagggagataaagctcttgcaggaactaagtcatccaaatataattggtctccttgatgcatttggacataaatcgaacattagccttgtctttgattttatggagactgacctagaggttatcataaaggataacagtctcgtgttgaccccatcccacattaaagcctacatgctgatgactcttcagggcttggaatatttacatcagcactggattctacacagggatctgaaaccaaacaacttgttgttagatgagaatggagttctgaaactggcagattttggcctggccaaatcatttgggagccccaattgggcttacacacatcaagttgtgaccaggtggtaccgggcccccgagttactgtttggagctaggatgtacggtgtgggagtggacatgtgggctgtcggttgtatcttagcagaattgcttctaagggttccttttttgcctggagattcagaccttgatcagctaacaagaatatttgaaactctgggtacaccaaccgaagaacagtggcctgacatgtgtagtcttccagattacgtgacgttcaagagtttccctggcatccccctgcagcacatcttcattgcagctggagacgacctgcttgagctcatacaaggcttgttcttattcaacccatgtactagaattacagcttcacaggcgttgaggaccaagtacttcagtaatcgtccagggccaacacctggatgccagcttccaagaccaaactgtccagtggaagcattaaaggaacagtgaaatccagccatggcgacaaaacggaaaagagcggaggccttagaacaa

SEQ ID NO: 10133 - protein, 329 aa, Rattus norvegicus
  misc_feature (1)..(329): Xaa=Unknown amino acid
  ref <308>: DATABASE ACCESSION NUMBER: SWISS-Prot / P51952
  ref <309>: DATABASE ENTRY DATE: 2001-10-16
ANRNEKLDFLGEGQFATVYKARDKNTNQIVAIKKIKLGHRSEAKDGINRTALREIKLLQELSHPNIIGLLDAFGHKSNISLVFDFMETDLEVIIKDNSLVLTPSHIKAYMLMTLQGLEYLHQHWILHRDLKPNNLLLDENGVLKLADFGLAKSFGSPNWAYTHQVVTRWYRAPELLFGARMYGVGVDMWAVGCILAELLLRVPFLPGDSDLDQLTRIFETLGTPTEEQWPDMCSLPDYVTFKSFPGIPLQHIFIAAGDDLLELIQGLFLFNPCTRITASQALRTKYFSNRPGPTPGCQLPRPNCPVEALKEQXNPAMATKRKRAEALEQ

SEQ ID NO: 10134 - DNA, 1259 bp, Homo sapiens
  ref <308>: DATABASE ACCESSION NUMBER: EMBL / BC000834
  ref <309>: DATABASE ENTRY DATE: 2001-07-13
cccacgcgtccggtcgggctttacggcgccggatggctctggacgtgaagtctcgggcaaagcgttatgagaagctggacttccttggggagggacagtttgccaccgtttacaaggccagagataagaacaccaaccaaattgtcgccattaagaaaatcaaacttggacatagatcagaagctaaagatggtataaatagaaccgccttaagagagataaaattattacaggagctaagtcatccaaatataattggtctccttgatgcttttggacataaatctaatattagccttgtctttgattttatggaaactgatctagaggttataataaaggataatagtcttgtgctgacaccatcacacatcaaagcctacatgttgatgactcttcaaggattagaatatttacatcaacattggatcctacatagggatctgaaaccaaacaacttgttgctagatgaaaatggagttctaaaactggcagattttggcctggccaaatcttttgggagccccaatagagcttatacacatcaggttgtaaccaggtggtatcgggcccccgagttactatttggagctaggatgtatggtgtaggtgtggacatgtgggctgttggctgtatattagcagagttacttctaagggttccttttttgccaggagattcagaccttgatcagctaacaagaatatttgaaactttgggcacaccaactgaggaacagtggccggacatgtgtagtcttccagattatgtgacatttaagagtttccctggaatacctttgcatcacatcttcagtgcagcaggagacgacttactagatctcatacaaggcttattcttatttaatccatgtgctcgaattacggccacacaggcactgaaaatgaagtatttcagtaatcggccagggccaacacctggatgtcagctgccaagaccaaactgtccagtggaaaccttaaaggagcaatcaaatccagctttggcaataaaaaggaaaagaacagaggccttagaacaaggaggattgcccaagaaactaattttttaaagagaacactggacaacattttactactgagggaaatagccaaaaaggcaaataatggaaaaatagtaaacattaagtaaatgctgtagaagtgagtttgtaaatattctacacatgtaaaatatgtaaaactatgggttatttttattaaatgtattttaaaataaaaaaaaaaaaaaaaaaaaa

SEQ ID NO: 10135 - protein, 346 aa, Homo sapiens
  ref <308>: DATABASE ACCESSION NUMBER: SWISS-Prot / P50613
  ref <309>: DATABASE ENTRY DATE: 2002-06-15
MALDVKSRAKRYEKLDFLGEGQFATVYKARDKNTNQIVAIKKIKLGHRSEAKDGINRTALREIKLLQELSHPNIIGLLDAFGHKSNISLVFDFMETDLEVIIKDNSLVLTPSHIKAYMLMTLQGLEYLHQHWILHRDLKPNNLLLDENGVLKLADFGLAKSFGSPNRAYTHQVVTRWYRAPELLFGARMYGVGVDMWAVGCILAELLLRVPFLPGDSDLDQLTRIFETLGTPTEEQWPDMCSLPDYVTFKSFPGIPLHHIFSAAGDDLLDLIQGLFLFNPCARITATQALKMKYFSNRPGPTPGCQLPRPNCPVETLKEQSNPALAIKRKRTEALEQGGLPKKLIF

SEQ ID NO: 10136 - DNA, 2321 bp, Rattus norvegicus
  ref <308>: DATABASE ACCESSION NUMBER: EMBL / X83867
  ref <309>: DATABASE ENTRY DATE: 1995-06-01
caagacacctctgcgacgccagcttgaaagccgccggcgggctgggatttagctccactttatcaactcccaacccctcacccatctcaaccgcaactccaactctgtgagaaagtcctgactttgcggagccccaggtgcactggagctcagcaaacttgagacacttcccccctgtcctccatcctaatctaagtttaggttctgactgagccaagagtgggtgctaaagcagcgggcctcaggtgtctaggactccgggtccttggggactctcaggttgaagtcttgcagagtctgggcagaggctccagagcttctcccagaccccactgctctacaccgctggaaccgcgcttcatcgcaggtcacatggccaccagccttagtgcagacagtccacagcagctgagctcgctgtctacccaacagaccattcttctgctactcgtttcggtcctggccatcgtgcacttaggccagtggctgctgcgccagtggcgacggaaaccgtggtcctcgcccccgggtccctttccttggccattgatcggaaacgcggcgtctgttggccgggcatcgcacttgtacttcgctcgccttgcgaggcgctatggcgacgtttttcagatccgtctgggcagctgtcccgtggtggtgctgaatggcgagagtgccatccatcaggctctggtgcagcagggcggcgtctttgcggaccggcctcccttcgcctctttccgtgtggtgtctggtggccgcagcctggcgttcggccactactcagagcgctggaaggagcggcgacgtgcagcctatggcacgatgcgtgccttctccacccgccacccgcgcagccgcggtctcctcgagggccacgcgctgggagaggctcgagagttggtggcagtgttggtgcggcgctgcgccggtggcgcctgcctcgatccgacgcagccgatcatagtggcggtggctaatgtcatgagcgctgtatgcttcggctgtcggtacaaccacgacgatgccgagttcctggagctgctcagccacaacgaggagttcgggcgcaccgtgggcgcgggcagcctggtggacgtgatgccctggctgcagctttttcccaacccggtgcgcaccatcttccgcgagttcgagcagatcaaccgcaacttcagcaacttcgtcctggacaagttcctgaggcaccgagaaagcctcgtgcccggggctgctcctcgagacatgatggacgccttcatcctctccgccgaaaagaaggcgactggggaccctggtgacagtccctccgggctggatttggaggatgtgcctgccactattacagacatctttggagccagccaggacaccctttccaccgcgctgctgtggctgctcatcctctttaccagatacccggatgtgcaggcccgagtgcaggccgagttggaccaggttgtggggagggaccgcctgccctgcatgagtgaccaacccaacttaccatacgtcatggcttttctttatgaatccatgcgattcaccagctttttgcctgtcacccttccacatgccaccactgccaacacctttgttttaggctactacatccccaaaaacacggtagtttttgttaaccagtggtctgtgaatcatgacccagcaaagtggtctaacccagaggactttgatccggcccgcttcctggacaaggacggcttcattaacaaggcactagccagcagcgtgatgatattttcagtgggcaaacgacggtgcatcggcgaggagttgtctaagacgcttctgtttctcttcatctccatcctcgctcatcagtgcaatttcaaggctaaccaaaacgagccctcaaacatgagtttcagttacggcctgagcattaagcccaagtcgtttaaaatccatgtgtctctcagagagtccatgaagctccttgatagtgctgtcgagaagctgcaagctgaggaagcttgccagtgagagagggagaggccggagtaactgaaatgttcaaagaaagccatctcattaactggagaggaaaacacagattttattttctccagcttcattttggcctcagttctcaagaatgagcggaaaccaagtggcctgaaggtgaggcgggcttaccaattcatggctcctcaccggccagcagctggagatcctgaagtattttgaaattgaagagtaatagggtccaaggaatttgcatactgttcccccctcacccccattaaacacatgcacacaaatcagcatgtgtgtacagctatccaacaaaatatttcagt

SEQ ID NO: 10137 - protein, 543 aa, Rattus norvegicus; identical to SEQ ID NO: 7047
  ref <308>: DATABASE ACCESSION NUMBER: SWISS-Prot / Q64678
  ref <309>: DATABASE ENTRY DATE: 2002-06-15

SEQ ID NO: 10138 - DNA, 5102 bp, Homo sapiens; identical to SEQ ID NO: 7048
  ref <308>: DATABASE ACCESSION NUMBER: EMBL / U03688
  ref <309>: DATABASE ENTRY DATE: 2000-03-04

SEQ ID NO: 10139 - protein, 543 aa, Homo sapiens; identical to SEQ ID NO: 7049
  ref <308>: DATABASE ACCESSION NUMBER: SWISS-Prot / Q16678
  ref <309>: DATABASE ENTRY DATE: 2002-06-15

SEQ ID NO: 10140 - DNA, 3276 bp, Rattus norvegicus
  ref <308>: DATABASE ACCESSION NUMBER: EMBL / X84210
  ref <309>: DATABASE ENTRY DATE: 1996-08-12
cgaccgacctgcagttgagccgagttggaaatgtgaacgcaagaagcaggcttgatttttttttcctccccccctctcctagctctctcctcctctctctccctctcgcacccacactcacgcacacctccagcccgcacacagacgtgcacgcaccccccgccgcccggcagttatgtattctccgctctgtctcacccaggatgagtttcatcctttcattgaagcacttctgccccatgtccgcgccttcgcctacacatggttcaacctgcaggcccgaaagcggaaatacttcaaaaagcatgagaagcgcatgtcgaaagaagaggagagggctgtgaaggatgaactgctaagtgagaagcctgaggtcaagcaaaagtgggcttcccgacttctggccaagttacggaaagatatccgacccgagtaccgagaggattttgttcttacagttacagggaaaaaacctccatgctgtgttctttccaacccagaccagaaaggcaagatgcggagaattgactgcctccgccaggcagataaagtatggaggttggacctcgtcatggtgatcttgttcaaaggtattccgctggaaagtactgatggtgaacgccttgtgaagtccccacagtgctcgaatccagggctctgtgtccagccccatcacataggggtttctgtaaaggaactcgatttatatttggcatactttgtacatgcagcagattcaagtcaatctgaaagtcccagccaaccaagtgatgctgacattaaggaccagccagaaaatggacatttgggcttccaggacagcttcgtcacatcaggtgttttcagtgtgactgagctagtaagagtgtcacaaacaccaatagctgcaggaaccggccccaatttttctctctctgatttggaaagttcctcatactacagcatgagtccaggagcaatgaggaggtctctacccagcacatcctctaccagctctaccaagcgcctcaagtctgtggaggacgaaatggacagtcctggtgaagaaccattttacacaggccaagggcgctccccagggagtggcagccagtccagcggatggcatgaagtagagccaggcatgccatctccaaccactctgaagaagtctgagaagtctggtttcagcagcccctccccttcgcagacctcctccctcggaacagcattcacacagcatcaccgacctgtcataacaggaccgagagcaagcccacatgcgacgccatcgactctccactttccaacgtcacctatcatccagcagcctgggccttatttctcacacccagccatccgttaccaccctcaggagacgctgaaggagtttgtccaacttgtctgccccgatgctggtcagcaagctggacaggtggggttcctcaatcccaatggaagcagtcaaggcaaggtgcacaacccattcctccccaccccaatgttgccgccgccaccgccaccaccgatggccaggcctgtgcctctgcccatgccagacaccaagcctccaaccacatcaacagaaggcggtgcagcctcccccacctcaccgatcctggtacctgggataaaagttgcagcgtcccaccatcctccagacagaccacctgaccccttctcaactctgtaacatggacgcaacctcaacccggcgcagttacaacttcactgtcagtggaaggggagagacaccaactcgaatcaacttgtacatggaaacagcgaacgtcgtggtcaaacagcaaaggcccataacttttcgggattcttttttttttttaatactttagggactgtcgaattctctaaatatggtgctggaaatgcgttgggctgtgtgacatttgaagtgttccagtggtggtgtgagcagtaggtgaagcggctggtaggggatgagccttgctcacgaacttcctgttgtaacacttttgagcctggccttttcacagtatttcaagaatttgcccgcgcaggtgtgtgaccctcccggagcacttggagacacctggagaatgaaatctttcgtagtagctaagatctgtgatctgtaacttacaggacactcaagggcaatgtttttggggttttcttttttttctgtaacatattagaaaaagcaatgcagttaagttatctttcttttagtttggtttggttcagcagtcagcagttaaatacataacacaaccctcaaggacagtgaacccactcatgttgcagagcaatccaaaaagacagcaaagactactactactactctcagttcggttgtttgtttttttttttttttttttgtttttttattaagttttgaaatgctgcacttacatttaaaaaaaacattttcaacaatttcaacaatgacacaaaagttcacatggaaatggggaagatggtctgttttgacagaaactgacaggaatcaaaacaatcgaattttgaattgagtgaagtgcaatttcattggatagctaagtatctttgtaagatagagattgttgaaaattctatttttgtttttcaagtcctcccaccccaggactctaaattattggggttaaaaaaaaacagccttgcaagaaaaaggggagctatttttgctttttatgttttttattgttaaacttgtatccctttaaaaaaaaaaaccgaaggaaaatttaaaaaaaaagcaaaaaaaaaaaatacaaatctaatggtgcttttacctccaatatgttaactacattaaatgctaattaattattttctgttatcaaagcacataactcaaatgaaatcatggtatctgttaattttataagctagaaatcactataatgaattatgccaattctggaaaattttacacatgtatggcaacaccagatctatcggttttcaaacgcctcgtcgtaaccagacattgtccagaagtttcaaagacccttcgcaaaccctgaatcggctacgggaaatatatcagatcgataaggacataactgtgtgagccattcagatcaaagtacttgttaggaaaataaacaaacaaacaaaaacaaaatgttcacacacacacacaccccaaatgtcttgtatcttatgtttaaggaaaaagaaaagacaaaacggcacgagggtctgaccaccatgacaacctacagcaacaaggaccaaagctgagagaggcgtctcattcactcgtgaccttctggtggcaccgagcaggctgctctcttgcacagatggttg

SEQ ID NO: 10141 - protein, 509 aa, Rattus norvegicus; identical to SEQ ID NO: 2152
  ref <308>: DATABASE ACCESSION NUMBER: SWISS-Prot / P09414
  ref <309>: DATABASE ENTRY DATE: 2001-10-16

SEQ ID NO: 10142 - protein, 502 aa, Homo sapiens; identical to SEQ ID NO: 222
  ref <308>: DATABASE ACCESSION NUMBER: SWISS-Prot / AAC15752
  ref <309>: DATABASE ENTRY DATE: 2001-10-16

SEQ ID NO: 10143 - DNA, 3276 bp, Rattus norvegicus; identical to SEQ ID NO: 10140
  ref <308>: DATABASE ACCESSION NUMBER: EMBL / X84210
  ref <309>: DATABASE ENTRY DATE: 1996-08-12

SEQ ID NO: 10144 - protein, 509 aa, Rattus norvegicus; identical to SEQ ID NO: 2152
  ref <308>: DATABASE ACCESSION NUMBER: SWISS-Prot / P09414
  ref <309>: DATABASE ENTRY DATE: 2001-10-16

SEQ ID NO: 10145 - protein, 502 aa, Homo sapiens; identical to SEQ ID NO: 222
  ref <308>: DATABASE ACCESSION NUMBER: SWISS-Prot / AAC15752
  ref <309>: DATABASE ENTRY DATE: 2001-10-16

SEQ ID NO: 10146 - DNA, 2448 bp, Rattus norvegicus
  ref <308>: DATABASE ACCESSION NUMBER: EMBL / X87157
  ref <309>: DATABASE ENTRY DATE: 1996-11-08
ggactgacggcctccgtctcgagatctggtctcctcggcttggcccactcctggcttccgggcccgcagacaccaccgcctgcctcctgcacctacaagcgggaggacgacgcgccagctgctgccggcctcccggcgtgcccatgatcaccctgtgcctttcgactctgcgaggcctccacagagctggtggctccaggcttcagctgacaatgacactgggaaaggagctggcttctcctcttcaagctatgtcttcctacactgcggctggcaggaatgttctcagatgggacctttctccagagcagatcaagacgaggacagagcagctcatagcacagaccaagcaggtgtacgacaccgtggggacaatcgccctgaaagaagtaacttatgagaactgtctgcaggtgctggctgacatagaagtgacgtacatagtggaaaggaccatgctggacttccctcagcacgtgtcatctgacagagaagtgcgggctgcaagcacagaagcagacaaaaagctttctcgttttgatattgagatgagcatgagagaagatgtgtttcagagaattgttcatttacaagaaacatgcgatttggagaagataaagcctgaagccaggcgatacttggaaaagtcaattaaaatgggaaaaaggaatggactccatctttcagaacacataagaaatgaaatcaaatcaatgaagaagagaatgagtgagctatgcattgacttcaacaagaacctcaatgaggacgacacttcccttgtattctccaaggctgaacttggtgctcttcctgatgacttcattgacagtttagaaaaaacagatgaagacaagtacaaagttaccttaaagtatcctcactacttccctgtcatgaagaaatgctgtgtccctgaaactcgaaggaagatggaaatggcttttcataccaggtgcaaacaggaaaacaccgcaattctgcaacagctcctcccgctgcgagctcaagtggccaagctgctgggctataacacccatgctgactttgtccttgaactgaacactgcgaagagcaccagccgcgtggccgcctttctagatgatttaagccagaaattgaaacccttgggtgaggcagaacgggagtttattttgagcctgaagaagaaggaatgtgaagagcgaggttttgaatacgacgggaagatcaatgcatgggacctccattactacatgacacagacagaggagctcaagtactcggtggaccaggagtcccttaaggagtacttccccattgaggtggtcacggaaggcttgctaagcatctaccaggagctgctgggactttcatttgaacaagtgcccgatgctcatgtttggaataagagcgtttcactttacactgtgaaggataaagctacaggagaggtcctggggcagttctacctggacctctatccaagggaaggaaaatacaaccatgcagcctgcttcggtctccagccaggctgccttctccctgatggcagtcggatgatgtctgtggccgccctggtggtcaacttctctcagcctgtagcaggtcggccctctctcctgagacatgatgaagtgcggacttacttccacgagttcggtcacgtcatgcatcagatctgtgcgcagactgactttgcacgattcagtggaacaaacgtggaaactgactttgtagaggtgccatcacaaatgcttgaaaactgggtgtgggacgttgattccctgcgaaaactgtcaaagcattataaagatggacaccctatcacagacgagctgctcgagaagcttgttgcttctaggctggtcaacacaggtcttctgacgctgcgccaaattgttttgagcaaagttgaccaatctctccataccaatgcgactctggatgccgcgagcgaatacgctaaatactgcacagaaattctgggagttgcagctacgccaggcacaaatatgccagctacttttggacacttggcaggagggtatgatggccaatattatggatatctttggagtgaagtgttttccatggacatgtttcacagctgttttaaaaaagaggggatcatgaatccagaggttggaatgaaatacagaaacttaatcctgaagcctggggggtccctggacggcatggacatgctccagaatttcttgcaacgtgagccaaaccaaaaagcattcctaatgagtcgaggcctgaatggttcgtaagccagggatcctgggagttgtccatgtctggaggacaagtcaacactgtcatgtggtgccggcctggagactgaagagagttttacaaaagaaaacttagatttctattgatttgcttttgttttttaattttaaaaattatacagatgtaaatggaattataaatactgtgacctaaggaaagaccaac

SEQ ID NO: 10147 - protein, 704 aa, Rattus norvegicus
  ref <308>: DATABASE ACCESSION NUMBER: SWISS-Prot / P42676
  ref <309>: DATABASE ENTRY DATE: 2002-06-15
MITLCLSTLRGLHRAGGSRLQLTMTLGKELASPLQAMSSYTAAGRNVLRWDLSPEQIKTRTEQLIAQTKQVYDTVGTIALKEVTYENCLQVLADIEVTYIVERTMLDFPQHVSSDREVRAASTEADKKLSRFDIEMSMREDVFQRIVHLQETCDLEKIKPEARRYLEKSIKMGKRNGLHLSEHIRNEIKSMKKRMSELCIDFNKNLNEDDTSLVFSKAELGALPDDFIDSLEKTDEDKYKVTLKYPHYFPVMKKCCVPETRRKMEMAFHTRCKQENTAILQQLLPLRAQVAKLLGYNTHADFVLELNTAKSTSRVAAFLDDLSQKLKPLGEAEREFILSLKKKECEERGFEYDGKINAWDLHYYMTQTEELKYSVDQESLKEYFPIEVVTEGLLSIYQELLGLSFEQVPDAHVWNKSVSLYTVKDKATGEVLGQFYLDLYPREGKYNHAACFGLQPGCLLPDGSRMMSVAALVVNFSQPVAGRPSLLRHDEVRTYFHEFGHVMHQICAQTDFARFSGTNVETDFVEVPSQMLENWVWDVDSLRKLSKHYKDGHPITDELLEKLVASRLVNTGLLTLRQIVLSKVDQSLHTNATLDAASEYAKYCTEILGVAATPGTNMPATFGHLAGGYDGQYYGYLWSEVFSMDMFHSCFKKEGIMNPEVGMKYRNLILKPGGSLDGMDMLQNFLQREPNQKAFLMSRGLNGS

SEQ ID NO: 10148 - DNA, 2890 bp, Homo sapiens
  ref <308>: DATABASE ACCESSION NUMBER: Refseq / NM_020726
  ref <309>: DATABASE ENTRY DATE: 2002-11-05
ggcacgagggtggcctctgcggctaggccggctcgagactcccgggcgccgaggcgctgccgcccgcctcgccgccccacgccgaaggaccacgcgcccgccgccgccagcctctcagcgctcccatgatcgcccggtgccttttggctgtgcgaagcctccgcagagttggtggttccaggattttactcagaatgacgttaggaagagaagtgatgtctcctcttcaggcaatgtcttcctatactgtggctggcagaaatgttttaagatgggatctttcaccagagcaaattaaaacaagaactgaggagctcattgtgcagaccaaacaggtgtacgatgctgttggaatgctcggtattgaggaagtaacttacgagaactgtctgcaggcactggcagatgtagaagtaaagtatatagtggaaaggaccatgctagactttccccagcatgtatcctctgacaaagaagtacgagcagcaagtacagaagcagacaaaagactttctcgttttgatattgagatgagcatgagaggagatatatttgagagaattgttcatttacaggaaacctgtgatctggggaagataaaacctgaggccagacgatacttggaaaagtcaattaaaatggggaaaagaaatgggctccatcttcctgaacaagtacagaatgaaatcaaatcaatgaagaaaagaatgagtgagctatgtattgattttaacaaaaacctcaatgaggatgataccttccttgtattttccaaggctgaacttggtgctcttcctgatgatttcattgacagtttagaaaagacagatgatgacaagtataaaattaccttaaaatatccacactatttccctgtcatgaagaaatgttgtatccctgaaaccagaagaaggatggaaatggcttttaatacaaggtgcaaagaggaaaacaccataattttgcagcagctactcccactgcgaaccaaggtggccaaactactcggttatagcacacatgctgacttcgtccttgaaatgaacactgcaaagagcacaagccgcgtaacagcctttctagatgatttaagccagaagttaaaacccttgggtgaagcagaacgagagtttattttgaatttgaagaaaaaggaatgcaaagacaggggttttgaatatgatgggaaaatcaatgcctgggatctatattactacatgactcagacagaggaactcaagtattccatagaccaagagttcctcaaggaatacttcccaattgaggtggtcactgaaggcttgctgaacacctaccaggagttgttgggactttcatttgaacaaatgacagatgctcatgtttggaacaagagtgttacactttatactgtgaaggataaagctacaggagaagtattgggacagttctatttggacctctatccaagggaaggaaaatacaatcatgcggcctgcttcggtctccagcctggctgccttctgcctgatggaagccggatgatggcagtggctgccctcgtggtgaacttctcacagccagtggcaggtcgtccctctctcctgagacacgacgaggtgaggacttactttcatgagtttggtcacgtgatgcatcagatttgtgcacagactgattttgcacgatttagcggaacaaatgtggaaactgactttgtagaggtgccatcgcaaatgcttgaaaattgggtgtgggacgtcgattccctccgaagattgtcaaaacattataaagatggaagccctattgcagacgatctgcttgaaaaacttgttgcttctaggctggtcaacacaggtcttctgaccctgcgccagattgttttgagcaaagttgatcagtctcttcataccaacacatcgctggatgctgcaagtgaatatgccaaatactgctcagaaatattaggagttgcagctactccaggcacaaatatgccagctacctttggacatttggcagggggatacgatggccaatattatggatatctttggagtgaagtattttccatggatatgttttacagctgttttaaaaaagaagggataatgaatccagaggttggaatgaaatacagaaacctaatcctgaaacctgggggatctctggacggcatggacatgctccacaatttcttgaaacgtgagccaaaccaaaaagcgttcctaatgagtagaggcctgcatgctccgtgaactggggatctttggtagccgtccatgtctggaggacaagtcgacatcaccatgtgttactggcctggaaactgaagggagttttgcaagtgaaaatttagatttctattgacatccttttgttttctaattttaaaaattataaagatgtaaatggaattataaatactgtgacctaagaaaagacccactagaaagtaattgtactataaaatttcataaaactggatttgatttctttttatgaaagtttcatatgaatgtaacttgattttttactattataatctagataatatgatataagagggctaagaatttttaaattgaatcatatatatgatataatttgatccttcttgtatcttgaagttttgtacttgggatttctggactgataaatgaatcatcacattcttctggtaaatattttcttggagctctgtgtcaactttgatcctttgtctcccaggaaggtgtgacctctcctttgcctgcatacctcaaggccaggggaatatgcctcagtgatgcatttatctttgtatatcaggccgcatgattcccaactttctgccacacttaaattacgttcctccatttcagttttgtcttttctgtctaaagttcagtcaaagagtatcaaaaaa

SEQ ID NO: 10149 - protein, 704 aa, Homo sapiens
  ref <308>: DATABASE ACCESSION NUMBER: SWISS-Prot / Q9BYT8
  ref <309>: DATABASE ENTRY DATE: 2002-06-15
MIARCLLAVRSLRRVGGSRILLRMTLGREVMSPLQAMSSYTVAGRNVLRWDLSPEQIKTRTEELIVQTKQVYDAVGMLGIEEVTYENCLQALADVEVKYIVERTMLDFPQHVSSDKEVRAASTEADKRLSRFDIEMSMRGDIFERIVHLQETCDLGKIKPEARRYLEKSIKMGKRNGLHLPEQVQNEIKSMKKRMSELCIDFNKNLNEDDTFLVFSKAELGALPDDFIDSLEKTDDDKYKITLKYPHYFPVMKKCCIPETRRRMEMAFNTRCKEENTIILQQLLPLRTKVAKLLGYSTHADFVLEMNTAKSTSRVTAFLDDLSQKLKPLGEAEREFILNLKKKECKDRGFEYDGKINAWDLYYYMTQTEELKYSIDQEFLKEYFPIEVVTEGLLNTYQELLGLSFEQMTDAHVWNKSVTLYTVKDKATGEVLGQFYLDLYPREGKYNHAACFGLQPGCLLPDGSRMMAVAALVVNFSQPVAGRPSLLRHDEVRTYFHEFGHVMHQICAQTDFARFSGTNVETDFVEVPSQMLENWVWDVDSLRRLSKHYKDGSPIADDLLEKLVASRLVNTGLLTLRQIVLSKVDQSLHTNTSLDAASEYAKYCSEILGVAATPGTNMPATFGHLAGGYDGQYYGYLWSEVFSMDMFYSCFKKEGIMNPEVGMKYRNLILKPGGSLDGMDMLHNFLKREPNQKAFLMSRGLHAP

SEQ ID NO: 10150 - DNA, 1794 bp, Rattus norvegicus
  ref <308>: DATABASE ACCESSION NUMBER: EMBL / X87885
  ref <309>: DATABASE ENTRY DATE: 1997-03-11
gtttaacttgcagggggccgtggaacccatgcagattgatgtagatccgcaggaagatccccagaacgcacctgatgtcaactacgtggtggagaaccccaccctggatctggagcagtatgcagccagctacagtggtctgatgcgtattgagcggctacagtttattgctgaccgctgccctccgttgcgagtggaggccttgaaaatggctctgtccttcgtgcagaggaccttcaatgtggacatgtatgaagagatacaccggaagctctctgaggctaccagggagctgcagaatgcacctgatgccatccctgagagtggagtggagcccccacccctggacacagcctgggtggaggccactcggaagaaggccctgttgaaactggagaagttagacacggacttgaagaactacaagggcaattctatcaaggagagcatcaggcgcggccatgatgacctgggtgaccactacctggactgtggggacctcagcaatgccctcaagtgttattcgcgagcccgagactactgcaccagtgctaagcatgtcatcaacatgtgcctcaatgtcatcaaggtcagtgtctacttgcagaattggtctcatgtgttaagctatgtcagcaaggctgagtctactccagagattgctgagcagcggggagagcgggacagccagactcaagccatcctcaccaagctcaagtgtgctgcaggcttggctgagctggctgcacgaaagtataagcaagctgccaagtgcttccttctggcttcctttgatcactgtgatttcccagagctgctgtcccccagcaatgtggctgtctatggtggcctatgtgccttagccacctttgaccggcaggagctgcaacgcaatgtcatctccagcagctccttcaagttgttcctggagctggagccacaggtcagagacatcatcttcaaattttatgagtccaagtatgcctcatgcttgaagatgttggacgagatgaaggacaacctgctcctggacatgtacctggcccctcacgtcaggacactgtatacccagatccgtaaccgggctctcatccaatacttcagcccctatgtgtcagctgatatgcacaagatggctgctgccttcaacacaacagttgcagctctggaggatgagctcacacaggtcatcctggagggccttattaatgcccgcatcgactcacacagcaagatactgtatgctcgagacgtggatcagcgtagcaccacctttgagaagtccctgctgatgggcaaggagttccaacgacgggccaaagccatgattctgagagcagctgtgctacgcaaccagatccatgtcaagtctcctcctagagaagggagccaaggggagctgactccagcaaacagccagtcacggatgagcaccaacatgtgaaaggcattcccgtgaccttcagactagtctgcacagctcctctgccagtggaagcagcacctgggcctcctgcctgctttcctcaagatgagaccccagactgtgtggttcattagagcagtccagcccctgggatgccagttcattggccttccgcttcggaggccccctctgctgtggtaggcaggctgcccagtatggccattcgggcctgactctaggtttctgtcccaatgaaacagaccatgtgcaattcccaggtaagggttcctcaacccttcctgtccatgtagttctgactgcagcagtgtcactaaccaagtagtccattaaagtacagattgatcatt

SEQ ID NO: 10151 - protein, 471 aa, Rattus norvegicus
  ref <308>: DATABASE ACCESSION NUMBER: SWISS-Prot / P97834
  ref <309>: DATABASE ENTRY DATE: 2002-06-15
MQIDVDPQEDPQNAPDVNYVVENPTLDLEQYAASYSGLMRIERLQFIADRCPPLRVEALKMALSFVQRTFNVDMYEEIHRKLSEATRELQNAPDAIPESGVEPPPLDTAWVEATRKKALLKLEKLDTDLKNYKGNSIKESIRRGHDDLGDHYLDCGDLSNALKCYSRARDYCTSAKHVINMCLNVIKVSVYLQNWSHVLSYVSKAESTPEIAEQRGERDSQTQAILTKLKCAAGLAELAARKYKQAAKCFLLASFDHCDFPELLSPSNVAVYGGLCALATFDRQELQRNVISSSSFKLFLELEPQVRDIIFKFYESKYASCLKMLDEMKDNLLLDMYLAPHVRTLYTQIRNRALIQYFSPYVSADMHKMAAAFNTTVAALEDELTQVILEGLINARIDSHSKILYARDVDQRSTTFEKSLLMGKEFQRRAKAMILRAAVLRNQIHVKSPPREGSQGELTPANSQSRMSTNM

SEQ ID NO: 10152 - DNA, 1866 bp, Homo sapiens
  ref <308>: DATABASE ACCESSION NUMBER: Refseq / NM_004127
  ref <309>: DATABASE ENTRY DATE: 2002-11-05
tctctgaagttccagaatcgatggaagtggacggcacgccgcggcggggtgggtgcaagatgccgctgccggttcaggtgtttaacttgcagggggccgtggagcccatgcagatcgacgtggacccccaggaagacccgcagaatgcacctgacgtcaactacgtggtggagaaccccagcctggatctggaacagtacgcggccagctacagcggcctgatgcgcatcgaacggctgcagttcattgctgatcactgccccacgctgcgggtggaggccctgaagatggccctctccttcgtgcagagaacctttaacgtggacatgtacgaggagatccaccgcaagctctcagaggccaccagggagctgcagaacgcacccgacgccatccctgagagcggcgtggagcccccagccctggacacggcctgggtggaggccacgcggaagaaggcgctgctgaagctggagaagctggacacagacctgaagaactacaagggcaactccatcaaagagagcatccggcgcggccacgacgacctgggcgaccactacctggactgtggggacctcagcaacgccctcaagtgctattcccgggcccgggactactgcaccagcgccaaacacgtcatcaacatgtgcctcaatgtcatcaaggtcagcgtctacttgcagaattggtctcatgtgctcagctacgtcagcaaggctgagtccaccccagagattgccgagcagcgaggagagcgtgacagccagacccaggccatcctcaccaagctcaagtgtgccgcaggcttggcagagctggccgccaggaagtacaagcaggctgccaagtgcctcctgctggcttcctttgatcactgtgacttccctgagctgctgtcccccagcaacgtggccatctacggtggcctgtgcgccttggctacctttgaccggcaggagctgcagcgcaatgtcatctccagcagctccttcaagttgttcttggagctggagccacaggtccgagacatcatcttcaaattctacgagtccaagtacgcctcatgtctcaagatgctggacgagatgaaggacaacctgctcctggacatgtatctggccccccatgtcaggaccctgtacacccagattcgcaaccgtgccctcatccagtatttcagcccctacgtgtcagccgacatgcataggatggcggcagccttcaataccacggtggccgccctggaggacgagctgacgcagctaatcctggaggggctgatcagtgcccgtgtggactcacacagcaagatcctatacgcccgggacgtggatcagcgcagcaccacctttgagaagtctctgttgatgggcaaggagttccagcgccgcgccaaggccatgatgctgcgggcagctgtgctccgcaaccagatccatgtcaagtccccgcccagagaagggagccagggggagctgactccagccaacagccagtcccggatgagcaccaacatgtgaggggtgaaccttggcctccaggacatctgcaccccctccccacctccacggacctcggacctccaggcggctcagtgctgcctgcggcccagctaaggggcctggccactgggtgccacccagcctgtgtgccctccctggggctgaggaggcaggcggctgctagttgtggcccttcctggaaggagaggcctgcagggctcgaccctgtgggtttctgtccccagggagcagactgtgcggcacccaggcccagtggcaccatttcccagacccctcctgttcccgcctcagtcaggtgcagacaagtgggcggtgtccattaaagagcagactcagcgtt

SEQ ID NO: 10153 - protein, 471 aa, Homo sapiens
  ref <308>: DATABASE ACCESSION NUMBER: SWISS-Prot / Q13098
  ref <309>: DATABASE ENTRY DATE: 2002-06-15
MQIDVDPQEDPQNAPDVNYVVENPSLDLEQYAASYSGLMRIERLQFIADHCPTLRVEALKMALSFVQRTFNVDMYEEIHRKLSEATRELQNAPDAIPESGVEPPALDTAWVEATRKKALLKLEKLDTDLKNYKGNSIKESIRRGHDDLGDHYLDCGDLSNALKCYSRARDYCTSAKHVINMCLNVIKVSVYLQNWSHVLSYVSKAESTPEIAEQRGERDSQTQAILTKLKCAAGLAELAARKYKQAAKCLLLASFDHCDFPELLSPSNVAIYGGLCALATFDRQELQRNVISSSSFKLFLELEPQVRDIIFKFYESKYASCLKMLDEMKDNLLLDMYLAPHVRTLYTQIRNRALIQYFSPYVSADMHRMAAAFNTTVAALEDELTQLILEGLISARVDSHSKILYARDVDQRSTTFEKSLLMGKEFQRRAKAMMLRAAVLRNQIHVKSPPREGSQGELTPANSQSRMSTNM

SEQ ID NO: 10154 - DNA, 469 bp, Rattus norvegicus
  ref <308>: DATABASE ACCESSION NUMBER: EMBL / X89697
  ref <309>: DATABASE ENTRY DATE: 1997-04-07
tgtgtgtcgtccactacactacaccagcattatgcaccctcttctctgccacacattggccatctcctcctgggtgggaggccttgtgaactctctgactcagacaagcctcatcatgaccatacctctctgtggccatcacctgaaccacttctactgtgagatgcttgttctcctgaagctggcttgtgaggacacagggggaacagaggccaacttgtttgtggcaggggctataattttggtctgtcctgtagcactaattctaggcacctatgcacacattgcccatgcggtgctgaagatcaagtcaagagctgggcgcagaaaggctctggggacttgtgggtcccaccttactgtggtttccctcttttatggctcagccatgtacacgtatctccaacctgtccacatgtattctgggagtgaaggaaagttcgctgccctcttttataccatagttact

SEQ ID NO: 10155 - protein, 154 aa, Rattus norvegicus
  ref <308>: DATABASE ACCESSION NUMBER: SWISS-Prot / CAA61844
  ref <309>: DATABASE ENTRY DATE: 2001-12-01
VCRPLHYTSIMHPLLCHTLAISSWVGGLVNSLTQTSLIMTIPLCGHHLNHFYCEMLVLLKLACEDTGGTEANLFVAGAIILVCPVALILGTYAHIAHAVLKIKSRAGRRKALGTCGSHLTVVSLFYGSAMYTYLQPVHMYSGSEGKFAALFYTI

SEQ ID NO: 10156 - DNA, 647 bp, Homo sapiens
  ref <308>: DATABASE ACCESSION NUMBER: EMBL / AF399629
  ref <309>: DATABASE ENTRY DATE: 2001-08-27
ctcctggacctctgcttcaccaccagcaccgtgccccagctcctgatcaacctttgcggggtggaccgcaccatcacccgtggagggtgtgtggctcagctcttcatctacctagccctgggctccacagagtgtgtgctcctggtggtgatggcctttgaccgctatgctgctgtctgtcgtccactccactacatggccatcatgcacccccatctctgccagaccctggctatcgcctcctggggtgcgggtttcgtgaactctctgatccagacaggtctcgcaatggccatgcctctctgtggccatcgactgaatcacttcttctgtgagatgcctgtatttctgaagttggcttgtgcggacacagaaggaacagaggccaagatgtttgtggcccgagtcatagtcgtggctgttcctgcagcacttattctaggctcctatgtgcacattgctcatgcagtgctgagggtgaagtcaacggctgggcgcagaaaggcttttgggacttgtgggtcccacctcctagtagttttccttttttatggctcagccatctacacatatctccaatccatccacaattattctgagcgtgagggaaaatttgttgcccttttttatactataattacccccat

SEQ ID NO: 10157 - protein, 215 aa, Homo sapiens
  ref <308>: DATABASE ACCESSION NUMBER: SWISS-Prot / AAK95114
  ref <309>: DATABASE ENTRY DATE: 2003-02-01
LLDLCFTTSTVPQLLINLCGVDRTITRGGCVAQLFIYLALGSTECVLLVVMAFDRYAAVCRPLHYMAIMHPHLCQTLAIASWGAGFVNSLIQTGLAMAMPLCGHRLNHFFCEMPVFLKLACADTEGTEAKMFVARVIVVAVPAALILGSYVHIAHAVLRVKSTAGRRKAFGTCGSHLLVVFLFYGSAIYTYLQSIHNYSEREGKFVALFYTIITP

SEQ ID NO: 10158 - DNA, 430 bp, Rattus norvegicus
  ref <308>: DATABASE ACCESSION NUMBER: EMBL / X89698
  ref <309>: DATABASE ENTRY DATE: 1997-04-07
tatctgcaaacctctttactatacaactattatgagtaggcccatatgtcaccgcctggtggctggttcctgggtggggggattttttcattctattattcagattttcatcactatccctttgcctttctgtggtcccaatattattgaccactacttctgtgacctccatcccttattcaagttggcctgcactgacacttttgtggtaggggtaattatgtttgttaacagtggattattttctgtattttccttccttttcttggtgtcttcttacattgttatcctatataacttgaggaatcactctgctgaggggaggcgcaaggctctatctacctgtgcatctcacatcatggtggttgtcttgttcttcggacctgccatcttcctctacttgagacctgcttccacctacactgaagac

SEQ ID NO: 10159 - protein, 143 aa, Rattus norvegicus
  ref <308>: DATABASE ACCESSION NUMBER: SWISS-Prot / CAA61845
  ref <309>: DATABASE ENTRY DATE: 2001-12-01
ICKPLYYTTIMSRPICHRLVAGSWVGGFFHSIIQIFITIPLPFCGPNIIDHYFCDLHPLFKLACTDTFVVGVIMFVNSGLFSVFSFLFLVSSYIVILYNLRNHSAEGRRKALSTCASHIMVVVLFFGPAIFLYLRPASTYTED

SEQ ID NO: 10160 - DNA, 641 bp, Homo sapiens
  ref <308>: DATABASE ACCESSION NUMBER: EMBL / AF399579
  ref <309>: DATABASE ENTRY DATE: 2001-08-27
ttggtggagatcagttattcctccactatcgcccctaaattcatcatagacttacttgccaagattaaaaccatctctctggaaggctgtctgactcagatattcttcttccacttctttggggttgctgagatccttttgattgtggtgatggcctatgattgctacgtggccatttgcaagcctcttcattatatgaacattatcagtcgtcaactgtgtcaccttctggtggctggttcctggctggggggcttttgtcactccataattcagattctcgttatcatccaattgcccttctgtggtcccaatgtgattgaccactatttctgtgacctccagcctttattcaagcttgcctgcactgacaccttcatggagggggttattgtgttggccaacagtggattattctctgtcttctccttcctcatcttggtgtcctcttatattgtcattctggtcaacttgaggaaccattctgcagaggggaggcacaaagccctctccacctgtgcttctcacatcacagtggtcatcttgttttttggacctgctatcttcctctacatgcgaccttcttccactttcactgaagataaacttgtggctgtattctacacggtcatcacccccat

SEQ ID NO: 10161 - protein, 213 aa, Homo sapiens
  ref <308>: DATABASE ACCESSION NUMBER: SWISS-Prot / AAK95064
  ref <309>: DATABASE ENTRY DATE: 2002-03-01
LVEISYSSTIAPKFIIDLLAKIKTISLEGCLTQIFFFHFFGVAEILLIVVMAYDCYVAICKPLHYMNIISRQLCHLLVAGSWLGGFCHSIIQILVIIQLPFCGPNVIDHYFCDLQPLFKLACTDTFMEGVIVLANSGLFSVFSFLILVSSYIVILVNLRNHSAEGRHKALSTCASHITVVILFFGPAIFLYMRPSSTFTEDKLVAVFYTVITP

SEQ ID NO: 10162 - DNA, 472 bp, Rattus norvegicus
  ref <308>: DATABASE ACCESSION NUMBER: EMBL / X89703
  ref <309>: DATABASE ENTRY DATE: 1997-04-07
aatctgtaagcctttactatacaaggctatcatggtacctaggatctgttgtcttctgatatttgtttcatatttgatagggtttgtttgtgccatgatcctcacaggcttaatgtttaggctcaaattttgtaatatcagcatcatcaatcactacatgtgtgacatcttccctgtcattcggatctcctgcagtaacacctatgtcaatgaacttgtgagctctgctgtggtgggtacaggtatcattttatgtagcctccttatcttaatctcttatgctatgatcctttccaatatcctttatatgtcttcaggtaagggttggtccaaagccttgggcacttgtggttctcacatcataactgttagtttcttctatggatctgggctgcttgcttatgtaaagccatcttctgctgagactgtaggccagggaaaaattttttcagtgttttatacatttctggtg

SEQ ID NO: 10163 - protein, 157 aa, Rattus norvegicus
  ref <308>: DATABASE ACCESSION NUMBER: SWISS-Prot / CAA61850
  ref <309>: DATABASE ENTRY DATE: 2002-06-01
ICKPLLYKAIMVPRICCLLIFVSYLIGFVCAMILTGLMFRLKFCNISIINHYMCDIFPVIRISCSNTYVNELVSSAVVGTGIILCSLLILISYAMILSNILYMSSGKGWSKALGTCGSHIITVSFFYGSGLLAYVKPSSAETVGQGKIFSVFYTFLV

SEQ ID NO: 10164 - DNA, 472 bp, Homo sapiens
  ref <308>: DATABASE ACCESSION NUMBER: EMBL / X89675
  ref <309>: DATABASE ENTRY DATE: 1997-04-07
catctgtaacccactgttgtacatggtcaccatgtctccccaggtgtgttttctccttttgttgggtgtctatgggatggggtttgctggggccatggcccacacagcgtgcatgatgggtgtgaccttctgtgccaataaccttgtcaaccactacatgtgtgacatccttccccttcttgagtgtgcttgcaccagcacctatgtgaatgagcttgtagtgtttgttgttgtgagcattgatattggtgtgcccacagtcactatcttcatttcctatgctctcattctctccagcatcttccacattgattccacggagggcaggtccaaagccttcagcacctgcagctcccacataattgcagtttctctgttctttgggtcaggagcattcatgtacctcaaacccttttctcttttagctatgaaccagggcaaggtgtcttccctattctataccactgtggtg

SEQ ID NO: 10165 - protein, 311 aa, Homo sapiens
  ref <308>: DATABASE ACCESSION NUMBER: SWISS-Prot / CAA61822
  ref <309>: DATABASE ENTRY DATE: 2002-06-15
MAAENSSFVTQFILAGLTDQPGVQIPLFFLFLGFYVVTVVGNLGLITLIRLNSHLHTPMYFFLYNLSFIDFCYSSVITPKMLMSFVLKKNSISYAGCMTQLFFFLFFVVSESFILSAMAYDRYVAICNPLLYMVTMSPQVCFLLLLGVYGMGFAGAMAHTACMMGVTFCANNLVNHYMCDILPLLECACTSTYVNELVVFVVVGIDIGVPTVTIFISYALILSSIFHIDSTEGRSKAFSTCSSHIIAVSLFFGSGAFMYLKPFSLLAMNQGKVSSLFYTTVVPMLNPLIYSLRNKDVKVALKKILNKNAFS

SEQ ID NO: 10166 - DNA, 2924 bp, Rattus norvegicus
  ref <308>: DATABASE ACCESSION NUMBER: EMBL / X91810
  ref <309>: DATABASE ENTRY DATE: 1996-02-29
atggctcagtggaaccagctccagcagctggacacgcgctacctggagcagcttcatcagctgtacagcgatagcttccccatggagctgcggcagttcctggcgccttggattgagagccaagattgggcatatgcagccagcaaagagtcacacgccactctggtgtttcataacctcttgggcgagatcgaccagcagtatagccgattcctgcaggagtccaatgtcctctatcagcacaacctgcgaagaatcaagcagttcctgcagagcaggtatcttgagaagccaatggaaattgcccggattgtggcccgatgcctgtgggaagagtctcgcctcctccagacggcagccacggcagcccagcaagggggccaggccaaccaccccacagctgccgtagtgacggagaagcagcagatgctggaacagcatcttcaggatgtccggaagcgtgtgcaggatctagaacagaaaatgaaagtggtggagaatctccaggatgactttgatttcaactataaaaccctcaagagtcaaggagacatgcaggatctgaatggaaacaaccagtctgtgaccagacagaagatgcagcagctggagcagatgctcacggccctggaccagatgcggaggagcatcgtgagcgagctggcagggctcttgtcagcaatggagtacgtgcagaagacactgaccgatgaagagctggctgactggaagaggcggcagcagatagcgtgcatcggaggccctcccaacatctgcctggaccgtctggaaaactggataacttcattagcagaatctcaacttcagacccgccaacaaattaagaaactggaggagctgcagcagaaagtgtcctacaagggggaccctattgtgcagcaccggccaatgctggaggagaggatcgtggatctgttcagaaacttaatgaagagtgccttcgtggtggagcggcagccctgtatgcccatgcacccggaccggcccttagtcatcaagactggtgtccagtttaccacaaaagtcaggttgctggtcaaatttcctgagttgaattatcagcttaaaattaaagtgtgcattgataaggactctggggatgtcgctgccctcagagggtctcggaaatttaacattctgggcacgaacacaaaggtgatgaacatggaggagtccaacaacggtagcctgtctgcagagttcaagcacctgaccctgagggagcagagatgtgggaatgggggccgtgccaattgtgatgcctccttgattgtcactgaggagctgcacctgatcacctttgagacagaggtgtaccaccaaggtctcaagatcgacctagagacccactccttgccagtcgtggtgatctccaacatctgtcagatgcctaatgcttgggcatcaatcctgtggtataacatgctgaccaataaccccaagaacgtgaacttcttcactaagcctccgattggaacctgggaccaagtggccgaggtgctgagctggcagttctcgtccaccaccaagcgagggctgagcatcgagcagctgaccaccctggccgagaagctcttagggcctggtgtgaactactcagggtgtcagatcacatgggctaagttttgcaaagaaaacatggccggcaagggcttctcgttctgggtctggctagacaatatcatcgaccttgtgaaaaagtatatcttggccctttggaatgaagggtacatcatgggtttcatcagcaaggagcgggagagggccatcctaagcacaaagcccccgggcaccttcctgctgcggttcagtgagagcagcaaggaaggaggggtcactttcacttgggtggaaaaggacatcagtggcaagacccagatccagtctgtagaaccatataccaagcagcagctgaacaacatgtcatttgctgaaatcatcatgggctataagatcatggacgctaccaacatcctggtatccccactggtctacctctaccctgacattcccaaggaggaggcattcggaaagtattgtcgccccgagagccaggagcaccctgaagctgacccaggtagtgctgccccttacctgaagaccaagttcatctgtgtgacaccaacgacctgcagcaataccattgacctgccgatgtccccccgcactttagattcattgatgcagtttggaaataacggtgaaggtgctgagccctcagcaggagggcagtttgagtcgctcacgtttgacatggatctgacctcggagtgtgctacctccccgatgtgaggagctgaaaggcaaagctacagagtatgactgagacactgcccatgtcaccttagcagcaactcagatcactgaactcactgtgtccagattttttctttaacctcctacttctgctgtctttgggcagtctgggtactttttaaaatagagaactgagtgagcgtgggtgatgcgctcttatgtgaggaggagggcacctcttgagtccgtgatggctgtgaaagcagagggctgggggggagcgaaaggaaacacctatgttctgtccgcctgtcctcctggtttgttgttgacaagcgcctcctggtgccatggcatcctgctgcccctttctgtgagctgataccccaggctgggactcccggctctgcactttcaacctggttaatgtccacatagaagctaggactaagcctataggcttctctttaagttaaaaaaaaaaaaaatactaagaattaaagggcaaaacacactgaaaacagcatagcctttccatatcaaagaaaactcgggtaacagccttttcggtgctttaagctgtcttaggctgatcatttatataaactctgcaatggttcaatcaatctgtaaagacagctgagaac

SEQ ID NO: 10167 - protein, 770 aa, Rattus norvegicus
  ref <308>: DATABASE ACCESSION NUMBER: SWISS-Prot / P52631
  ref <309>: DATABASE ENTRY DATE: 2002-06-15
MAQWNQLQQLDTRYLEQLHQLYSDSFPMELRQFLAPWIESQDWAYAASKESHATLVFHNLLGEIDQQYSRFLQESNVLYQHNLRRIKQFLQSRYLEKPMEIARIVARCLWEESRLLQTAATAAQQGGQANHPTAAVVTEKQQMLEQHLQDVRKRVQDLEQKMKVVENLQDDFDFNYKTLKSQGDMQDLNGNNQSVTRQKMQQLEQMLTALDQMRRSIVSELAGLLSAMEYVQKTLTDEELADWKRRQQIACIGGPPNICLDRLENWITSLAESQLQTRQQIKKLEELQQKVSYKGDPIVQHRPMLEERIVDLFRNLMKSAFVVERQPCMPMHPDRPLVIKTGVQFTTKVRLLVKFPELNYQLKIKVCIDKDSGDVAALRGSRKFNILGTNTKVMNMEESNNGSLSAEFKHLTLREQRCGNGGRANCDASLIVTEELHLITFETEVYHQGLKIDLETHSLPVVVISNICQMPNAWASILWYNMLTNNPKNVNFFTKPPIGTWDQVAEVLSWQFSSTTKRGLSIEQLTTLAEKLLGPGVNYSGCQITWAKFCKENMAGKGFSFWVWLDNIIDLVKKYILALWNEGYIMGFISKERERAILSTKPPGTFLLRFSESSKEGGVTFTWVEKDISGKTQIQSVEPYTKQQLNNMSFAEIIMGYKIMDATNILVSPLVYLYPDIPKEEAFGKYCRPESQEHPEADPGSAAPYLKTKFICVTPTTCSNTIDLPMSPRTLDSLMQFGNNGEGAEPSAGGQFESLTFDMDLTSECATSPM

SEQ ID NO: 10168 - DNA, 2787 bp, Homo sapiens
  ref <308>: DATABASE ACCESSION NUMBER: EMBL / L29277
  ref <309>: DATABASE ENTRY DATE: 2000-03-04
cagctggaattcggggcggcggcgcagactgggagggggagccgggggttccgacgtcgcagccgagggaacaagccccaaccggatcctggacaggcaccccggcttggcgctgtctctccccctcggctcggagaggcccttcggcctgagggagcctcgccgcccgtccccggcacacgcgcagccccggcctctcggcctctgccggagaaacaggatggcccaatggaatcagctacagcagcttgacacacggtacctggagcagctccatcagctctacagtgacagcttcccaatggagctgcggcagtttctggccccttggattgagagtcaagattgggcatatgcggccagcaaagaatcacatgccactttggtgtttcataatctcctgggagagattgaccagcagtatagccgcttcctgcaagagtcgaatgttctctatcagcacaatctacgaagaatcaagcagtttcttcagagcaggtatcttgagaagccaatggagattgcccggattgtggcccggtgcctgtgggaagaatcacgccttctacagactgcagccactgcggcccagcaagggggccaggccaaccaccccacagcagccgtggtgacggagaagcagcagatgctggagcagcaccttcaggatgtccggaagagagtgcaggatctagaacagaaaatgaaagtggtagagaatctccaggatgactttgatttcaactataaaaccctcaagagtcaaggagacatgcaagatctgaatggaaacaaccagtcagtgaccaggcagaagatgcagcagctggaacagatgctcactgcgctggaccagatgcggagaagcatcgtgagtgagctggcggggcttttgtcagcgatggagtacgtgcagaaaactctcacggacgaggagctggctgactggaagaggcggcaacagattgcctgcattggaggcccgcccaacatctgcctagatcggctagaaaactggataacgtcattagcagaatctcaacttcagacccgtcaacaaattaagaaactggaggagttgcaccaaaaagtttcctacaaaggggaccccattgtacagcaccggccgatgctggaggagaggatcgtggagctgttcagaaacttaatgaaaagtgcctttgtggtggagcggcagccctgcatgcccatgcatcctgaccggcccctcgtcatcaagaccggcgtccagttcactactaaagtcaggttgctggtcaagttccctgagttgaattatcagcttaaaattaaagtgtgcattgacaaagactctggggacgttgcagctctcagaggatcccggaaatttaacattctgggcacaaacacaaaagtgatgaacatggaagaatccaacaacggcagcctctctgcagaattcaaacacttgaccctgagggagcagagatgtgggaatgggggccgagccaattgtgatgcttccctgattgtgactgaggagctgcacctgatcacctttgagaccgaggtgtatcaccaaggtctcaagattgacctagagacccactccttgtcagttgtggtgatctccaacatctgtcagatgccaaatgcctgggcgtccatcctgtggtacaacatgctgaccaacaatcccaagaatgtgaacttcttcactaagccgccaattggaacctgggaccaagtggccgaggtgctcagctggcagttctcgtccaccaccaagcgggggctgagcatcgagcagctgacaacgctggctgagaagctcctagggcctggtgtgaactactcagggtgtcagatcacatgggctaacttctgcaaagaaaacatggctggcaagggcttctcctactgggtctggctagacaatatcatcgaccttgtgaaaaagtatatcttggccctttggaatgaagggtacatcatgggtttcatcagcaaggagcgggagcgggccatcttgagcactaagcccccaggcaccttcctgctgcgcttcagtgaaagcagcaaagaaggaggcgtcactttcacttgggtggagaaggacatcagcggtaagacccagatccagtccgtggaaccatacacaaagcagcagctgaacaacatgtcatttgctgaaatcatcatgggctataagatcatggatgctaccaatatcctgttgtctccacttgtctatctctatcctgacattcccaaggaggaggcattcgggaagtattgtcggccagagagccaggagcatcctgaagctgacccaggtagcgctgccccatacctgaagaccaagtttatctgtgtgacaccaacgacctgcagcaataccattgacctgccgatgtccccccgcgctttagattcattgatgcagtttggaaataatggtgaaggtgctgaaccctcagcaggagggcagtttgagtccctcacctttgacatggagttgacctcggagtgcgctacctcccccatgtgaggagctgagaacggaagctgcagaaagatacgactgaggcgcctacctgcattctgccacccctcacacagccaaaccccagatcatctgaaactactaactttgtggttccagattttttttaatctcctacttctgctatctttgagcaatctgggcacttttaaaaatagagaaatgagtgaatgtgggtgatctgcttttatctaaatgcaaataaggatgtgttctctgagacccatgatcaggggatg

SEQ ID NO: 10169 - protein, 770 aa, Homo sapiens
  ref <308>: DATABASE ACCESSION NUMBER: SWISS-Prot / P40763
  ref <309>: DATABASE ENTRY DATE: 2002-06-15
MAQWNQLQQLDTRYLEQLHQLYSDSFPMELRQFLAPWIESQDWAYAASKESHATLVFHNLLGEIDQQYSRFLQESNVLYQHNLRRIKQFLQSRYLEKPMEIARIVARCLWEESRLLQTAATAAQQGGQANHPTAAVVTEKQQMLEQHLQDVRKRVQDLEQKMKVVENLQDDFDFNYKTLKSQGDMQDLNGNNQSVTRQKMQQLEQMLTALDQMRRSIVSELAGLLSAMEYVQKTLTDEELADWKRRQQIACIGGPPNICLDRLENWITSLAESQLQTRQQIKKLEELHQKVSYKGDPIVQHRPMLEERIVELFRNLMKSAFVVERQPCMPMHPDRPLVIKTGVQFTTKVRLLVKFPELNYQLKIKVCIDKDSGDVAALRGSRKFNILGTNTKVMNMEESNNGSLSAEFKHLTLREQRCGNGGRANCDASLIVTEELHLITFETEVYHQGLKIDLETHSLSVVVISNICQMPNAWASILWYNMLTNNPKNVNFFTKPPIGTWDQVAEVLSWQFSSTTKRGLSIEQLTTLAEKLLGPGVNYSGCQITWANFCKENMAGKGFSYWVWLDNIIDLVKKYILALWNEGYIMGFISKERERAILSTKPPGTFLLRFSESSKEGGVTFTWVEKDISGKTQIQSVEPYTKQQLNNMSFAEIIMGYKIMDATNILLSPLVYLYPDIPKEEAFGKYCRPESQEHPEADPGSAAPYLKTKFICVTPTTCSNTIDLPMSPRALDSLMQFGNNGEGAEPSAGGQFESLTFDMELTSECATSPM

SEQ ID NO: 10170 - DNA, 2243 bp, Rattus norvegicus
  ref <308>: DATABASE ACCESSION NUMBER: EMBL / X92070
  ref <309>: DATABASE ENTRY DATE: 1996-04-18
gggaactgggagcatggcttctgcagtcgcagcagcactagtgagctgggggtttctggattacaagacagagaaatatgtgatgaccaggaactgctgggtgggcatctcccagaggctgctgcagctcggagtggtagtctacgtgattgggtgggccctcttggccaaaaaaggctaccaggaatgggacatggacccccagatttctgtcatcaccaaactcaagggggtttctgtaacccaggttaaggaactggagaaacggctgtgggatgtggctgacttcgtgaggccatcacagggagagaatgtgttcttcctggtaaccaacttccttgtgacaccagctcaagtccagggcagatgcccagagcatccttctgttcctctggctaactgctgggctgatgaggactgtcctgaaggggagatggggacatacagccacggcataaagactggtcagtgtgtggcgttcaacggaacccacaggacctgtgagatctggagctggtgcccagtggagagtagtgctgtgcccaggaaacccctgctagctcaggccaagaacttcacgctcttcatcaaaaatactgtaaccttcaacaagttcaacttctccagaaccaatgccttagatacctgggacaacacctatttcaagtactgtctctacgattcactctccagtccgtactgcccagtgttccgcatcggggaccttgtggctatgactggaggggactttgaggaccttgcattgctgggtggtgctgtgggcatcaacatccactgggattgcaacctggacacgaaaggctctgactgctctccccagtactccttccagctgcaggagagggggtacaatttcaggacagctaattactggtgggcagcctcaggcgtggagtcccggagcctgctcaaactctatgggatccgctttgacattcttgtcactgggcaggcaggaaagtttgcactcatccctacggccatcacagtgggcacaggagcagcttggctgggcatggtcaccttcctctgtgatctgctgctactgtacgtggatagagaggccggtttctactggaggaccaagtatgaagaggcaagagccccaaaggcaactaccaacagtgcatagacagagccggctttctcacctgctaaccctgctgcccaggtgtctcaggagtggtttgcacctgccccacgtctgctgatgccgggatccaagcattcatgcaccagtggcctgtctggatggtgtcagcctatccattcctgaggcatacaccctctccctgctagttaaagttagggcttgggaacatcgaggacaaagccccacaggactggagagggggttggggtaattccaccagactctgcatacaaactccctcctaggttcacccagagagagagagagagagagagagagagagagagagagagagagcgcaatgcggttgaatgaatggtggctggtatccttggaactctctttatgtctgctggggcactctgccatctagttcaaggcccctggtcctggctaccaggtttctcgggagcctaaggaatgagagaagctgcatgtctaggatttcctgttatcaaatcagtcctggcaacctcaacctattctgaagcacctgcctgccagaggccctgactctggccccagtcagagtgccatagttttgaggtatggtctcatgaagggcactggggttccttaggactggctggttctgtaactatccttccttgattcttcccttagtaagactttccccatgaaccatagaaagaagggcaaggacaggctacataaactttcctggtccaagtgtggggtggtgtagaaagtgcatcccgggaagtgaagaggcagtttggctgtggatgtgcagtcacggagggaataccaaggctagggtgaaagcaacagtcacagctgggacctccaggcttccacggcctccaaaaccctttagaattcctggtgccactcagccctcaaggctgtagcctgaaaagggctagagtgcagaggcgggggtcccggaggtggctcacatggacacagtagttctgggggtaggggaaccaaagaacctgatattcctgctgaagtaaagcttgccaaagcaaaaaaaaaaaaaaaaaaaaaaaaaaaaaaaaaaaaaaaaaaaaaaaaaaaaaaaaaaaaaaaaaaaaaaaaaaaa

SEQ ID NO: 10171 - protein, 379 aa, Rattus norvegicus
  ref <308>: DATABASE ACCESSION NUMBER: SWISS-Prot / P51579
  ref <309>: DATABASE ENTRY DATE: 2001-10-16
MASAVAAALVSWGFLDYKTEKYVMTRNCWVGISQRLLQLGVVVYVIGWALLAKKGYQEWDMDPQISVITKLKGVSVTQVKELEKRLWDVADFVRPSQGENVFFLVTNFLVTPAQVQGRCPEHPSVPLANCWADEDCPEGEMGTYSHGIKTGQCVAFNGTHRTCEIWSWCPVESSAVPRKPLLAQAKNFTLFIKNTVTFNKFNFSRTNALDTWDNTYFKYCLYDSLSSPYCPVFRIGDLVAMTGGDFEDLALLGGAVGINIHWDCNLDTKGSDCSPQYSFQLQERGYNFRTANYWWAASGVESRSLLKLYGIRFDILVTGQAGKFALIPTAITVGTGAAWLGMVTFLCDLLLLYVDREAGFYWRTKYEEARAPKATTNSA

SEQ ID NO: 10172 - DNA, 851 bp, Homo sapiens
  ref <308>: DATABASE ACCESSION NUMBER: EMBL / BE876713
  ref <309>: DATABASE ENTRY DATE: 2000-10-22
ctccccaggggccacagcagactgggggcttctggattataaaacggagaagtgggcgctcctcgccaaaaaaggctaccaggagcgggacctggaaccccagatttccatcacaaccaaactcaaaggggtttccgtgactcagatcaaggagcttggaaaccggctgtgggatgtggccgacttcgtgaagccacctcagggagagaacgtgttcttcttggtgaccaacttccttgtgacgccagcccaagttcagggcagatgcccagagatacagggtcttgctatgttgcccaggctggagtgaagaggctattcacaggtatgatcaagcccactgcagccttgagcctcctaggctcaagccgtcctcccaactcagccttctgagtaactgagactacaggcgtgtaccaccattcccagctaataaagtctatttttaaaaaatcaaaaaaaaaaaaaaaaaaaaaaaaaaaaaaaaaaaaaaaaaaaaaacaaaaacaaaaacaaaaaacagggggggcacaaaaaagagacccgagaggggcacaaaaataagagcaacaacatatgtggagacaggggcccaaagagagggcgaaaatacgagcaaagaaacgggccagaaaaaacagacccgcagagggaaacacggcccccgcggaactatggaagagagccccacaccacgcgaggagggcacaaacaagcggcgaaacagcaacacgagagagagacaacccccaggggccacacaaacacaacggggcacacaagcggcgcaagcagcgagacaaagcgacgcagtagaaagaggagaaagagaacggacggaaaactcacgg

SEQ ID NO: 10173 - protein, 431 aa, Homo sapiens
  ref <308>: DATABASE ACCESSION NUMBER: Refseq / NP_005437
  ref <309>: DATABASE ENTRY DATE: 2002-11-05
MGSPGATTGWGLLDYKTEKYVMTRNWRVGALQRLLQFGIVVYVVGWALLAKKGYQERDLEPQFSIITKLKGVSVTQIKELGNRLWDVADFVKPPQGENVFFLVTNFLVTPAQVQGRCPEHPSVPLANCWVDEDCPEGEGGTHSHGVKTGQCVVFNGTHRTCEIWSWCPVESGVVPSRPLLAQAQNFTLFIKNTVTFSKFNFSKSNALETWDPTYFKHCRYEPQFSPYCPVFRIGDLVAKAGGTFEDLALLGGSVGIRVHWDCDLDTGDSGCWPHYSFQLQEKSYNFRTATHWWEQPGVEARTLLKLYGIRFDILVTGQAGKFGLIPTAVTLGTGAAWLGVVTFFCDLLLLYVDREAHFYWRTKYEEAKAPKATANSVWRELALASQARLAECLRRSSAPAPTATAAGSQTQTPGWPCPSSDTHLPTHSGSL

SEQ ID NO: 10174 - DNA, 716 bp, Rattus norvegicus
  ref <308>: DATABASE ACCESSION NUMBER: EMBL / X92097
  ref <309>: DATABASE ENTRY DATE: 1996-09-09
agcggcttcgcctcgtccgcaccatggtgactctcgcagaactgctggtgctgctggccgcgctgctggccacggcctcgggctacttcgtcagcatcgacgcgcacgccgaggagtgcttcttcgagcgggtcacctcgggcaccaagatgggcctcatcttcgaggtggcggagggcggcttcctggacatcgacgtggagatcacaggaccagataataaaggaatctataaaggagaccgggagtccagcgggaagtacacgtttgcagcccacatggatgggacatacaagttctgctttagtaataggatgtccactatgactccaaagatagtgatgttcaccattgacattggggaggctcctaaaggacaagacatggagacagaagctcatcaaaacaagctagaagaaatgattaatgagctggcagtggccatgacagccgtaaagcacgaacaggagtacatggaagtccgggagagaatacacagagccatcaacgacaacacaaacagcagagtggtcctttggtccttcttcgaagctcttgttcttgttgccatgacattgggacagatctactacctgaagagattttttgaagtccggagggttgtttaaaaggccttttcctattgatcccaaattcatgatttacttgtttaccaaacaccttggtcataataatgtcattagtttatacatttt

SEQ ID NO: 10175 - protein, 201 aa, Rattus norvegicus
  ref <308>: DATABASE ACCESSION NUMBER: SWISS-Prot / Q63524
  ref <309>: DATABASE ENTRY DATE: 2001-10-16
MVTLAELLVLLAALLATASGYFVSIDAHAEECFFERVTSGTKMGLIFEVAEGGFLDIDVEITGPDNKGIYKGDRESSGKYTFAAHMDGTYKFCFSNRMSTMTPKIVMFTIDIGEAPKGQDMETEAHQNKLEEMINELAVAMTAVKHEQEYMEVRERIHRAINDNTNSRVVLWSFFEALVLVAMTLGQIYYLKRFFEVRRVV

SEQ ID NO: 10176 - DNA, 684 bp, Homo sapiens
  ref <308>: DATABASE ACCESSION NUMBER: EMBL / BG255482
  ref <309>: DATABASE ENTRY DATE: 2001-03-09
cgatgacagctgtaaagcacgaacaggaatacatggaagtccgggagagaatacacagagccatcaacgacaacacaaacagcagagtggtcctttggtccttctttgaagctcttgttctagttgccatgacattgggacagatctactacctgaagagattttttgaagtccggagagttgtttaaaaagcctcttcctgatgatcccaactcagaattcactgtttaccaaacaccttggtcataataatgtcattagtttctccatttttattttctgaactgtacattcacaacttatgtttctttgagattaatagatatgggggaaaaacgcctttttaggaaaattatagtgaaaatttgacagttgattggcataatttcttgtttgaatgctgcctccattatataggtccttccaggaactcaaacactgtaagtgaaatatgggagtatagtttttattatttcttcttttccttttgttttcataatataatgcagtttgttcaggaaatcagcacaaagcctgatagtactttactaaaatgactgcattctttggattccttcagtctatggttcaagtcactaaagattcattttgttgagtccttatgagaaacagcagtatgaatcttgacggtttctgcccgtcctaatggcagagctctctgac

SEQ ID NO: 10177 - protein, 201 aa, Homo sapiens
  ref <308>: DATABASE ACCESSION NUMBER: SWISS-Prot / Q15363
  ref <309>: DATABASE ENTRY DATE: 2002-06-15
MVTLAELLVLLAALLATVSGYFVSIDAHAEECFFERVTSGTKMGLIFEVAEGGFLDIDVEITGPDNKGIYKGDRESSGKYTFAAHMDGTYKFCFSNRMSTMTPKIVMFTIDIGEAPKGQDMETEAHQNKLEEMINELAVAMTAVKHEQEYMEVRERIHRAINDNTNSRVVLWSFFEALVLVAMTLGQIYYLKRFFEVRRVV

SEQ ID NO: 10178 - DNA, 716 bp, Rattus norvegicus; identical to SEQ ID NO: 10174
  ref <308>: DATABASE ACCESSION NUMBER: EMBL / X92097
  ref <309>: DATABASE ENTRY DATE: 1996-09-09

SEQ ID NO: 10179 - protein, 201 aa, Rattus norvegicus; identical to SEQ ID NO: 10175
  ref <308>: DATABASE ACCESSION NUMBER: SWISS-Prot / Q63524
  ref <309>: DATABASE ENTRY DATE: 2001-10-16

SEQ ID NO: 10180 - DNA, 684 bp, Homo sapiens; identical to SEQ ID NO: 10176
  ref <308>: DATABASE ACCESSION NUMBER: EMBL / BG255482
  ref <309>: DATABASE ENTRY DATE: 2001-03-09

SEQ ID NO: 10181 - protein, 201 aa, Homo sapiens; identical to SEQ ID NO: 10177
  ref <308>: DATABASE ACCESSION NUMBER: SWISS-Prot / Q15363
  ref <309>: DATABASE ENTRY DATE: 2002-06-15

SEQ ID NO: 10182 - DNA, 6524 bp, Rattus norvegicus
  ref <308>: DATABASE ACCESSION NUMBER: EMBL / X92184
  ref <309>: DATABASE ENTRY DATE: 1996-02-29
tagcttgcttctgctaatgctaccccaggcctttagacagagaacagatggcagatggagtttcttattgccatgcgcaaacgctgagcccacctcatgatcccggaccccatggttttcagtagacaacctgggctaagaagagatctccgaccttatagagcagcaaagagtgtaaattcttccccaagaagaatgagaagatggagctcccctttgcgtccgtgggaactaccaatttcagacggttcactccagagtcactggcagagatcgagaagcagattgctgctcaccgcgcagccaagaaggccagaaccaagcacagaggacaggaggacaagggcgagaagcccaggcctcagctggacttgaaagactgtaaccagctgcccaagttctatggtgagctcccagcagaactggtcggggagcccctggaggacctagaccctttctacagcacacaccggacattcatggtgttgaataaaagcaggaccatttccagattcagtgccacttgggccctgtggctcttcagtcccttcaacctgatcagaagaacagccatcaaagtgtctgtccattcctggttctccatattcatcaccatcactattttggtcaactgcgtgtgcatgacccgaactgatcttccagagaaagtcgagtacgtcttcactgtcatttacaccttcgaggctctgattaagatactggcaagagggttttgtctaaatgagttcacttatcttcgagatccgtggaactggctggacttcagtgtcattaccttggcgtatgtgggtgcagcgatagacctccgaggaatctcaggcctgcggacattccgagttctcagagccctgaaaactgtttctgtgatcccaggactgaaggtcatcgtgggagccctgatccactcagtgaggaagctggccgacgtgactatcctcacagtcttctgcctgagcgtcttcgccttggtgggcctgcagctctttaaggggaaccttaagaacaaatgcatcaggaacggaacagatccccacaaggctgacaacctctcatctgaaatggcagaatacatcttcatcaagcctggtactacggatcccttactgtgcggcaatgggtctgatgctggtcactgccctggaggctatgtctgcctgaaaactcctgacaacccggattttaactacaccagctttgattcctttgcgtgggcattcctctcactgttccgcctcatgacgcaggactcctgggagcgcctgtaccagcagacactccgggcttctgggaaaatgtacatggtctttttcgtgctggttattttccttggatcgttctacctggtcaatttgatcttggccgtggtcaccatggcgtatgaagagcagagccaggcaacaattgcagaaatcgaagccaaggaaaaaaagttccaggaagcccttgaggtgctgcagaaggaacaggaggtgctggaagccctggggattgacacgacctcgctccagtcccacagtggatcacccttagcctccaaaaacgccaatgagagaagacccagggtgaaatcaagggtgtcagagggctccacggatgacaacaggtcaccccaatctgacccttacaaccagcgcaggatgtctttcctaggcctgtcttcaggaagacgcagggctagccacggcagtgtgttccacttccgagcgcccagccaagacatctcatttcctgacgggatcacccctgatgatggggtctttcacggagaccaggaaagccgtcgaggttccatattgctgggcaggggtgctgggcagacaggtccactccccaggagcccactgcctcagtcccccaaccctggccgtagacatggagaagagggacagctcggagtgcccactggtgagcttaccgctggagcgcctgaaggcccggcactgcacactacagggcagaagagcttcctgtctgcgggctacttgaacgaacctttccgagcacagagggccatgagcgttgtcagtatcatgacttctgtcattgaggagcttgaagagtctaagctgaagtgcccaccctgcttgatcagcttcgctcagaagtatctgatctgggagtgctgccccaagtggaggaagttcaagatggcgctgttcgagctggtgactgaccccttcgcagagcttaccatcaccctctgcatcgtggtgaacaccgtcttcatggccatggagcactaccccatgaccgatgccttcgatgccatgcttcaagccggcaacattgtcttcaccgtgtttttcacaatggagatggccttcaagatcattgccttcgacccctactattacttccagaagaagtggaatatcttcgactgtgtcatcgtcaccgtgagccttctggagctgagtgcatccaagaagggcagcctgtctgtgctccgtaccttacgcttgctgcgggtcttcaagctggccaagtcctggcccaccctgaacaccctcatcaagatcatcgggaactcagtgggggccctgggcaacctgacctttatcctggccatcatcgtcttcatcttcgccctggtcggaaagcagcttctctcagaggactacgggtgccgcaaggacggcgtctccgtgtggaacggcgagaagctccgctggcacatgtgtgacttcttccattccttcctggtcgtcttccgaatcctctgcggggagtggatcgagaacatgtgggtctgcatggaggtcagccagaaatccatctgcctcatcctcttcttgactgtgatggtgctgggcaacctagtggtgctcaaccttttcatcgctttactgctgaactccttcagcgcggacaacctcacggctccagaggatgacggggaggtgaacaacttgcagttagcactggccaggatccaggtacttggccatcgggccagcagggccatcgccagttacatcagcagccactgccgattccactggcccaaggtggagacccagctgggcatgaagcccccactcaccagctcagaggccaagaaccacattgccactgatgctgtcagtgctgcagtggggaacctgacaaagccagctctcagtagccccaaggagaaccacggggacttcatcactgatcccaacgtgtgggtctctgtgcccattgctgagggggaatctgacctcgacgagctcgaggaagatatggagcaggcttcgcagagctcctggcaggaagaggaccccaagggacagcaggagcagttgccacaagtccaaaagtgtgaaaaccaccaggcagccagaagcccagcctccatgatgtcctctgaggacctggctccatacctgggtgagagctggaagaggaaggatagccctcaggtccctgccgagggagtggatgacacgagctcctctgagggcagcacggtggactgcccggacccagaggaaatcctgaggaagatccccgagctggcagatgacctggacgagcccgatgactgtttcacagaaggctgcactcgccgctgtccctgctgcaacgtgaatactagcaagtctccttgggccacaggctggcaggtgcgcaagacctgctaccgcatcgtggagcacagctggtttgagagtttcatcatcttcatgatcctgctcagcagtggagcgctggcctttgaggataactacctggaagagaaaccccgagtgaagtccgtgctggagtacactgaccgagtgttcaccttcatcttcgtctttgagatgctgctcaagtgggtagcctatggcttcaaaaagtatttcaccaatgcctggtgctggctggacttcctcattgtgaacatctccctgacaagcctcatagcgaagatccttgagtattccgacgtggcgtccatcaaagcccttcggactctccgtgccctccgaccgctgcgggctctgtctcgattcgaaggcatgagggtagtggtggatgccctcgtgggcgccatcccctccatcatgaacgtcctcctcgtctgcctcatcttctggctcatcttcagcatcatgggcgtgaacctcttcgccgggaaattttcgaagtgcgtcgacaccagaaataacccattttccaacgtgaattcgacgatggtgaataacaagtccgagtgtcacaatcaaaacagcaccggccacttcttctgggtcaacgtcaaagtcaacttcgacaacgtcgctatgggctacctcgcacttcttcaggtggcaaccttcaaaggctggatggacataatgtatgcagctgttgattccggagagatcaacagtcagcctaactgggagaacaacttgtacatgtacctgtacttcgtcgttttcatcattttcggtggcttcttcacgctgaatctctttgttggggtcataatcgacaacttcaaccaacagaaaaaaaagctaggaggccaggacatcttcatgacagaagagcagaagaagtactacaatgccatgaagaagctgggctccaagaaaccccagaagcccatcccacggcccctgaataagtaccaaggcttcgtgtttgacatcgtgaccaggcaagcctttgacatcatcatcatggttctcatctgcctcaacatgatcaccatgatggtggagaccgacgagcagggcgaggagaagacgaaggttctgggcagaatcaaccagttctttgtggccgtcttcacgggcgagtgtgtgatgaagatgttcgccctgcgacagtactacttcaccaacggctggaacgtgttcgacttcatagtggtgatcctgtccattgggagtctgctgttttctgcaatccttaagtcactggaaaactacttctccccgacgctcttccgggtcatccgtctggccaggatcggccgcatcctcaggctgatccgagcagccaaggggattcgcacgctgctcttcgccctcatgatgtccctgcccgccctcttcaacatcggcctcctcctcttcctcgtcatgttcatctactccatcttcggcatggccagcttcgctaacgtcgtggacgaggccggcatcgacgacatgttcaacttcaagacctttggcaacagcatgctgtgcctgttccagatcaccacctcggccggctgggacggcctcctcagccccatcctcaacacggggcctccctactgcgaccccaacctgcccaacagcaacggctcccgggggaactgcgggagcccggcggtgggcatcatcttcttcaccacctacatcatcatctccttcctcatcgtggtcaacatgtacatcgcagtgattctggagaacttcaacgtagccaccgaggagagcacggagcccctgagcgaggacgacttcgacatgttctatgagacctgggagaagttcgacccggaggccacccagttcattgccttttctgccctctcagacttcgcggacacgctctccggccctcttagaatccccaaacccaaccagaatatattaatccagatggacctgccgttggtccccggggataagatccactgtctggacatcctttttgccttcacaaagaacgtcttgggagaatccggggagttggactccctgaagaccaatatggaagagaagtttatggcgaccaatctctccaaagcatcctatgaaccaatagccaccaccctccggtggaagcaggaagacctctcagccacagtcattcaaaaggcctaccggagctacatgctgcaccgctccttgacactctccaacaccctgcatgtgcccagggctgaggaggatggcgtgtcacttcccggggaaggctacattacattcatggcaaacagtggactcccggacaaatcagaaactgcctctgctacgtctttcccgccatcctatgacagtgtcaccaggggcctgagtgaccgggccaacattaacccatctagctcaatgcaaaatgaagatgaggtcgctgctaaggaaggaaacagccctggacctcagtgaaggcactcaggcatgcacagggcaggttccaatgtctttctctgctgtactaactccttccctctggaggtggcaccaacctccagcctccaccaatgcatgtcactggtcatggtgtcagaactgaatggggacatccttgagaaagcccccaccccaataggaatcaaaagccaaggatactcctccattctgacgtcccttccgagttcccagaagatgtcattgctcccttctgtttgtgaccagagacgtgattcaccaacttctcggagccagagacacatagcaaagacttttctgctggtgtcgggcagtcttagagaagtcacgtaggggttggtactgagaattagggtttgcatgactgcatgctcacagctgccggacaatacctgtgagtcggccattaaaattaatatttttaaagttaaaaaaaaaaaaaaa

SEQ ID NO: 10183 - protein, 1957 aa, Rattus norvegicus
  ref <308>: DATABASE ACCESSION NUMBER: SWISS-Prot / CAA63095
  ref <309>: DATABASE ENTRY DATE: 2003-02-01
MELPFASVGTTNFRRFTPESLAEIEKQIAAHRAAKKARTKHRGQEDKGEKPRPQLDLKDCNQLPKFYGELPAELVGEPLEDLDPFYSTHRTFMVLNKSRTISRFSATWALWLFSPFNLIRRTAIKVSVHSWFSIFITITILVNCVCMTRTDLPEKVEYVFTVIYTFEALIKILARGFCLNEFTYLRDPWNWLDFSVITLAYVGAAIDLRGISGLRTFRVLRALKTVSVIPGLKVIVGALIHSVRKLADVTILTVFCLSVFALVGLQLFKGNLKNKCIRNGTDPHKADNLSSEMAEYIFIKPGTTDPLLCGNGSDAGHCPGGYVCLKTPDNPDFNYTSFDSFAWAFLSLFRLMTQDSWERLYQQTLRASGKMYMVFFVLVIFLGSFYLVNLILAVVTMAYEEQSQATIAEIEAKEKKFQEALEVLQKEQEVLEALGIDTTSLQSHSGSPLASKNANERRPRVKSRVSEGSTDDNRSPQSDPYNQRRMSFLGLSSGRRRASHGSVFHFRAPSQDISFPDGITPDDGVFHGDQESRRGSILLGRGAGQTGPLPRSPLPQSPNPGRRHGEEGQLGVPTGELTAGAPEGPALHTTGQKSFLSAGYLNEPFRAQRAMSVVSIMTSVIEELEESKLKCPPCLISFAQKYLIWECCPKWRKFKMALFELVTDPFAELTITLCIVVNTVFMAMEHYPMTDAFDAMLQAGNIVFTVFFTMEMAFKIIAFDPYYYFQKKWNIFDCVIVTVSLLELSASKKGSLSVLRTLRLLRVFKLAKSWPTLNTLIKIIGNSVGALGNLTFILAIIVFIFALVGKQLLSEDYGCRKDGVSVWNGEKLRWHMCDFFHSFLVVFRILCGEWIENMWVCMEVSQKSICLILFLTVMVLGNLVVLNLFIALLLNSFSADNLTAPEDDGEVNNLQLALARIQVLGHRASRAIASYISSHCRFHWPKVETQLGMKPPLTSSEAKNHIATDAVSAAVGNLTKPALSSPKENHGDFITDPNVWVSVPIAEGESDLDELEEDMEQASQSSWQEEDPKGQQEQLPQVQKCENHQAARSPASMMSSEDLAPYLGESWKRKDSPQVPAEGVDDTSSSEGSTVDCPDPEEILRKIPELADDLDEPDDCFTEGCTRRCPCCNVNTSKSPWATGWQVRKTCYRIVEHSWFESFIIFMILLSSGALAFEDNYLEEKPRVKSVLEYTDRVFTFIFVFEMLLKWVAYGFKKYFTNAWCWLDFLIVNISLTSLIAKILEYSDVASIKALRTLRALRPLRALSRFEGMRVVVDALVGAIPSIMNVLLVCLIFWLIFSIMGVNLFAGKFSKCVDTRNNPFSNVNSTMVNNKSECHNQNSTGHFFWVNVKVNFDNVAMGYLALLQVATFKGWMDIMYAAVDSGEINSQPNWENNLYMYLYFVVFIIFGGFFTLNLFVGVIIDNFNQQKKKLGGQDIFMTEEQKKYYNAMKKLGSKKPQKPIPRPLNKYQGFVFDIVTRQAFDIIIMVLICLNMITMMVETDEQGEEKTKVLGRINQFFVAVFTGECVMKMFALRQYYFTNGWNVFDFIVVILSIGSLLFSAILKSLENYFSPTLFRVIRLARIGRILRLIRAAKGIRTLLFALMMSLPALFNIGLLLFLVMFIYSIFGMASFANVVDEAGIDDMFNFKTFGNSMLCLFQITTSAGWDGLLSPILNTGPPYCDPNLPNSNGSRGNCGSPAVGIIFFTTYIIISFLIVVNMYIAVILENFNVATEESTEPLSEDDFDMFYETWEKFDPEATQFIAFSALSDFADTLSGPLRIPKPNQNILIQMDLPLVPGDKIHCLDILFAFTKNVLGESGELDSLKTNMEEKFMATNLSKASYEPIATTLRWKQEDLSATVIQKAYRSYMLHRSLTLSNTLHVPRAEEDGVSLPGEGYITFMANSGLPDKSETASATSFPPSYDSVTRGLSDRANINPSSSMQNEDEVAAKEGNSPGPQ

SEQ ID NO: 10184 - DNA, 8491 bp, Homo sapiens
  misc_feature (1)..(8491): n=a, c, g or t
  ref <308>: DATABASE ACCESSION NUMBER: EMBL / M77235
  ref <309>: DATABASE ENTRY DATE: 1999-07-02
gccgctgagcctgcgcccagtgccccgagccccgcgccgagccgagtccgcgccaagcagcagccgcccaccccggggcccggccgggggaccagcagcttccccacaggcaacgtgaggagagcctgtgcccagaagcaggatgagaagatggcaaacttcctattacctcggggcaccagcagcttccgcaggttcacacgggagtccctggcagccatcgagaagcgcatggcggagaagcaagcccgcggctcaaccaccttgcaggagagccgagaggggctgcccgaggaggaggctccccggccccagctggacctgcaggcctccaaaaagctgccagatctctatggcaatccaccccaagagctcatcggagagcccctggaggacctggaccccttctatagcacccaaaagactttcatcgtactgaataaaggcaagaccatcttccggttcagtgccaccaacgccttgtatgtcctcagtcccttccacccagttcggagagcggctgtgaagattctggttcactcgctcttcaacatgctcatcatgtgcaccatcctcaccaactgcgtgttcatggcccagcacgaccctccaccctggaccaagtatgtcgagtacaccttcaccgccatttacacctttgagtctctggtcaagattctggctcgagctttctgcctgcacgcgttcactttccttcgggacccatggaactggctggactttagtgtgattatcatggcatacacaactgaatttgtggacctgggcaatgtctcagccttacgcaccttccgagtcctccgggccctgaaaactatatcagtcatttcagggctgaagaccatcgtgggggccctgatccagtctgtgaagaagctggctgatgtgatggtcctcacagtcttctgcctcagcgtctttgccctcatcggcctgcagctcttcatgggcaacctaaggcacaagtgtgtgcgcaacttcacagcgctcaacggcaccaacggctccgtggaggccgacggcttggtctgggaatccctggacctttacctcagtgatccagaaaattacctgctcaagaacggcacctctgatgtgttactgtgtgggaacagctctgacgctgggacatgtccggagggctaccggtgcctaaaggcaggcgagaaccccgaccacggctacaccagcttcgattcctttgcctgggcctttcttgcactcttccgcctgatgacgcaggactgctgggagcgcctctatcagcagaccctcaggtccgcagggaagatctacatgatcttcttcatgcttgtcatcttcctggggtccttctacctggtgaacctgatcctggccgtggtcgcaatggcctatgaggagcaaaaccaagccaccatcgctgagaccgaggagaaggaaaagcgcttccaggaggccatggaaatgctcaagaaagaacacgaggccctcaccatcaggggtgtggataccgtgtcccgtagctccttggagatgtcccctttggccccagtaaacagccatgagagaagaagcaagaggagaaaacggatgtcttcaggaactgaggagtgtggggaggacaggctccccaagtctgactcagaagatggtcccagagcaatgaatcatctcagcctcacccgtggcctcagcaggacttctatgaagccacgttccagccgcgggagcattttcacctttcgcaggcgagacctgggttctgaagcagattttgcagatgatgaaaacagcacagcgcgggagagcgagagccaccacacatcactgctggtgccctggcccctgcgccggaccagtgcccagggacagcccagtcccggaacctcggctcctggccacgccctccatggcaaaaagaacagcactgtggactgcaatggggtggtctcattactgggggcaggcgacccagaggccacatccccaggaagccacctcctccgccctgtgatgctagagcacccgccagacacgaccacgccatcggaggagccaggcggcccccagatgctgacctcccaggctccgtgtgtagatggcttcgaggagccaggagcacggcagcgggccctcagcgcagtcagcgtcctcacaagcgcactggaagagttagaggagtctcgccacaagtgtccaccatgctggaaccgtctcgcccagcgctacctgatctgggagtgctgcccgctgtggatgtccatcaagcagggagtgaagttggtggtcatggacccgtttactgacctcaccatcactatgtgcatcgtactcaacacactcttcatggcgctggagcactacaacatgacaagtgaattcgaggagatgctgcaggtcggaaacctggtcttcacagggattttcacagcagagatgaccttcaagatcattgccctcgacccctactactacttccaacagggctggaacatcttcgacagcatcatcgtcatccttagcctcatggagctgggcctgtcccgcatgagcaacttgtcggtgctgcgctccttccgcctgctgcgggtcttcaagctggccaaatcatggcccaccctgaacacactcatcaagatcatcgggaactcagtgggggcactggggaacctgacactggtgctagccatcatcgtgttcatctttgctgtggtgggcatgcagctctttggcaagaactactcggagctgagggacagcgactcaggcctgctgcctcgctggcacatgatggacttctttcatgccttcctaatcatcttccgcatcctctgtggagagtggatcgagaccatgtgggactgcatggaggtgtcggggcagtcattatgcctgctggtcttcttgcttgttatggtcattggcaaccttgtggtcctgaatctcttcctggccttgctgctcagctccttcagtgcagacaacctcacagcccctgatgaggacagagagatgaacaacctccagctggccctggcccgcatccagaggggcctgcgctttgtcaagcggaccacctgggatttctgctgtggtctcctgcggcaccggcctcagaagcccgcagcccttgccgcccagggccagctgcccagctgcattgccaccccctactccccgccacccccagagacggagaaggtgcctcccacccgcaaggaaacacagtttgaggaaggcgagcaaccaggccagggcacccccggggatccagagcccgtgtgtgtgcccatcgctgtggccgagtcagacacagatgaccaagaagaggatgaggagaacagcctgggcacggaggaggagtccagcaagcagcaggaatcccagcctgtgtccggctggcccagaggccctccggattccaggacctggagccaggtgtcagcgactgcctcctctgaggccgaggccagtgcatctcaggccgactggcggcagcagtggaaagcggaaccccaggccccagggtgcggtgagaccccagaggacagttgctccgagggcagcacagcagacatgaccaacaccgctgagctcctggagcagatccctgacctcggccaggatgtcaaggacccagaggactgcttcactgaaggctgtgtccggcgctgtccctgctgtgcggtggacaccacacaggccccagggaaggtctggtggcggttgcgcaagacctgctaccacatcgtggagcacagctggttcgagacattcatcatcttcatgatcctactcagcagtggagcgctggccttcgaggacatctacctagaggagcggaagaccatcaaggttctgcttgagtatgccgacaagatgttcacatatgtcttcgtgctggagatgctgctcaagtgggtggcctacggcttcaagaagtacttcaccaatgcctggtgctggctcgacttcctcatcgtagacgtctctctggtcagcctggtggccaacaccctgggctttgccgagatgggccccatcaagtcactgcggacgctgcgtgcactccgtcctctgagagctctgtcacgatttgagggcatgagggtggtggtcaatgccctggtgggcgccatcccgtccatcatgaacgtcctcctcgtctgcctcatcttctggctcatcttcagcatcatgggcgtgaacctctttgcggggaagtttgggaggtgcatcaaccagacagagggagacttgcctttgaactacaccatcgtgaacaacaagagccagtgtgagtccttgaacttgaccggagaattgtactggaccaaggtgaaagtcaactttgacaacgtgggggccgggtacctggcccttctgcaggtggcaacatttaaaggctggatggacattatgtatgcagctgtggactccagggggtatgaagagcagcctcagtgggaatacaacctctacatgtacatctattttgtcattttcatcatctttgggtctttcttcaccctgaacctctttattggtgtcatcattgacaacttcaaccaacagaagaaaaagttagggggccaggacatcttcatgacagaggagcagaagaagtactacaatgccatgaagaagctgggctccaagaagccccagaagcccatcccacggcccctgaacaagtaccagggcttcatattcgacattgtgaccaagcaggcctttgacgtcaccatcatgtttctgatctgcttgaatatggtgaccatgatggtggagacagatgaccaaagtcctgagaaaatcaacatcttggccaagatcaacctgctctttgtggccatcttcacaggcgagtgtattgtcaagctggctgccctgcgccactactacttcaccaacagctggaatatcttcgacttcgtggttgtcatcctctccatcgtgggcactgtgctctcggacatcatccagaagtacttcttctccccgacgctcttccgagtcatccgcctggcccgaataggccgcatcctcagactgatccgaggggccaaggggatccgcacgctgctctttgccctcatgatgtccctgcctgccctcttcaacatcgggctgctgctcttcctcgtcatgttcatctactccatctttggcatggccaacttcgcttatgtcaagtgggaggctggcatcgacgacatgttcaacttccagaccttcgccaacagcatgctgtgcctcttccagatcaccacgtcggccggctgggatggcctcctcagccccatcctcaacactgggccgccctactgcgaccccactctgcccaacagcaatggctctcggggggactgcgggagcccagccgtgggcatcctcttcttcaccacctacatcatcatctccttcctcatcgtggtcaacatgtacattgccatcatcctggagaacttcagcgtggccacggaggagagcaccgagcccctgagtgaggacgacttcgatatgttctatgagatctgggagaaatttgacccagaggccactcagtttattgagtattcggtcctgtctgactttgccgacgccctgtctgagccactccgtatcgccaagcccaaccagataagcctcatcaacatggacctgcccatggtgagtggggaccgcatccattgcatggacattctctttgccttcaccaaaagggtcctgggggagtctggggagatggacgccctgaagatccagatggaggagaagttcatggcagccaacccatccaagatctcctacgagcccatcaccaccacactccggcgcaagcacgaagaggtgtcggccatggttatccagagagccttccgcaggcacctgctgcaacgctctttgaagcatgcctccttcctcttccgtcagcaggcgggcagcggcctctccgaagaggatgcccctgagcgagagggcctcatcgcctacgtgatgagtgagaacttctcccgaccccttggcccaccctccagctcctccatctcctccacttccttcccaccctcctatgacagtgtcactagagccaccagcgataacctccaggtgcgggggtctgactacagccacagtgaagatctcgccgacttccccccttctccggacagggaccgtgagtccatcgtgtgagcctcggcctggctggccaggacacactgaaaagcagcctttttcaccatggcaaacctaaatgcagtcagtcacaaaccagcctggggccttcctggctttgggagtaagaaatgggcctcggccccgcggatcaaccaggcagagttctgtggcgccgcgtggacagccggagcagttggcctgtgcttggaggcctcagatagacctgtgacctggtctggtcaggcaatgcccctgcggctctggaaagcaacttcatcccagctgctgaggcgaaatataaaactgagactgtatatgttgtgaatgggctttcataaatttattatatttgatatttttttacttgagcaaagaactaaggatttttccatggacatgggcagcaattcacgctgtctcttcttaaccctgaacaagagtgtctatggagcagccggaagtctgttctcaaagcagaagtggaatccagtgtggctcccacaggtcttcactgcccaggggtcgaatggggtccccctcccacttgacctgagatgctgggagggctgaacccccactcacacaagcacacacacacacagtcctcacacacggaggccagacacaggccgtgggacccaggctcccagcctaagggagacaggcctttccctgccggccccccaaggatggggttcttgtccacggggctcactctggccccctattgtctcccaaggtcccattttcccccttgtgttttcacgcaggtcatattgtcagtcctacaaaaataaaaggcttccagaggagagtggcctggggtcccagggctgggccntaggcactgatagttgccttttcttcccctcctgtaagagtattaacaaaaccaaaggacacaagggtgcaagccccattcacggcctggcatgcagcttgtccttgctcctggaacctggcaggccctgccagccagccaatggaagagaggggctgagccatgggggtttggggctaagaagttcaccagccctgagccatggnnnccctcagcctgcctgaagagaggaaactggcgatctcccagggctctctggaccatacncggaggagttttcnngtgtggtctccagctcctctccagacacagagacatgggagtggggagcggacgttggccctggccctgtgcagggaaagggatggtcaggcccagttctcgtgccccttagaggggaatgaaccatggcacctttgagagagggggcactgtggtcaggcccagcctctctggcnnagtcccgggatcctgatggcacccacacagaggacctctttggggcaagatccaggtggntcccataggtcttgtgaaaaggctttttcagggaaaaatattttactagtccaatcacccccaggacctcttcagctgctgacaatcctatttagcatatgcaaatcttttaacatagagaactgtcaccctgaggtaacagggtcaactggcgaagagcaggccagggggcttggctgnnccattccagctctnccacngannncctccnnncnnnnncatnnctcccaggccacctcagtctcanctgccggctctgggctggctnctcctaacctacctnnccgagctgtcggagggctggacatttgtggcagtgctgaanggggcattgnnggcgagtaaagtattakgtttcttcttgtcaccccagttcccttggtggcaaccccagacccaacccatgcccctgacagatctagttctcttctnctgtgttccctttgagtccngtgtgggacacggtttaactgtcccagcgagatttctccaagtngaaatcctatttttgtagatctccatgctttgnctctcaaggcttggagaggtatgtgcccctcctnggbnctcaccgcctgctacacaggcaggaatgcggnttgggaggcaggtcgggctnnnagcccagctggccggaaggagactgtggtttttgtgtgtgtggacagcncgggagctttgagacaggntgcctggggctggctgcagacggtgtggttgggggtgggaggtgagctagaccnnncccttagcttttagcctggctgtcacctttttaatttccagaactgcacaatgaccagnaggaggggagaagagagtaggaaaaaggagggaaggacagacatcaagtgccagatgttgtctgaactaatcgagcacttctcaccaaacttcnngtataaataaaatacatannnnggggcaaaccaataaatggcttac

SEQ ID NO: 10185 - protein, 2016 aa, Homo sapiens; identical to SEQ ID NO: 911
  ref <308>: DATABASE ACCESSION NUMBER: SWISS-Prot / Q14524
  ref <309>: DATABASE ENTRY DATE: 2002-06-15

SEQ ID NO: 10186 - DNA, 1693 bp, Rattus norvegicus
  ref <308>: DATABASE ACCESSION NUMBER: EMBL / X94246
  ref <309>: DATABASE ENTRY DATE: 1995-12-14
gagagctgcgagtgttccgcagctgtgagcgactccccagcggcgatgcctcacaactcgatcagatccggccacggagggctgaatcagttaggaggggcttttgtgaatggcaggcctctgccagaagttgtccggcaacgcattgtggacttggcccaccagggagtgagaccctgtgatatctctcgccagcttcgtgtcagccatggctgtgtaagcaagatccttggcaggtactacgagactggcagcatccggcctggagtgatagggggctccaagcccaaggtggccacccccaaggtggtggagaagataggggactacaagcggcagaaccctaccatgtttgcttgggagatccgggaccggctcttggcagaaggcgtttgtgacaatgacactgtgcccagtgtcagctccatcaacagaatcatccggaccaaagtgcagcagccattcaacctccccatggacagctgcgtggccaccaaatctctgagcccaggacacacactgatccccagctcagctgtcacacccccagagtcaccccagtcggattccttgggctctacctactctatccacgggctcctagggattgctcaggctggcagtgacacacacagaggaagatgtgatgatagtgaccagggacagtgtcgactgagcatcgattcccagagcagcagtagtggtcctcgaaagcatcttcgtacagacaccttcgggcagcaccacctcgagccgctcgagtgcccgtttgagcggcagcattacccggaggcctatgcctcccccagccacaccaaaggcgagcaggggctatacccactgcccttactcaacagtaccctggatgacggaaaggccaccctgacaccttccaatacacctctgggacgcaacctctcaactcaccagacctaccctgtggtggcagatcctcattcaccctacgccataaagcaggaaaccccagagctctccagttctagctccaccccttcctctttatctagctccgcctttttggatctgcagcaagtcggctctgggggcccagcaggtgcctcggtcccacccttcaatgccttttcccatgctgcctccgtgtatgggcagttcacgggccaggccctcctctcagggcgagagatggtggggccatcgctgcctggatacccaccccacatccccaccagtggacagggcagctatgcctcttccgctattgcaggcatggtggcaggaagtgagtattctggcaatgcctacagccacaccccgtacgcctcctacagtgaggcctggcgcttccccaactccagcctgctgagttccccatattattacagctctacaacaaggccaagcgcaccgcccacctctgccacggcctttgaccatctgtagttgtcatggggacagtgggaacaaccaggcaacaggaggacttggcctgagacgggccccagagagtcacacaaaggaatctttatttattacatgaaaaataaccacaattccagcattgccgctcactccctgtgtggtcaattaaatgaaccatgaaagtcaggatgaccttggggaaggccaaactgtcctccaagagtcatttcgtgatgtgacaggagttccaggaaccaagaaccatccatttcaaaagagcacggaggagaaa

SEQ ID NO: 10187 - protein, 458 aa, Rattus norvegicus
  ref <308>: DATABASE ACCESSION NUMBER: SWISS-Prot / P51974
  ref <309>: DATABASE ENTRY DATE: 2002-06-15
MPHNSIRSGHGGLNQLGGAFVNGRPLPEVVRQRIVDLAHQGVRPCDISRQLRVSHGCVSKILGRYYETGSIRPGVIGGSKPKVATPKVVEKIGDYKRQNPTMFAWEIRDRLLAEGVCDNDTVPSVSSINRIIRTKVQQPFNLPMDSCVATKSLSPGHTLIPSSAVTPPESPQSDSLGSTYSIHGLLGIAQAGSDTHRGRCDDSDQGQCRLSIDSQSSSSGPRKHLRTDTFGQHHLEPLECPFERQHYPEAYASPSHTKGEQGLYPLPLLNSTLDDGKATLTPSNTPLGRNLSTHQTYPVVADPHSPYAIKQETPELSSSSSTPSSLSSSAFLDLQQVGSGGPAGASVPPFNAFSHAASVYGQFTGQALLSGREMVGPSLPGYPPHIPTSGQGSYASSAIAGMVAGSEYSGNAYSHTPYASYSEAWRFPNSSLLSSPYYYSSTTRPSAPPTSATAFDHL

SEQ ID NO: 10188 - DNA, 2757 bp, Homo sapiens
  ref <308>: DATABASE ACCESSION NUMBER: EMBL / AK023855
  ref <309>: DATABASE ENTRY DATE: 2002-08-06
gcacacttctatttgtttggatgtggagagagaaaagaagaaatccacgtggtgggtaaagcacctgggtccacagccgaaaaatcccgggtttagtctgtttcactatacaaaattgggccatttacctgagttccaggctccacatataaaacacagacataatattactcacccatgtcactgggctgctgggggactctactaggacaacagaggcaaagctctgatataagctctttgcaaatgtaagaagtggtccttatgtcacccagtttagggcagtggttgagagcagacacattctgatccctcgaatctgaatcctatctttggcccatctggaagtgggacaagtttcttaaacctttgtgcctgggtttcctatctggggaagaataaattaacagatgcaaggaccctgaacagtccggttggagactgctccagtccttggcaccgtcctgcattctgtgggtcccaacagtgtggtgaaaccaggaagccgaccagccatccaaccagggtgtggtcctctggctgagactctctatcccacgtctgggcacccatgccaccagctggccttgaattccagggatgcgggaggacaatgagcatgaacgaaacgtgccgagtggagttgagaacgtaaaggaagaagggggagatgaggacctctcctggggagatgagggctgccaagtcctaagacacaggctcagggtctgcaggaaggtcggcttgttggatcgtctctgtgcgctgacttctctttgctccccagggcctctacccgctgcccttgctcaacagcaccctggacgacgggaaggccaccctgaccccttccaacacgccactggggcgcaacctctcgactcaccagacctaccccgtggtggcagatcctcactcacccttcgccataaagcaggaaacccccgaggtgtccagttctagctccaccccttcctctttatctagctccgcctttttggatctgcagcaagtcggctccggggtcccgcccttcaatgcctttccccatgctgcctccgtgtacgggcagttcacgggccaggccctcctctcagggcgagagatggtggggcccacgctgcccggatacccaccccacatccccaccagcggacagggcagctatgcctcctccgccatcgcaggcatggtggcaggtaaggagagggccggcaggaaggggagcactgcaaagaggaagtattggagcaaggtgggacacaaggagcaagaggcatactgtgccctattcatagacttcccaaagggcattgaaggatggaccaaagagggcatctccttgtaaatgcctggagacgatgtcccagtgcagtcctgactccctatttaacttgccccagctcggcctccttcttcccaggcctgctacattaccctccatgatgaaaagggaggggctgagacaggtctgtgttcaaatccaagctccaccacttcttccagtgaatcagtgagcataaatggagagcactctaagggccccaaaacactgtgagtggaagatgaaccctaccctcaagcagtgctggtctcccagtgatttaactctgatgaatcccagtttacccgttctgtaaaatctgaatctgaagggtattgatgatgatgatgatgatgatgacgatgacgatgatgatgatgaaatatatgcttcacatctctctctcaagcctgcatggataggacccgggttctaggtactctaagagtactatagaggatgaaatgagcctggagtagctctccatcctcatttggactgttctggaacctgcctgccagtcatttgggtttctttgtctgccagtcatcatccaatgatgattcaagatgataaggtctggacaaatgaagataatgggagtttccttgggcaagtctcaattttttaggagccatgtagggaagactttgggatggatgagacataattgagccattgtcactggtcaaaaaggcctgggacctggagtttctggaaagagctctgaacacaaggcatctgtgacccccatgccagccctaggccagcctctctggctgtgaccccagagacttggcgtatttacctaggcctgcttcccttccttgccggcaggagttaatctttgccagccacccactctgggcaccctatgcagaggcaggtgggctgggatctcctgggcagagggaagggagggagagaaagagggagggagaaatgctctgtgctccctgggaacctgctgagctggcacttgttgctgcctggttaccgtggcgatgtgcttaatgcagcgttgaaaatacagaatactgactcctctgtccctcctggccccggactccctccctccctcccttcctcttctggagcgtgaaatgagattggtcaagataaaaaaggaaaagattcggttatttttttaagagtgtggataatggggcctctcaatcaaaatcccagtctccagtcggttccccccattccccttccaacccctccaccttcccctgccgcctgcttagaggaggaggaagaaacataaagcacaaggcttttctcttaattatgaatcattccctgagggcaggcccagggcaaggggttcctggggcccagagtctgacctgtgaggtagctagaaggcttgagcctctcatcaaagtcccccaggttgtttccagaaagaatcctgagtgggttctgtg

SEQ ID NO: 10189 - DNA, 463 bp, Rattus norvegicus
  ref <308>: DATABASE ACCESSION NUMBER: EMBL / X95850
  ref <309>: DATABASE ENTRY DATE: 1996-08-17
tttaggcataaaggggtatgttaatccattgccacatacaattcctataattacatatagggagtgaactgtgaaccagttagaaacctgtatctagttgccaacgagtgccactggagaaaagaaactccacaagttgaagaactgagaaattagcttccttccagtgtgacgcggtacacggaggtgctctcgagcgagtgagcttcctcctttcgcaaacgctaatgcagtagtagcaatcaatcttgtcctctcttgtaaacatctgctggtggtccagagctctgagccagtcatgctgctgtctaggttctaacagctgtttgtggactcagttaccattgcaagtggacaccttacccgactagaaataaacattttccctgctctcctgatgccccgttccttctttctgcaaacacatcttaggagtaagactttaaacctttgatctcccaca

SEQ ID NO: 10190 - DNA, 826 bp, Rattus norvegicus
  ref <308>: DATABASE ACCESSION NUMBER: EMBL / X96394
  ref <309>: DATABASE ENTRY DATE: 1996-05-31
cagaaggtggagagaatctgagtgtggggcagcgacagcttgtgtgcctggcccgggctttgctgaggaagacaaagattctagtgttggacgaggctacagcagctgtggatctggagacagatgaccttattcagtccaccatccggacgcagtttgaagacagtactgtgctcactattgctcatcggctgaataccataatggactatacaagggtgattgtcctggacaaaggagaaattcgggagtgtggtgcaccctctgagctcctgcagcaaagaggcgtcttctatagcatggccaaggatgctggcttggtgtgaactgatctctggcatatctgatgaggactgcagggccaggatcccagtgtccaggcatgagccagcaaccctggaaacctacactccccagagaaaaaccaaaaattgaaagaaaaccaaactaaaaggaagcaaaacacataaagcatcagtcacagtttgccccagcctggatctgacctcgaagaagcctgaagacagatgtgccccacttcaaacacgtctggcttctggcaccacttgtgaggctccctgaaagttcacccatgctcctgctgtatcccaaagcaaggccatgagcagccaaacacactagtgaccaaacacaagccactgcctcatgcctattcagccacatttatagagccaagccagagcctctctgccctgccagctcttctgtctcctacagtcctgttggtgacagaagagtgtatcttgccttcaggtcttgcagttgaaagcatggaaaccaaaacaaacaaacaaaaaaaaaaaaa

SEQ ID NO: 10191 - protein, 107 aa, Rattus norvegicus
  ref <308>: DATABASE ACCESSION NUMBER: SWISS-Prot / CAA65258
  ref <309>: DATABASE ENTRY DATE: 2003-02-01
EGGENLSVGQRQLVCLARALLRKTKILVLDEATAAVDLETDDLIQSTIRTQFEDSTVLTIAHRLNTIMDYTRVIVLDKGEIRECGAPSELLQQRGVFYSMAKDAGLV

SEQ ID NO: 10192 - DNA, 5732 bp, Homo sapiens
  ref <308>: DATABASE ACCESSION NUMBER: Refseq / NM_019900
  ref <309>: DATABASE ENTRY DATE: 2001-02-03
ccaggcggcgttgcggccccggccccggctccctgcgccgccgccgccgccgccgccgccgccgccgccgccgccgccagcgctagcgccagcagccgggcccgatcacccgccgcccggtgcccgccgccgcccgcgccagcaaccgggcccgatcacccgccgcccggtgcccgccgccgcccgcgccaccggcatggcgctccggggcttctgcagcgccgatggctccgacccgctctgggactggaatgtcacgtggaataccagcaaccccgacttcaccaagtgctttcagaacacggtcctcgtgtgggtgccttgtttttacctctgggcctgtttccccttctacttcctctatctctcccgacatgaccgaggctacattcagatgacacctctcaacaaaaccaaaactgccttgggatttttgctgtggatcgtctgctgggcagacctcttctactctttctgggaaagaagtcggggcatattcctggccccagtgtttctggtcagcccaactctcttgggcatcaccacgctgcttgctacctttttaattcagctggagaggaggaagggagttcagtcttcagggatcatgctcactttctggctggtagccctagtgtgtgccctagccatcctgagatccaaaattatgacagccttaaaagaggatgcccaggtggacctgtttcgtgacatcactttctacgtctacttttccctcttactcattcagctcgtcttgtcctgtttctcagatcgctcacccctgttctcggaaaccatccacgaccctaatccctgcccagagtccagcgcttccttcctgtcgaggatcaccttctggtggatcacagggttgattgtccggggctaccgccagcccctggagggcagtgacctctggtccttaaacaaggaggacacgtcggaacaagtcgtgcctgttttggtaaagaactggaagaaggaatgcgccaagactaggaagcagccggtgaaggttgtgtactcctccaaggatcctgcccagccgaaagagagttccaaggtggatgcgaatgaggaggtggaggctttgatcgtcaagtccccacagaaggagtggaacccctctctgtttaaggtgttatacaagacctttgggccctacttcctcatgagcttcttcttcaaggccatccacgacctgatgatgttttccgggccgcagatcttaaagttgctcatcaagttcgtgaatgacacgaaggccccagactggcagggctacttctacaccgtgctgctgtttgtcactgcctgcctgcagaccctcgtgctgcaccagtacttccacatctgcttcgtcagtggcatgaggatcaagaccgctgtcattggggctgtctatcggaaggccctggtgatcaccaattcagccagaaaatcctccacggtcggggagattgtcaacctcatgtctgtggacgctcagaggttcatggacttggccacgtacattaacatgatctggtcagcccccctgcaagtcatccttgctctctacctcctgtggctgaatctgggcccttccgtcctggctggagtggcggtgatggtcctcatggtgcccgtcaatgctgtgatggcgatgaagaccaagacgtatcaggtggcccacatgaagagcaaagacaatcggatcaagctgatgaacgaaattctcaatgggatcaaagtgctaaagctttatgcctgggagctggcattcaaggacaaggtgctggccatcaggcaggaggagctgaaggtgctgaagaagtctgcctacctgtcagccgtgggcaccttcacctgggtctgcacgccctttctggtggccttgtgcacatttgccgtctacgtgaccattgacgagaacaacatcctggatgcccagacagccttcgtgtctttggccttgttcaacatcctccggtttcccctgaacattctccccatggtcatcagcagcatcgtgcaggcgagtgtctccctcaaacgcctgaggatctttctctcccatgaggagctggaacctgacagcatcgagcgacggcctgtcaaagacggcgggggcacgaacagcatcaccgtgaggaatgccacattcacctgggccaggagcgaccctcccacactgaatggcatcaccttctccatccccgaaggtgctttggtggccgtggtgggccaggtgggctgcggaaagtcgtccctgctctcagccctcttggctgagatggacaaagtggaggggcacgtggctatcaagggctccgtggcctatgtgccacagcaggcctggattcagaatgattctctccgagaaaacatcctttttggatgtcagctggaggaaccatattacaggtccgtgatacaggcctgtgccctcctcccagacctggaaatcctgcccagtggggatcggacagagattggcgagaagggcgtgaacctgtctgggggccagaagcagcgcgtgagcctggcccgggccgtgtactccaacgctgacatttacctcttcgatgatcccctctcagcagtggatgcccatgtgggaaaacacatctttgaaaatgtgattggccccaaggggatgctgaagaacaagacgcggatcttggtcacgcacagcatgagctacttgccgcaggtggacgtcatcatcgtcatgagtggcggcaagatctctgagatgggctcctaccaggagctgctggctcgagacggcgccttcgctgagttcctgcgtacctatgccagcacagagcaggagcaggatgcagaggagaacggggtcacgggcgtcagcggtccagggaaggaagcaaagcaaatggagaatggcatgctggtgacggacagtgcagggaagcaactgcagagacagctcagcagctcctcctcctatagtggggacatcagcaggcaccacaacagcaccgcagaactgcagaaagctgaggccaagaaggaggagacctggaagctgatggaggctgacaaggcgcagacagggcaggtcaagctttccgtgtactgggactacatgaaggccatcggactcttcatctccttcctcagcatcttccttttcatgtgtaaccatgtgtccgcgctggcttccaactattggctcagcctctggactgatgaccccatcgtcaacgggactcaggagcacacgaaagtccggctgagcgtctatggagccctgggcatttcacaagggatcgccgtgtttggctactccatggccgtgtccatcggggggatcttggcttcccgctgtctgcacgtggacctgctgcacagcatcctgcggtcacccatgagcttctttgagcggacccccagtgggaacctggtgaaccgcttctccaaggagctggacacagtggactccatgatcccggaggtcatcaagatgttcatgggctccctgttcaacgtcattggtgcctgcatcgttatcctgctggccacgcccatcgccgccatcatcatcccgccccttggcctcatctacttcttcgtccagaggttctacgtggcttcctcccggcagctgaagcgcctcgagtcggtcagccgctccccggtctattcccatttcaacgagaccttgctgggggtcagcgtcattcgagccttcgaggagcaggagcgcttcatccaccagagtgacctgaaggtggacgagaaccagaaggcctattaccccagcatcgtggccaacaggtggctggccgtgcggctggagtgtgtgggcaactgcatcgttctgtttgctgccctgtttgcggtgatctccaggcacagcctcagtgctggcttggtgggcctctcagtgtcttactcattgcaggtcaccacgtacttgaactggctggttcggatgtcatctgaaatggaaaccaacatcgtggccgtggagaggctcaaggagtattcagagactgagaaggaggcgccctggcaaatccaggagacagctccgcccagcagctggccccaggtgggccgagtggaattccggaactactgcctgcgctaccgagaggacctggacttcgttctcaggcacatcaatgtcacgatcaatgggggagaaaaggtcggcatcgtggggcggacgggagctgggaagtcgtccctgaccctgggcttatttcggatcaacgagtctgccgaaggagagatcatcatcgatggcatcaacatcgccaagatcggcctgcacgacctccgcttcaagatcaccatcatcccccaggaccctgttttgttttcgggttccctccgaatgaacctggacccattcagccagtactcggatgaagaagtctggacgtccctggagctggcccacctgaaggacttcgtgtcagcccttcctgacaagctagaccatgaatgtgcagaaggcggggagaacctcagggtgatcgtcttggacaaaggagaaatccaggagtacggcgccccatcggacctcctgcagcagagaggtcttttctacagcatggccaaagacgccggcttggtgtgagccccagagctggcatatctggtcagaactgcagggcctatatgccagcgcccagggaggagtcagtacccctggtaaaccaagcctcccacactgaaaccaaaacataaaaaccaaacccagacaaccaaaacatattcaaagcagcagccaccgccatccggtcccctgcctggaactggctgtgaagacccaggagagacagagatgcgaaccacccaaaacacgcacaccctgcccctggtgccctgagacagacacacagcctcacgcccccaggaatgcaagtggtttcctggtgcttcccacggaggagttttggcagccagacttctggaggaattggttgtatagaagatcctagtgaccaaattcagcctactgcctcggatctctccagccgaagtctgtggactgcaagtctttgagatgcttctggctcccatcacctctaacatccttgtctgggtctaccaggaacgcttcatttccttggggctgcagttttgtggttgaggggcctggagaaaatcattttctccccttggcagtgtcccagggccctggatggtcctcttaccaacatctggtcttccaggcactcaaaagctgggaaccagcatctcagcgccagctctaccagttctcgttttgggccagaggcagcctctgcactcccacgcctgtcctcctggaagggacctggttggactaacggctaacctggacctggaactgtagggccaggggattgtctcagggccgacgttccacctggggcttccctccccacccaccccgactccaggctttcccttttttcttttgttcaacattgtaagaacaatcaatgctgttattactgatcccaccatgattgatgtggggtaaatattaaggagatggcctcatgggaatttgaccttgactagaaatagagactgagagtgagcaaccagctggaaggtactatgccagtcctagcagaaaaatgtgttaggggcctggcccaaagcagtgttggttgcttacagtgttgattgattttgttcttttttcttaccacctcttttctttccctctcatggtacctgctcatggttatgaagctttcaaagtaaagaacacgaaatac

SEQ ID NO: 10193 - protein, 1531 aa, Homo sapiens
  ref <308>: DATABASE ACCESSION NUMBER: SWISS-Prot / P33527
  ref <309>: DATABASE ENTRY DATE: 2002-06-15
MALRGFCSADGSDPLWDWNVTWNTSNPDFTKCFQNTVLVWVPCFYLWACFPFYFLYLSRHDRGYIQMTPLNKTKTALGFLLWIVCWADLFYSFWERSRGIFLAPVFLVSPTLLGITTLLATFLIQLERRKGVQSSGIMLTFWLVALVCALAILRSKIMTALKEDAQVDLFRDITFYVYFSLLLIQLVLSCFSDRSPLFSETIHDPNPCPESSASFLSRITFWWITGLIVRGYRQPLEGSDLWSLNKEDTSEQVVPVLVKNWKKECAKTRKQPVKVVYSSKDPAQPKESSKVDANEEVEALIVKSPQKEWNPSLFKVLYKTFGPYFLMSFFFKAIHDLMMFSGPQILKLLIKFVNDTKAPDWQGYFYTVLLFVTACLQTLVLHQYFHICFVSGMRIKTAVIGAVYRKALVITNSARKSSTVGEIVNLMSVDAQRFMDLATYINMIWSAPLQVILALYLLWLNLGPSVLAGVAVMVLMVPVNAVMAMKTKTYQVAHMKSKDNRIKLMNEILNGIKVLKLYAWELAFKDKVLAIRQEELKVLKKSAYLSAVGTFTWVCTPFLVALCTFAVYVTIDENNILDAQTAFVSLALFNILRFPLNILPMVISSIVQASVSLKRLRIFLSHEELEPDSIERRPVKDGGGTNSITVRNATFTWARSDPPTLNGITFSIPEGALVAVVGQVGCGKSSLLSALLAEMDKVEGHVAIKGSVAYVPQQAWIQNDSLRENILFGCQLEEPYYRSVIQACALLPDLEILPSGDRTEIGEKGVNLSGGQKQRVSLARAVYSNADIYLFDDPLSAVDAHVGKHIFENVIGPKGMLKNKTRILVTHSMSYLPQVDVIIVMSGGKISEMGSYQELLARDGAFAEFLRTYASTEQEQDAEENGVTGVSGPGKEAKQMENGMLVTDSAGKQLQRQLSSSSSYSGDISRHHNSTAELQKAEAKKEETWKLMEADKAQTGQVKLSVYWDYMKAIGLFISFLSIFLFMCNHVSALASNYWLSLWTDDPIVNGTQEHTKVRLSVYGALGISQGIAVFGYSMAVSIGGILASRCLHVDLLHSILRSPMSFFERTPSGNLVNRFSKELDTVDSMIPEVIKMFMGSLFNVIGACIVILLATPIAAIIIPPLGLIYFFVQRFYVASSRQLKRLESVSRSPVYSHFNETLLGVSVIRAFEEQERFIHQSDLKVDENQKAYYPSIVANRWLAVRLECVGNCIVLFAALFAVISRHSLSAGLVGLSVSYSLQVTTYLNWLVRMSSEMETNIVAVERLKEYSETEKEAPWQIQETAPPSSWPQVGRVEFRNYCLRYREDLDFVLRHINVTINGGEKVGIVGRTGAGKSSLTLGLFRINESAEGEIIIDGINIAKIGLHDLRFKITIIPQDPVLFSGSLRMNLDPFSQYSDEEVWTSLELAHLKDFVSALPDKLDHECAEGGENLSVGQRQLVCLARALLRKTKILVLDEATAAVDLETDDLIQSTIRTQFEDCTVLTIAHRLNTIMDYTRVIVLDKGEIQEYGAPSDLLQQRGLFYSMAKDAGLV

SEQ ID NO: 10194 - DNA, 4800 bp, Rattus norvegicus
  ref <308>: DATABASE ACCESSION NUMBER: EMBL / X96426
  ref <309>: DATABASE ENTRY DATE: 1996-08-17
ccgctccagcgctcggacgtctccaggcaccccactgcggctgcgggcctggctctctgtcgcgtgcgctcgtaccccaggattctcctcccgccctgcaccctggagcgtccggccgccagcctctgccagctcctcgggatccttgcggccgtgggcagcggctgtcgcgcctgtcccactttgggaggaccatccttgctgcgcgtgcgcagtaacttcggctgcacgtgcgccattaactctggctgcacagcgaagccctgggataacaccggcgcccccgcaacatggcagacgaagacctcatcttccgcctggaaggtgttgacggtggcgggtcctccggagctggccgccatggggactctgacacagacagtgacgatgatgagggctacttcatctgccccatcactgatgaccacatgtccaaccagaatgtcaactccaaaggccagggctactacaacaacctactgaaaacggagtgtggctccacagggtcaccagccagctccttccacttcaaggaggcctggaagcatgcgatcgagaaggccaagcacatgcccgacccctgggctgaattccatctggaggacatcgccacagagcatgctactcggcacaggtacaatgctgtcaccggggagtggctgaaagacgaggttctgatcaagatggcatctcagcccttcggccgtggagcaatgagggagtgcttcaggacgaagaaactctccaacttcttgcatgcccagcattggaagggggcctccaactacgtggcaaaacgctacctcgagccagtggacaggagcgtgtactttgaggatgtgcagctccagatggaagcgaagctctggggggaggagtacaaccggcacaagccccccaagcaggtagatatcatgcagatgtgcatcattgagctaaaggacagacaaggacagcccctcttccacctggagcactacattgagggcaagtacatcaagtataattccaactcaggctttgtccgtgatgacaacatcagactaacaccacaggccttcagccatttcacatttgaacgttctggtcatcagctgattgtagtggacatccagggtgtgggcgacctttatactgacccacagatccacactgagaaaggcactgactttggagatggtaaccttggtgtccggggaatggctctcttcttctactctcatgcctgcaaccgtatttgccagagcatgggccttgcgccctttgacctctccccacgggagcaggatgccgtgaaccagagcaccaagctgttgcaatcagccaagaccatcttgagggggacagaggagaagtgtgggagtccccgcataaggacactctctggcagccggccccccttgctccttcgcctgtcagagaactctggggatgagaacatgagtgatgtgacctttgactctctgccttcctccccgtcttcagccacaccacacagccagaagttggaccacctccattggccagtgtttggtgacctcgataacatgggccctagagaccatgaccgcatggacaatcaccgggactctgagaatagtggggacagtgggtatccaagcgagaagcgaagtgacctggatgatcctgagccccgagaacacggccactccaatggcaaccgaaggcctgaatctgatgaggacagcctgggcagctctggacgggtctgtgtggagacgtggaacctgctcaatccctcccgcctgcacctgcccaggccctcggccgtggccctagaagtgcaaaggttaaatgctctggaccttggaaggaaaatcgggaagtctgttttggggaaggtccatctggccatggtacggtaccacgagggcgggcgcttctgcgagaaggatgaggaatgggatcaagagtctgccatcttccatctggagcatgcagccgacctgggagaactggaggccatcgtgggcctaggcctcatgtactctcagctgccccaccacatcctggctgatgtctctctggaggagacagaagagaacaagacaaaaggctttgattacctcctgaaggccgcagaagctggtgacaggcagtccatgattttagtggctcgagcttttgacaccggcctgaacctcagcccagacaggtgtcaagactggtcggaagccttacactggtacaacacggccctggagacgacggactgcgatgaaggcggggagtatgacggaatacaggacgagccccagtatgcactgctggccagggaggcagagatgttgctcaccggtggatttggactggacaagaacccccaaagatcaggagacttgtacacccaggcagccgaggcagcaatggaagccatgaagggccggctagccaaccagtactatgagaaggcggaagaggcctgggcgcaaatggaggaataactgtccacaggatcactgccgaggagaagggctggggaggggaggatgggacccatttcttttgggaggggagaagtagttttactatggtataaattcacttttgtattgcctttttttgactcttgacagtctttgcagctggcagagacattataactgcccttttaggggtggtattttgggggagtggggggttgaagatgcagcctaatgaattctttttccccctgtttttctttttttctgtcctgagatgtaagcaagtgtctttctgtccgaatgaacagacagtatcagggcttctctcgccgacctttgcagacaggactcacatcctggggtctccaggatactgggaacccaaatggaggacagagacctttctgttaactttccaccatggttctttctttcctccagtggaagtgagatggttcaatacccaggctccttcacactgggtgagacagttgtgagagtctttcacataatgtccttccactgagctcatgacttcctggcatccattcaaattccttttttttttttttttttagaccttcaatctgttacagattttacagaacaggtttggccttatacatgcatatttactacctctgagtcctgcatctgtggatgtggaagcagatgtacctcaaagctttcaaaagccatgacttaggagctgggtgactattctccagacagaagtactctctgcaccccatggccacatccactatgggaccgaagcatccttgtacagaattctgtggccgttccttagtgtgatgtttcctggactctcctcaacctgctctccttggcattttctgcttgaaactaggttttacttacttgacactaggtcatctgcagcaagtggcttccagccgcagccccttgggatttgtctaagatgtttgagaatgaggagcgagagtgtaaacactgactgagtctgggcatttccccagggtcaggctgggattttaatgagctttctcttttaaaagagttcagattaatgagagtgtgattttagccacagggaaatggcccgctttgatccactactgttacctttaaaaaacagaacagcagagtgggacatgccagccattctcacctgttgcttaaaacaggccttttaagggtttcactgctgagtctgcccggtcaaaaacatgtagaagcattagattgtaaagtctagagtatacatcctttgaggaaaaatcagattcattaatcttgaggactgggagccatggtatacacttgtagtcccagcatacaggtggtagaggcagtaggagcaaagattaaggccaacctgggctacatgatgagaccctgtccccaaaacaaacaacaaaaggagctggtgagatggctcggtacatgaagctcctgccaaccgtggccagacaatctgagttctgttcctgggacccatgtgtggacagaggggaccaactcctgcaaggtgtcttctgatcttcacctgtgtggtgtgtcacaagggagcactctctctctctctctctctctctctctctctctcacacacacacacacacacacacacacacaaaactgtaagagaaatgaaatagcaaaaactacccttgaatactttcatctatctgcaagttataaaatcgccaggtttacatttgaagccataacatcgggttctctatgatgggttggcccttgtccggctttatcagtaccagaacagtagctggcttgcgttgtcctgcatgtgttaaacgtaagaagcaatttattatgacataatctctcagagtaactgtcatgtaagttgtggtgtatgctctgtgtgtgtgtgcgtgtgtgtgtgtgtgtgctggtcagcagacaacctcaattttgttcctcaggagctggccatctccttccattgagtctctcactggtctagaacttgccaaataagctgtgctgccttaccagtgaactccagagatatgtctgtctatccttcctaattctggaattacaaactcacattctctacccgttgattagtccttgtctggatcacttaaagcctcaggcctgaaattcccccaccacatggccttaattcgaggaagtggtctcgtgctcctccaagaggctgggatggcctggtgcacagctaagcaaatgcttcttcaaggacccttgcagatgacaagggagctttgagagcctgctgtatgtatgatgctagctagcacttggaggccgaggctggattatgagtttgaagccaccctggactatttactgactgtctaaaaaaaaaaaaaaaaaa

SEQ ID NO: 10195 - protein, 724 aa, Rattus norvegicus
  ref <308>: DATABASE ACCESSION NUMBER: SWISS-Prot / P70531
  ref <309>: DATABASE ENTRY DATE: 1998-07-15
MADEDLIFRLEGVDGGGSSGAGRHGDSDTDSDDDEGYFICPITDDHMSNQNVNSKGQGYYNNLLKTECGSTGSPASSFHFKEAWKHAIEKAKHMPDPWAEFHLEDIATEHATRHRYNAVTGEWLKDEVLIKMASQPFGRGAMRECFRTKKLSNFLHAQHWKGASNYVAKRYLEPVDRSVYFEDVQLQMEAKLWGEEYNRHKPPKQVDIMQMCIIELKDRQGQPLFHLEHYIEGKYIKYNSNSGFVRDDNIRLTPQAFSHFTFERSGHQLIVVDIQGVGDLYTDPQIHTEKGTDFGDGNLGVRGMALFFYSHACNRICQSMGLAPFDLSPREQDAVNQSTKLLQSAKTILRGTEEKCGSPRIRTLSGSRPPLLLRLSENSGDENMSDVTFDSLPSSPSSATPHSQKLDHLHWPVFGDLDNMGPRDHDRMDNHRDSENSGDSGYPSEKRSDLDDPEPREHGHSNGNRRPESDEDSLGSSGRVCVETWNLLNPSRLHLPRPSAVALEVQRLNALDLGRKIGKSVLGKVHLAMVRYHEGGRFCEKDEEWDQESAIFHLEHAADLGELEAIVGLGLMYSQLPHHILADVSLEETEENKTKGFDYLLKAAEAGDRQSMILVARAFDTGLNLSPDRCQDWSEALHWYNTALETTDCDEGGEYDGIQDEPQYALLAREAEMLLTGGFGLDKNPQRSGDLYTQAAEAAMEAMKGRLANQYYEKAEEAWAQMEE

SEQ ID NO: 10196 - DNA, 2178 bp, Homo sapiens
  ref <308>: DATABASE ACCESSION NUMBER: Refseq / NM_013302
  ref <309>: DATABASE ENTRY DATE: 2002-11-26
atggcagacgaagacctcatcttccgcctggaaggtgttgatggcggccagtccccccgagctggccatgatggtgattctgatggggacagcgacgatgaggaaggttacttcatctgccccatcacggatgacccaagctcgaaccagaatgtcaattccaaggttaataagtactacagcaacctaacaaaaagtgagcggtatagctccagcgggtccccggcaaactccttccacttcaaggaagcctggaagcacgcaatccagaaggccaagcacatgcccgacccctgggctgagttccacctggaagatattgccaccgaacgtgctactcgacacaggtacaacgccgtcaccggggaatggctggatgatgaagttctgatcaagatggcatctcagcccttcggccgaggagcaatgagggagtgcttccggacgaagaagctctccaacttcttgcatgcccagcagtggaagggcgcctccaactacgtggcgaagcgctacatcgagcccgtagaccgggatgtgtactttgaggacgtgcgtctacagatggaggccaagctctggggggaggagtataatcggcacaagccccccaagcaggtggacatcatgcagatgtgcatcatcgagctgaaggacagaccgggcaagcccctcttccacctggagcactacatcgagggcaagtacatcaagtacaactccaactctggctttgtccgtgatgacaacatccgactgacgccgcaggccttcagccacttcacttttgagcgttccggccatcagctgatagtggtggacatccagggagttggggatctctacactgacccacagatccacacggagacgggcactgactttggagacggcaacctaggtgtccgcgggatggcgctcttcttctactctcatgcctgcaaccggatttgcgagagcatgggccttgctccctttgacctctcgccccgggagagggatgcagtgaatcagaacaccaagctgctgcaatcagccaagaccatcttgagaggaacagaggaaaaatgtgggagcccccgagtaaggaccctctctgggagccggccacccctgctccgtcccctttcagagaactctggagacgagaacatgagcgacgtgaccttcgactctctcccttcttccccatcttcggccacaccacacagccagaagctagaccacctccattggccagtgttcagtgacctcgataacatggcatccagagaccatgatcatctagacaaccaccgggagtctgagaatagtggggacagcggataccccagtgagaagcggggtgagctggatgaccctgagccccgagaacatggccactcatacagtaatcggaagtacgagtctgacgaagacagcctgggcagctctggacgggtatgtgtagagaagtggaatctcctcaactcctcccgcctccacctgccgagggcttcggccgtggccctggaagtgcaaaggcttaatgctctggacctcgaaaagaaaatcgggaagtccattttggggaaggtccatctggccatggtgcgctaccacgagggtgggcgcttctgcgagaagggcgaggagtgggaccaggagtcggctgtcttccacctggagcacgcagccaacctgggcgagctggaggccatcgtgggcctgggactcatgtactcgcagttgcctcatcacatcctagccgatgtctctctgaaggagacagaagagaacaaaaccaaaggatttgattacttactaaaggccgctgaagctggcgacaggcagtccatgatcctagtggcgcgagcttttgactctggccagaacctcagcccggacaggtgccaagactggctagaggccctgcactggtacaacactgccctggagatgacggactgtgatgagggcggtgagtacgacggaatgcaggacgagccccggtacatgatgctggccagggaggcagagatgctgttcacaggaggctacgggctggagaaggacccgcagagatcaggggacttgtatacccaggcagcagaggcagcgatggaagccatgaagggccgactggccaaccagtactaccaaaaggctgaagaggcctgggcccagatggaggaataa

SEQ ID NO: 10197 - protein, 725 aa, Homo sapiens
  ref <308>: DATABASE ACCESSION NUMBER: SWISS-Prot / O00418
  ref <309>: DATABASE ENTRY DATE: 2002-06-15
MADEDLIFRLEGVDGGQSPRAGHDGDSDGDSDDEEGYFICPITDDPSSNQNVNSKVNKYYSNLTKSERYSSSGSPANSFHFKEAWKHAIQKAKHMPDPWAEFHLEDIATERATRHRYNAVTGEWLDDEVLIKMASQPFGRGAMRECFRTKKLSNFLHAQQWKGASNYVAKRYIEPVDRDVYFEDVRLQMEAKLWGEEYNRHKPPKQVDIMQMCIIELKDRPGKPLFHLEHYIEGKYIKYNSNSGFVRDDNIRLTPQAFSHFTFERSGHQLIVVDIQGVGDLYTDPQIHTETGTDFGDGNLGVRGMALFFYSHACNRICESMGLAPFDLSPRERDAVNQNTKLLQSAKTILRGTEEKCGSPRVRTLSGSRPPLLRPLSENSGDENMSDVTFDSLPSSPSSATPHSQKLDHLHWPVFSDLDNMASRDHDHLDNHRESENSGDSGYPSEKRGELDDPEPREHGHSYSNRKYESDEDSLGSSGRVCVEKWNLLNSSRLHLPRASAVALEVQRLNALDLEKKIGKSILGKVHLAMVRYHEGGRFCEKGEEWDQESAVFHLEHAANLGELEAIVGLGLMYSQLPHHILADVSLKETEENKTKGFDYLLKAAEAGDRQSMILVARAFDSGQNLSPDRCQDWLEALHWYNTALEMTDCDEGGEYDGMQDEPRYMMLAREAEMLFTGGYGLEKDPQRSGDLYTQAAEAAMEAMKGRLANQYYQKAEEAWAQMEE

SEQ ID NO: 10198 - DNA, 1758 bp, Rattus norvegicus
  ref <308>: DATABASE ACCESSION NUMBER: EMBL / X96437
  ref <309>: DATABASE ENTRY DATE: 1996-09-03
gaatagcgtctcgggagtgtccctgggtaatcgctgcatctcgttttgtgtgtgtgctctgtcgaaacgtctgtgatgtgtgtatggttttcacgtgaacggaggcaggcagagttgggtctgtgggttctagtgtgttcttaatctttttggaagtttgtgcagtgacttcccctctgggattgtttcctatgcataccttcaagtatgtgtgaatgtgttttctgtggtcccttgatcttactgggcttctctaaggagggtggctggaccatctgctacgtgtctgggagcccctctctagctaccacatgtcccgacatgtgcttactcccaatatttgcacccactcgcattcacaactcccaggcaaaaagaaaaaatcaaaaaaacaaaaaaaacgtgcactggggcacctagaaaatgggcagccaaggctccgcctacattttgcttcctccttggaatttccagccctgtgcagccaactgctccctagctgcgaagggcggagtttcccggctctataagtagtggtgccttaccggggatccgcactcctccgtaccctctgtacagcgcgcgaattatgtgccattcgcgtaaccacctccacaccatgactggcctgagggctccggcgccagttccctccaccggcccggaactccggcggggctccggtcccggaattttcaccttcgaccccctcccggagcgggcggtagcgtccgccgtgcgtccgaacacttctcgcgggcacggaaaacgcagccgacgggtgctctaccctcgagtggtgagtatcgcccgagtgggcagcaagaggtcgagtcgccccggaacctttgggaacaactagatgcggggactttcgtctgacgtttccctcttttctctgctcaggtccggcgccagctaccaaccgaggaacccaacattgccaagaggatcctctttctcctgctcgccatcatcttctgccagattttgatggctgaagaaggtgtgtcgcaggccctggctccggaggatgctaccagcgccatatcacctgagcccatctctgcgcccattactgcgcctcctgtcctcgagcctttgaacctgacctcggagtcctcggactatgctctggatctcaaagcttttctccagcaacacccggcggcattctaaacgcgatgggtcacagtccggaaaaaaaaacccaaagagcaccaggggtacctggtcggcaagaacgtatcccaaactgggacttataaggcaacgctaactcagaacactaccgccaagatgccggttcttggggcgagcccgaggcaccgtgggtcctggctaggctcactggtgacggacggaggtcttctccgtgtctaattaatatttatgtatttatgtatatcctcctaggtgaaggaggggtgtatgtaatatttattctaacttatgcaggggtgcgagatatgcccccttgctgtgacacagatatttattacgatttatagggtccgtgagacagagttgtgggaggattagtttagtcttggtcggggggcataggtttaggggtaacactccattttccagcacttcgactctgttgtaagactttggcagacccttgggaatacggtctgtgtgcctttgatgtcttcctgactggaagtcttgggtccatggattgtcagagggcggctgtctggggtcgcctagtatgttctgtgaacacgaataaacttgatttgcctgtcg

SEQ ID NO: 10199 - DNA, 1864 bp, Homo sapiens
  ref <308>: DATABASE ACCESSION NUMBER: EMBL / X96438
  ref <309>: DATABASE ENTRY DATE: 1998-11-06
ctactagaagaaggacggagggagcgagggagatcacgaggtcaggaaatcgagaccaccctggccaaaagggtgaaaccccgtctctactaaaaatacaaaaattagctgggcgtggtggcgcgtgcctgtattcccagctactcaggaagctgaggcaggaaaatcgcttgaaccagggagtcaggggttgcagtgagccgagatcgcgcctctggattccagcctggcgaccgaacgagactgctccatctccaaaaaaaaaaaaaaaggcctgtgagggatcctgtggctaaagtgagcccctctccaggtgccacatgcctcgacatgtgcctgcagcccgggatctcacccacccccactcacgactcacacactcacaacgtgcagttgggcgcctaggattgtgcatgttcaagtctccacccactccctttgttaatcgtcggaatttccagcccgctgctgccaaccgctccccagctgcgggaggaggagttagaaggacccgcccaattttcaggagcacataaattacctctgccggcagccgaccctcacttggccttacactccgctcggctcaccatgtgtcactctcgcagctgccacccgaccatgaccatcctgcaggccccgaccccggccccctccaccatcccgggaccccggcggggctccggtcctgagatcttcaccttcgaccctctcccggagcccgcagcggcccctgccgggcgccccagcgcctctcgcgggcaccgaaagcgcagccgcagggttctctaccctcgagtggtgagtatcgccgaagtgggcattcgcggggtgcgctgccctggagtcactggggaacgacccgactccagaggcctcgacctgacctgtctcctgttttgtctccccttaggtccggcgccagctgccagtcgaggaaccgaacccagccaaaaggcttctctttctgctgctcaccatcgtcttctgccagatcctgatggctgaagagggtgtgccggcgcccctgcctccagaggacgcccctaacgccgcatccctggcgcccacccctgtgtcccccgtcctcgagccctttaatctgacttcggagccctcggactacgctctggacctcagcactttcctccagcaacacccggccgccttctaactggactccccgcactccccaaaaagaatccgaaaaaccacaaagaaacaccaggcgtacctggttgcgcgagagcgtatccccaactgggacttccgaggcaacttgaactcagaacactacagcggagacgccacccggtgcttgagcgggaccgaggcgcacagagaccgaggcgcatagagaccgagcacagcccagctgggctaggcccggtgggaaggagagcgtcgttaatttatttcttattgctcctaattaatatttatatgtatttatgtacgtcctcctaggtgatggagatgtgtacgtaatatttattttaacttatgcaagggtgtgagatgttccccctgctgtaaatgcaggtctcttggtatttattgagctttgtgggtctggtggaagcaggacacctggaactgcggcaaagtaggagaagaaatggggaggactcgggtgggggaggacgtcccggctgggatgaagtctggtggtgggtcgtaagtttaggaggtgactgcatcctccagcatctcaactccgtctgtctactgtgtgagacttcggcggaccattaggaatgagatccgtgagatccttccatcttcttgaagtcgcctttagggtggctgcgaggtagagggttgggggttggtgggctgtcacggagcgactgtcgagatcgcc

SEQ ID NO: 10200 - protein, 156 aa, Homo sapiens
  ref <308>: DATABASE ACCESSION NUMBER: SWISS-Prot / CAA65304
  ref <309>: DATABASE ENTRY DATE: 2002-06-15
MCHSRSCHPTMTILQAPTPAPSTIPGPRRGSGPEIFTFDPLPEPAAAPAGRPSASRGHRKRSRRVLYPRVVRRQLPVEEPNPAKRLLFLLLTIVFCQILMAEEGVPAPLPPEDAPNAASLAPTPVSPVLEPFNLTSEPSDYALDLSTFLQQHPAAF

SEQ ID NO: 10201 - DNA, 1758 bp, Rattus norvegicus; identical to SEQ ID NO: 10198
  ref <308>: DATABASE ACCESSION NUMBER: EMBL / X96437
  ref <309>: DATABASE ENTRY DATE: 1996-09-03

SEQ ID NO: 10202 - DNA, 1864 bp, Homo sapiens; identical to SEQ ID NO: 10199
  ref <308>: DATABASE ACCESSION NUMBER: EMBL / X96438
  ref <309>: DATABASE ENTRY DATE: 1998-11-06

SEQ ID NO: 10203 - protein, 156 aa, Homo sapiens; identical to SEQ ID NO: 10200
  ref <308>: DATABASE ACCESSION NUMBER: SWISS-Prot / CAA65304
  ref <309>: DATABASE ENTRY DATE: 2002-06-15

SEQ ID NO: 10204 - DNA, 1758 bp, Rattus norvegicus; identical to SEQ ID NO: 10198
  ref <308>: DATABASE ACCESSION NUMBER: EMBL / X96437
  ref <309>: DATABASE ENTRY DATE: 1996-09-03

SEQ ID NO: 10205 - DNA, 1864 bp, Homo sapiens; identical to SEQ ID NO: 10199
  ref <308>: DATABASE ACCESSION NUMBER: EMBL / X96438
  ref <309>: DATABASE ENTRY DATE: 1998-11-06

SEQ ID NO: 10206 - protein, 156 aa, Homo sapiens; identical to SEQ ID NO: 10200
  ref <308>: DATABASE ACCESSION NUMBER: SWISS-Prot / CAA65304
  ref <309>: DATABASE ENTRY DATE: 2002-06-15

SEQ ID NO: 10207 - DNA, 1758 bp, Rattus norvegicus; identical to SEQ ID NO: 10198
  ref <308>: DATABASE ACCESSION NUMBER: EMBL / X96437
  ref <309>: DATABASE ENTRY DATE: 1996-09-03

SEQ ID NO: 10208 - DNA, 1864 bp, Homo sapiens; identical to SEQ ID NO: 10199
  ref <308>: DATABASE ACCESSION NUMBER: EMBL / X96438
  ref <309>: DATABASE ENTRY DATE: 1998-11-06

SEQ ID NO: 10209 - protein, 156 aa, Homo sapiens; identical to SEQ ID NO: 10200
  ref <308>: DATABASE ACCESSION NUMBER: SWISS-Prot / CAA65304
  ref <309>: DATABASE ENTRY DATE: 2002-06-15

SEQ ID NO: 10210 - DNA, 557 bp, Rattus norvegicus
  ref <308>: DATABASE ACCESSION NUMBER: EMBL / X97374
  ref <309>: DATABASE ENTRY DATE: 1996-09-10
gcaggacccaggccactgactccctctacaaactcttccttcccaggtgaacctcagacctgggaatcacctcagggaggaatggtgcttggccctttgtgttgtggtccccacagctgactaaccctctccccagaccgtactgactggcatgtgccccttatgtgtttcagcctcttgcttcccacggctgcaccatgaaaatcctgttttgtgatgtcctgctgctcagcctgctctccagcgtgttcagcagctgtcccgaggactgcctcacctgccaggagaggctccacccggctccgggcagcttcaacctgaaggtaggtccaggaggtggagggactgccctcttccctgacatctcttccctctgactccaaggcaaaccctacgaggtcctctggcttaagcagtatcatctgaccaagaggaaacaggtggatctgagctacatcttcctaccatgaccctgtggtcctccctctttattaccagattccagagatcctccctctctgccaccagactcctctggttctccctctctatctccc

SEQ ID NO: 10211 - protein, 181 aa, Rattus norvegicus
  ref <308>: DATABASE ACCESSION NUMBER: SWISS-Prot / CAA66043
  ref <309>: DATABASE ENTRY DATE: 2002-06-15
MKILFCDVLLLSLLSSVFSSCPEDCLTCQERLHPAPGSFNLKLCILQCEEKVFPRPLWTLCTKAMASDSEQLSPADPELTSAALYQSKASEMQHLKRMPRVRSVVQARDAEPEADAEPVADEADEVEQKQLQKRFGGFTGARKSARKLANQKRFSEFMRQYLVLSMQSSQRRRTLHQNGNV

SEQ ID NO: 10212 - DNA, 1198 bp, Homo sapiens
  misc_feature (1)..(1198): n=a, c, g or t
  ref <308>: DATABASE ACCESSION NUMBER: Refseq / NM_006228
  ref <309>: DATABASE ENTRY DATE: 2000-11-03
gccaggaaggcttgcaggttctgctgtttggttgctgaagggggtcagtgtgtgtatgtgtcatggaggtgggcagggaaggggagggctgtgcgtgggggagatgaggatatatatgctggtgtggctgagaaagcggaaccgagcctcgcatccatcggagggagccggggactgacagctctcagcacctgcttcctgctcctgcaccatgaaagtcctgctttgtgacctgctgctgctcagtctcttctccagtgtgttcagcagttgtcagagggactgtctcacatgccaggagaagctccacccagccctggacagcttcgacctggaggtgtgcatcctcgagtgcgaagagaaggtcttccccagccccctctggactccatgcaccaaggtcatggccaggagctcttggcagctcagccctgccgccccagagcatgtggcggctgctctctaccagccgagagcttcggagatgcagcatctgcggcgaatgccccgagtccggagcttgttccaggagcaggaagagcccgagcctggcatggaggaggctggtgagatggagcagaagcagctgcagaagagatttgggggcttcaccggggcccggaagtcggccaggaagttggccaatcagaagcggttcagtgagtttatgaggcaatacttggtcctgagcatgcagtccagccagcgccggcgcaccctgcaccagaatggtaatgtgtagccggaaggggcgctcctcccagctgtaccggccactgcaacccatgagcgtccaggtgatcccccaaacagcatgtgctcagncccagacctgccgcctgggaatcaggattccttcttccccaaggcactgagcgcctgcagatcccgcaggcttcgtttgcctccagaaccttcccgtctgattgttcctccccagccccctggcatgtttcaccacaaccctgttgctacatcagagtgtatttttgtaattcctctagctaccatttcaatagccccatctctcctgctcacccgcctcttgccccttctaggggcaggtgaaaggaataggaaattgaacctggggttttgacttgccactgccataacttgtttgtaaaagagctgttctttttgactgattgttttaaacaacgatttctccattaaacttctactgagcaaatggtta

SEQ ID NO: 10213 - protein, 176 aa, Homo sapiens
  ref <308>: DATABASE ACCESSION NUMBER: SWISS-Prot / Q13519
  ref <309>: DATABASE ENTRY DATE: 2002-06-15
MKVLLCDLLLLSLFSSVFSSCQRDCLTCQEKLHPALDSFDLEVCILECEEKVFPSPLWTPCTKVMARSSWQLSPAAPEHVAAALYQPRASEMQHLRRMPRVRSLFQEQEEPEPGMEEAGEMEQKQLQKRFGGFTGARKSARKLANQKRFSEFMRQYLVLSMQSSQRRRTLHQNGNV

SEQ ID NO: 10214 - DNA, 1412 bp, Rattus norvegicus
  ref <308>: DATABASE ACCESSION NUMBER: EMBL / X98399
  ref <309>: DATABASE ENTRY DATE: 1997-02-06
ggtgcctcttctgcaccactctccagggcactgcacctcttaagagagcctggctgccctttatcagacactgccttctgccaccgggaagcccgctggagggagccagaggaagaaatggccatggaagatattcccactatggttaaagtagaccgaggtgaaagccagattttatcctgccgggggagaaggtgtggcctcaaagtacttggctatgtcacgggagatatgaaggaattcgccaactggcttaaagacaagcctgtggtgctccagttcatggactggatacttcgtggcatatcccaggtggtgtttgtcagcaaccccatcagtggaatcctgattctggcgggacttctggtccagaacccctggtgggcgctctgtggctgtgtaggaaccgtggtctccactctgaccgccctcttgcttagccaagacagatcagcgataacggccgggctccagggttacaatgccaccctggtgggaatactcatggctgtcttctcagacaagggcgactacttctggtggttgatattccctgtatctgctatgtctatgacttgcccggttttctcgagcgcgttgagctccctgttcagcaagtgggacctgcccgtcttcactcttcctttcaacatggctttgtcgctgtaccttccagccacaggacactacaatacgtttttcccaagtaaactcttcatgcctgtcagctccgtgcccaacatcacgtggtccgagctcagcgccctggagctgttgaagtctcttccggtgggagtcggtcagatatatggctgtgataacccgtggacaggggccattttcctgtgtgccatcctgctttcctccccactcatgtgcctgcacgctgctatcggatcgttgctgggagtcatcgcaggtctcagtcttgcagctccgtttaaagatatcttctctgggctctggggtttcaacagttccctggcttgcattgcgatcggagggatgttcatggcactcacctggcagacccatctcctggcccttgcctgtgccctgttcactgcctactttggagcctgtatgacacacctgatggctgcggttcacctgccagcttgtacctggtccttctgcttggccacactactctttctcctgctgaccacggaaaatcccaatatctacaggatgcccctcagcaaagttacctactccgaggagaaccgcatcttctacctacaaaacaagaaaagggtggtcgactctgtgtgtgtacatgtctgtgtgtgtggctgtatgtgtatcttgcctgtgtgtgtgcttctgcatgtgtatctatgtgtctctgtgtcttcgtgagtttgtgtgtatatgtgtctctgtatttctgtgggtgtgtgtgtgtgccg

SEQ ID NO: 10215 - protein, 414 aa, Rattus norvegicus
  ref <308>: DATABASE ACCESSION NUMBER: SWISS-Prot / CAA67049
  ref <309>: DATABASE ENTRY DATE: 2003-02-01
MAMEDIPTMVKVDRGESQILSCRGRRCGLKVLGYVTGDMKEFANWLKDKPVVLQFMDWILRGISQVVFVSNPISGILILAGLLVQNPWWALCGCVGTVVSTLTALLLSQDRSAITAGLQGYNATLVGILMAVFSDKGDYFWWLIFPVSAMSMTCPVFSSALSSLFSKWDLPVFTLPFNMALSLYLPATGHYNTFFPSKLFMPVSSVPNITWSELSALELLKSLPVGVGQIYGCDNPWTGAIFLCAILLSSPLMCLHAAIGSLLGVIAGLSLAAPFKDIFSGLWGFNSSLACIAIGGMFMALTWQTHLLALACALFTAYFGACMTHLMAAVHLPACTWSFCLATLLFLLLTTENPNIYRMPLSKVTYSEENRIFYLQNKKRVVDSVCVHVCVCGCMCILPVCVLLHVYLCVSVSS

SEQ ID NO: 10216 - DNA, 1255 bp, Homo sapiens
  ref <308>: DATABASE ACCESSION NUMBER: EMBL / Y19039
  ref <309>: DATABASE ENTRY DATE: 2001-08-09
gagccagaggaagagatagccatggaggacagccccactatggttagagtggacagccccactatggttaggggtgaaaaccaggtttcgccatgtcaagggagaaggtgcttccccaaagctcttggctatgtcaccggtgacatgaaagaacttgccaaccagcttaaagacaaacccgtggtgctccagttcattgactggattctccggggcatatcccaagtggtgttcgtcaacaaccccgtcagtggaatcctgattctggtaggacttcttgttcagaacccctggtgggctctcactggctggctgggaacagtggtctccactctgatggccctcttgctcagccaggacaggtcattaatagcatctgggctctatggctacaatgccaccctggtgggagtactcatggctgtcttttcggacaagggagactatttctggtggctgttactccctgtatgtgctatgtccatgacttgcccaattttctcaagtgcattgaattccatgctcagcaaatgggacctccccgtcttcaccctccctttcaacatggcgttgtcaatgtacctttcagccacaggacattacaatccgttctttccagccaaactggtcatacctataactacagctccaaatatctcctggtctgacctcagtgccctggagttgttgaaatctataccagtgggagttggtcagatctatggctgtgataatccatggacagggggcattttcctgggagccatcctactctcctccccactcatgtgcctgcatgctgccataggatcattgctgggcatagcagcgggactcagtctttcagccccatttgaggacatctactttggactctggggtttcaacagctctctggcctgcattgcaatgggaggaatgttcatggcgctcacctggcaaacccacctcctggctcttggctgtgccctgttcacggcctatcttggagtcggcatggcaaactttatggctgaggttggattgccagcttgtacctggcccttctgtttggccacgctattgttcctcatcatgaccacaaaaaattccaacatctacaagatgcccctcagtaaagttacttatcctgaagaaaaccgcatcttctacctgcaagccaagaaaagaatggtggaaagccctttgtgagaacaagccccatttgcagccatggtcacgagtcatttctgcctgactgctccagctaacttcc

SEQ ID NO: 10217 - protein, 389 aa, Homo sapiens
  ref <308>: DATABASE ACCESSION NUMBER: SWISS-Prot / Q13336
  ref <309>: DATABASE ENTRY DATE: 2002-06-15
MEDSPTMVRVDSPTMVRGENQVSPCQGRRCFPKALGYVTGDMKELANQLKDKPVVLQFIDWILRGISQVVFVNNPVSGILILVGLLVQNPWWALTGWLGTVVSTLMALLLSQDRSLIASGLYGYNATLVGVLMAVFSDKGDYFWWLLLPVCAMSMTCPIFSSALNSMLSKWDLPVFTLPFNMALSMYLSATGHYNPFFPAKLVIPITTAPNISWSDLSALELLKSIPVGVGQIYGCDNPWTGGIFLGAILLSSPLMCLHAAIGSLLGIAAGLSLSAPFEDIYFGLWGFNSSLACIAMGGMFMALTWQTHLLALGCALFTAYLGVGMANFMAEVGLPACTWPFCLATLLFLIMTTKNSNIYKMPLSKVTYPEENRIFYLQAKKRMVESPL

SEQ ID NO: 10218 - DNA, 2325 bp, Rattus norvegicus
  ref <308>: DATABASE ACCESSION NUMBER: EMBL / X98564
  ref <309>: DATABASE ENTRY DATE: 1997-07-23
ggaattcggcacgaggatggatctgtcaccccgcaaccggccgcttctggactcgtcctcgctggacagtggctccctgacctcgctggactccagcgtcttctgcagcgagggcgaaggggaacccttggctctgggggactgccttacggtcaacgtgggaggcagccgcttcgtgctctctcagcaagctctgtcctgcttcccgcacacgcgcctgggcaaactggccgtggtggtggcctcctaccgccgcctgggcgccctggctgcagcccccagccccttggagctttgtgatgatgccaacccggtagacaacgagtacttcttcgaccgcagctctcaggcattccgttatgtcctacactattatcgcactggccgcttgcacgtcatggagcagctctgtgcactctcctttcttcaggagatccagtactggggcatcgatgaactcagcatcgactcctgctgcagggacagatacttcagaagaaaggagctgagtgaaactcttgacttcaagaaggacacagatgaccaggaaagtcaacatgagagtgaacaggacttctcacaaggaccttgtcctaccgtccgacaaaagctctgggatattctggagaagcctgggtcttccacagcagcccggatctttggagtgatctccatcatttttgtggcagtgtccatcgtcaacatggccctgatgtcagctgagctaagctggctcaacctacagctgctggagattttggagtatgtgtgcatcagttggttcaccggggagttcattctgcgcttcctgtgtgtgaaagacaggtgccacttcctgaggaaggttccaaacatcatagacctccttgccatcttgcccttctacataactcttctggtggaaagcctgagcggcagccacaccacccaagagctggaaaatgtaggacgtctggtccaggttttgaggctccttagagctctgcgcatgctgaagctgggaaggcattctacaggattgcgctcacttgggatgacaatcacccagtgctatgaagaagtcggcctactgctcctgtttctatctgtgggaatttctatattttcaacaatagaatactttgcagagcaaagcattcctgatacaaccttcacaagtgttccttgtgcatggtggtgggccacaacatccatgactacagtaggatatggggacattagaccagacaccacgacaggcaaaatcgtggccttcatgtgtattctatcaggaatccttgtcttggccttgcctattgccattattaatgatcgcttctctgcttgttatttcaccttgaaactcaaggaagcagctgtgagacagcgtgaagctctcaagaagcttaccaagaatatagccactgactcatacattagtgttaacctgagggatatctatgcccggagcatcatggagatgcttcgattaaagggcagggagagagcgagtactagaagcagtggtggagatgatttctggttttaagtttaccttcaacttatttacaaaacctatgtacatttgactggattgatgaagccttgctgctatggctatctgtatactgattatgattttcttgaccacttatcttctttctggtgtattttctagaatatttaacatctcctatagcatctactgattattttaacacacatgtcttcaacgtagccaattaatacaaccaaaatcaattgggaaaagaacacgtatctgaattttgaagtatcaattaatataatttcatacatcaaaatttaaagaatcatgtgtcattattcttgggctttcagcagtgatgttttctgttttttcatggaagtagaactgcacagtccatggggagttggggcagtgagcatttaaaaatacacagtgcatctttttgtcatttaaagatattctacaaataagttacttctttctctatcaattaaaactattgagtataaatataagctttgcaatcaaacacttaagcttagtagccatagtgagtaccacatcttccatcaagtgcaagtcactggttccaactggacagagctctacccttcaacagtcaatttctaagtggaagcctcaaactgctgaagacttgaagtaggtgagacttcaagtccctggacaatttcattatcccagctgagtgtgatgtgtgaagaagaatgcagcatagctctctgggaaaattaaatgatttataaaacatttcattatggatgaattatttaagctatgctttcaaagtcatgaatatggaaaactaaaccgaattc

SEQ ID NO: 10219 - protein, 503 aa, Rattus norvegicus
  ref <308>: DATABASE ACCESSION NUMBER: SWISS-Prot / CAA67174
  ref <309>: DATABASE ENTRY DATE: 2002-10-01
MDLSPRNRPLLDSSSLDSGSLTSLDSSVFCSEGEGEPLALGDCLTVNVGGSRFVLSQQALSCFPHTRLGKLAVVVASYRRLGALAAAPSPLELCDDANPVDNEYFFDRSSQAFRYVLHYYRTGRLHVMEQLCALSFLQEIQYWGIDELSIDSCCRDRYFRRKELSETLDFKKDTDDQESQHESEQDFSQGPCPTVRQKLWDILEKPGSSTAARIFGVISIIFVAVSIVNMALMSAELSWLNLQLLEILEYVCISWFTGEFILRFLCVKDRCHFLRKVPNIIDLLAILPFYITLLVESLSGSHTTQELENVGRLVQVLRLLRALRMLKLGRHSTGLRSLGMTITQCYEEVGLLLLFLSVGISIFSTIEYFAEQSIPDTTFTSVPCAWWWATTSMTTVGYGDIRPDTTTGKIVAFMCILSGILVLALPIAIINDRFSACYFTLKLKEAAVRQREALKKLTKNIATDSYISVNLRDIYARSIMEMLRLKGRERASTRSSGGDDFWF

SEQ ID NO: 10220 - DNA, 2942 bp, Homo sapiens
  ref <308>: DATABASE ACCESSION NUMBER: Refseq / NM_014379
  ref <309>: DATABASE ENTRY DATE: 2002-11-05
ggtgacaacgtttggaagggccagggcgaccggcagtgtgcacagggactgtgtcgggcttggacctcacctgatcctctctcttagcgcgacccttcctctgctccctgtctcctctttctgccacttgtgcgctgcttccgcgcactcccggctccctagcggcaggaggaggaaggcgcacagcgggtggagagggtgcgccaaggagaggtaaccccttcgggagcccggggaatcccggccgccaccaggggccgtgccaccgccctcgcgggaccaaagcttccggcgtgtccccaactttgtggcgccctcaggccgcggcgactgggttagagatgccttccagcggcagagcgctgctggactcgccgctggacagcggctccctgacctccctggactctagtgtcttctgcagcgagggtgaaggggagcccttggcgctcggggactgcttcacggtcaacgtgggcggcagccgcttcgtgctctcgcagcaggcgctgtcctgcttcccgcacacgcgccttggcaagctggccgtggtggtggcttcctaccgccgccccggggccctggccgccgtgcccagccctctggagctttgcgacgatgccaaccccgtggacaacgagtacttcttcgaccgcagctcgcaggcgttccgatatgtcctgcactactaccgcaccggccgcctgcatgtcatggagcagctgtgcgcgctctccttcctgcaggagatccagtactggggcatcgatgagctcagcatcgattcctgctgcagggacagatacttcagaaggaaagagctgagtgaaactttagacttcaagaaggacacagaagaccaggaaagtcaacatgagagtgaacaggacttctcccaaggaccttgtcccactgttcgccagaagctctggaatatcctggagaaacctggatcttccacagctgcccgtatctttggcgtcatctccattatcttcgtggtggtgtccatcattaacatggccctgatgtcagctgagttaagctggctggacctgcagctgctggaaatcctggagtatgtgtgcattagctggttcaccggggagtttgtcctccgcttcctgtgtgtgcgggacaggtgtcgcttcctaagaaaggtgccaaacatcatagacctccttgccatcttgcccttctacatcactcttctggtagagagcctaagtgggagccagaccacgcaggagctggagaacgtggggcgcattgtccaggtgttgaggctgctcagggctctgcgcatgctaaagctgggcagacattccacaggattacgctcccttgggatgacaatcacccagtgttacgaagaagtcggcctactgctcctatttctatccgtgggaatctctatattttcaactgtagaatactttgctgagcaaagcattcctgacacaaccttcacaagtgtcccttgtgcatggtggtgggccaccacctctatgactactgtgggatatggggacattagaccagacaccaccacaggcaaaatcgtggccttcatgtgtatattatcgggaattcttgtcttggccttgcctattgctattattaacgatcgcttctctgcttgctacttcaccttgaaactcaaggaagcagctgttagacagcgtgaagccctaaagaagcttaccaagaatatagccactgactcatatatcagtgttaacttgagagatgtctatgcccggagtatcatggagatgctgcgactgaaaggcagagaaagagcaagtactaggagcagcgggggagatgatttctggttttgaattaattttcaatttatttacaaaagctatgtacaattaactaaaatgataaagcagtgatgtggatttctgtattctgatgatgagtctcttcagagtactgctcatcttaattaatttttgctgatatattgcttcatctactagaatatttcacatcacctataacaactgcacagtgttctgacacatttgagtgtccaaaatagccaattaacacaaccaaatacaactgggccaatataaacatgtttgaattgtcaaatataaaataatgttattgcaatacatacaaaaaagttaaagattttatgtatcactaacattagaagttttttgcaccactaattttttaaaaatggaaggtaaactgcatagcccagagaaagataagtaaatatttaagaacatattgaacaactttgctatttaaagatattatccaagtacataaattactccgttctctatcagttaaagctattgaatataatacttagctttacaagagaaaacccatatttgatgggcagagattatatccctatcttctttttcatgtaaaccactggtcacaaatgaactgatctctgtatcccattattactataagaggtgggaatcccaaaactgcttagattgcagtacatgagtttacacaaagacttcaacaattgcacatcttcattctcccaactgagtgtagtatgtggagcataaaacagcatattcttagtatttcatgaatatcagatggtctttaaatgtctctttatggatgtattgttcacattatggctttaaaataatgaatatgtaaaagtgaggtagtgaacatcctaaatttctacactggaattactaaataatcttatttcataaaatgggaaatatatgttaaatgacatcactggatgaacttgaagatcttttacttgttaacaaaaaaatactatggacagctttctgattgttggggtaaatagcaaatgttcaaactttgcaggcattttgacattcatcataacaacacaattcctagacattgtattatataattaaagccaaaacctctaaagctaaaaaaaaaaaaaaaaa

SEQ ID NO: 10221 - protein, 500 aa, Homo sapiens
  ref <308>: DATABASE ACCESSION NUMBER: Refseq / NP_055194
  ref <309>: DATABASE ENTRY DATE: 2002-11-05
MPSSGRALLDSPLDSGSLTSLDSSVFCSEGEGEPLALGDCFTVNVGGSRFVLSQQALSCFPHTRLGKLAVVVASYRRPGALAAVPSPLELCDDANPVDNEYFFDRSSQAFRYVLHYYRTGRLHVMEQLCALSFLQEIQYWGIDELSIDSCCRDRYFRRKELSETLDFKKDTEDQESQHESEQDFSQGPCPTVRQKLWNILEKPGSSTAARIFGVISIIFVVVSIINMALMSAELSWLDLQLLEILEYVCISWFTGEFVLRFLCVRDRCRFLRKVPNIIDLLAILPFYITLLVESLSGSQTTQELENVGRIVQVLRLLRALRMLKLGRHSTGLRSLGMTITQCYEEVGLLLLFLSVGISIFSTVEYFAEQSIPDTTFTSVPCAWWWATTSMTTVGYGDIRPDTTTGKIVAFMCILSGILVLALPIAIINDRFSACYFTLKLKEAAVRQREALKKLTKNIATDSYISVNLRDVYARSIMEMLRLKGRERASTRSSGGDDFWF

SEQ ID NO: 10222 - DNA, 2325 bp, Rattus norvegicus; identical to SEQ ID NO: 10218
  ref <308>: DATABASE ACCESSION NUMBER: EMBL / X98564
  ref <309>: DATABASE ENTRY DATE: 1997-07-23

SEQ ID NO: 10223 - protein, 503 aa, Rattus norvegicus; identical to SEQ ID NO: 10219
  ref <308>: DATABASE ACCESSION NUMBER: SWISS-Prot / CAA67174
  ref <309>: DATABASE ENTRY DATE: 2002-10-01

SEQ ID NO: 10224 - DNA, 2942 bp, Homo sapiens; identical to SEQ ID NO: 10220
  ref <308>: DATABASE ACCESSION NUMBER: Refseq / NM_014379
  ref <309>: DATABASE ENTRY DATE: 2002-11-05

SEQ ID NO: 10225 - protein, 500 aa, Homo sapiens; identical to SEQ ID NO: 10221
  ref <308>: DATABASE ACCESSION NUMBER: Refseq / NP_055194
  ref <309>: DATABASE ENTRY DATE: 2002-11-05

SEQ ID NO: 10226 - DNA, 2088 bp, Rattus norvegicus
  ref <308>: DATABASE ACCESSION NUMBER: EMBL / X99267
  ref <309>: DATABASE ENTRY DATE: 1998-08-01
ccggcggagcagctgtttctttaaggttgagcctctgatcagctgggaacccagcagaaggcaaaggtttctgttgatgtcttctcacctgccctgggctgtgaccgcccgggagagaccatgctcacattcatggccactgatagcgaggaagaggtgtgcgatgagcggacgtccttgatgtcagccgagagccctacatcacgttcctgccaggacagcaggccaggcccagaggatggagagaacactgcccagtggaggagccaggagaacgaggacgactgtgaggaggacccggaccactatgcctgcagtggggttcctgggcgaccatcgggcctggaggaggagctgaccctcaagtatggggcgaagcacgtgatcatgctgttcgtgcctgtcacgctgtgcatgattgtggtggtggccaccatcaagtccgtgcgtttctacacggagaagaacgggcagctcatctacacgcccttcaccgaggacacaccctctgtgggccagcggctcctcaactccgtgctgaacactctgatcatgatcagcgtcattgtggtcatgactatcttcctagtggtactctacaaatatcgctgttacaagttcatccatggctggctgatcatgtcctccctgatgctcctcttcttgttcacctacatctacctcggggaagtgttcaagacctacaatgtggccatggactaccccacactgttcctggctgtctggaacttcggggcagtgggcatggtgtgcatccactggaagggtcccctggtgctccagcaggcttacctcattgtgatcagcgcactcatggccctggtgttcatcaagtacctgccggagtggtccgcttgggtcatcttgggcgccatctctgtgtacgatctcgtggctgtgctgtgccccaaagggccactgaggatgctggtggaaactgcccaggaaagaaacgagcccatatttcctgccctcatatactcatctgccatggtgtggacggtaggcatggcgaagctggacccctcctctcagggagcactgcagctcccttacgatccagagatggaagaagactcctatgacagttttggggaaccctcataccctgaagccttcgaagctccccagcctggctacccaggggaagagccggaggaggaggaggaaaggggtgtaaagcttggtctgggagacttcatcttctacagcgttctggtgggcaaggcagcagccacaggcaacggagactggagcacgacgctggcctgctttatcgccatcctcattggcttgtgtctcaccctcctgctgctcgccgtgttcaagaaggccctgcccgccctccccatctccatcaccttcgggctcatcttttacttctccacagacaacctggtgcgtcctttcatggacacgttggcctcccaccagctctacatctgacagaagagctgcggctctgagagctgtaggacgcttcgccgaatgcaggtgtatagttttacactctagtgccatatatttttttttaaaaaaacctttctttccttacaaaagaaaaaaaaagaataaaaaagtgttgtgtttacttcgtgacgaggaagcagaagccgcccttctgtgctagctgtcttgtcaccagactgaggcttgcccgtcagagcatctgtggcacccgcaggtgggatgctgggccaacaagcctatcttcagggatgaggtcacgtgtgtggatcaggttggagaggacgcaggccccatccaggtctgtaatcaatccttcagggctgagcaggaggaacatgtgcgtcagtggggaccaggaggcacggtcaggaaggacgctaagcaccaacaccctgaccagaggacaaaagccagtttgtcgtcatgaatgcccccagtgctttgtttgtgatgtctgttacctttagtatcttagaagctgagtcctgttcttatttctgcagtggactgctgggaagtggcttaatgacaataccaatacatagatgtccctgctggaaaaaaaaaaaaaaaaaaaaaaaaaaaaaaaaaaaaaaa

SEQ ID NO: 10227 - protein, 448 aa, Rattus norvegicus
  ref <308>: DATABASE ACCESSION NUMBER: SWISS-Prot / O88777
  ref <309>: DATABASE ENTRY DATE: 2001-10-16
MLTFMASDSEEEVCDERTSLMSAESPTSRSCQDSRPGPEDGENTAQWRSQENEDDCEEDPDHYACSGVPGRPSGLEEELTLKYGAKHVIMLFVPVTLCMIVVVATIKSVRFYTEKNGQLIYTPFTEDTPSVGQRLLNSVLNTLIMISVIVVMTIFLVVLYKYRCYKFIHGWLIMSSLMLLFLFTYIYLGEVFKTYNVAMDYPTLFLAVWNFGAVGMVCIHWKGPLVLQQAYLIVISALMALVFIKYLPEWSAWVILGAISVYDLVAVLCPKGPLRMLVETAQERNEPIFPALIYSSAMVWTVGMAKLDPSSQGALQLPYDPEMEEDSYDSFGEPSYPEAFEAPQPGYPGEEPEEEEERGVKLGLGDFIFYSVLVGKAAATGNGDWSTTLACFIAILIGLCLTLLLLAVFKKALPALPISITFGLIFYFSTDNLVRPFMDTLASHQLYI

SEQ ID NO: 10228 - DNA, 2236 bp, Homo sapiens
  ref <308>: DATABASE ACCESSION NUMBER: EMBL / L43964
  ref <309>: DATABASE ENTRY DATE: 1999-07-02
cgagcggcggcggagcaggcatttccagcagtgaggagacagccagaagcaagctattggagctgaaggaacctgagacagaagctagtcccccctctgaattttactgatgaagaaactgaggccacagagctaaagtgacttttcccaaggtcgcccagcgaggacgtgggacttctcagacgtcaggagagtgatgtgagggagctgtgtgaccatagaaagtgacgtgttaaaaaccagcgctgccctctttgaaagccagggagcatcattcatttagcctgctgagaagaagaaaccaagtgtccgggattcagacctctctgcggccccaagtgttcgtggtgcttccagaggcagggctatgctcacattcatggcctctgacagcgaggaagaagtgtgtgatgagcggacgtccctaatgtcggccgagagccccacgccgcgctcctgccaggagggcaggcagggcccagaggatggagagaacactgcccagtggagaagccaggagaacgaggaggacggtgaggaggaccctgaccgctatgtctgtagtggggttcccgggcggccgccaggcctggaggaagagctgaccctcaaatacggagcgaagcacgtgatcatgctgtttgtgcctgtcactctgtgcatgatcgtggtggtagccaccatcaagtctgtgcgcttctacacagagaagaatggacagctcatctacacgacattcactgaggacacaccctcggtgggccagcgcctcctcaactccgtgctgaacaccctcatcatgatcagcgtcatcgtggttatgaccatcttcttggtggtgctctacaagtaccgctgctacaagttcatccatggctggttgatcatgtcttcactgatgctgctgttcctcttcacctatatctaccttggggaagtgctcaagacctacaatgtggccatggactaccccaccctcttgctgactgtctggaacttcggggcagtgggcatggtgtgcatccactggaagggccctctggtgctgcagcaggcctacctcatcatgatcagtgcgctcatggccctagtgttcatcaagtacctcccagagtggtccgcgtgggtcatcctgggcgccatctctgtgtatgatctcgtggctgtgctgtgtcccaaagggcctctgagaatgctggtagaaactgcccaggagagaaatgagcccatattccctgccctgatatactcatctgccatggtgtggacggttggcatggcgaagctggacccctcctctcagggtgccctccagctcccctacgacccggagatggaagaagactcctatgacagttttggggagccttcataccccgaagtctttgagcctcccttgactggctacccaggggaggagctggaggaagaggaggaaaggggcgtgaagcttggcctcggggacttcatcttctacagtgtgctggtgggcaaggcggctgccacgggcagcggggactggaataccacgctggcctgcttcgtggccatcctcattggcttgtgtctgaccctcctgctgcttgctgtgttcaagaaggcgctgcccgccctccccatctccatcacgttcgggctcatcttttacttctccacggacaacctggtgcggccgttcatggacaccctggcctcccatcagctctacatctgagggacatggtgtgccacaggctgcaagctgcagggaattttcattggatgcagttgtatagttttacactctagtgccatatatttttaagacttttctttccttaaaaaataaagtacgtgtttacttggtgaggaggaggcagaaccagctctttggtgccagctgtttcatcaccagactttggctcccgctttggggagcgcctcgcttcacggacaggaagcacagcaggtttatccagatgaactgagaaggtcagattagggcggggagaagagcatccggcatgagggctgagatgcgcaaagagtgtgctcgggagtggcccctggcacctgggtgctctggctggagaggaaaagccagttccctacgaggagtgttcccaatgctttgtccatgatgtccttgttattttattgcctttagaaactgagtcctgttcttgttacggcagtcacactgctgggaagtggcttaatagtaatatcaataaatagatgagtcctgttagaaaaa

SEQ ID NO: 10229 - protein, 448 aa, Homo sapiens
  ref <308>: DATABASE ACCESSION NUMBER: SWISS-Prot / P49810
  ref <309>: DATABASE ENTRY DATE: 2002-06-15
MLTFMASDSEEEVCDERTSLMSAESPTPRSCQEGRQGPEDGENTAQWRSQENEEDGEEDPDRYVCSGVPGRPPGLEEELTLKYGAKHVIMLFVPVTLCMIVVVATIKSVRFYTEKNGQLIYTPFTEDTPSVGQRLLNSVLNTLIMISVIVVMTIFLVVLYKYRCYKFIHGWLIMSSLMLLFLFTYIYLGEVLKTYNVAMDYPTLLLTVWNFGAVGMVCIHWKGPLVLQQAYLIMISALMALVFIKYLPEWSAWVILGAISVYDLVAVLCPKGPLRMLVETAQERNEPIFPALIYSSAMVWTVGMAKLDPSSQGALQLPYDPEMEEDSYDSFGEPSYPEVFEPPLTGYPGEELEEEEERGVKLGLGDFIFYSVLVGKAAATGSGDWNTTLACFVAILIGLCLTLLLLAVFKKALPALPISITFGLIFYFSTDNLVRPFMDTLASHQLYI

SEQ ID NO: 10230 - DNA, 2088 bp, Rattus norvegicus; identical to SEQ ID NO: 10226
  ref <308>: DATABASE ACCESSION NUMBER: EMBL / X99267
  ref <309>: DATABASE ENTRY DATE: 1998-08-01

SEQ ID NO: 10231 - protein, 448 aa, Rattus norvegicus; identical to SEQ ID NO: 10227
  ref <308>: DATABASE ACCESSION NUMBER: SWISS-Prot / O88777
  ref <309>: DATABASE ENTRY DATE: 2001-10-16

SEQ ID NO: 10232 - DNA, 2236 bp, Homo sapiens; identical to SEQ ID NO: 10228
  ref <308>: DATABASE ACCESSION NUMBER: EMBL / L43964
  ref <309>: DATABASE ENTRY DATE: 1999-07-02

SEQ ID NO: 10233 - protein, 448 aa, Homo sapiens; identical to SEQ ID NO: 10229
  ref <308>: DATABASE ACCESSION NUMBER: SWISS-Prot / P49810
  ref <309>: DATABASE ENTRY DATE: 2002-06-15

SEQ ID NO: 10234 - DNA, 2088 bp, Rattus norvegicus; identical to SEQ ID NO: 10226
  ref <308>: DATABASE ACCESSION NUMBER: EMBL / X99267
  ref <309>: DATABASE ENTRY DATE: 1998-08-01

SEQ ID NO: 10235 - protein, 448 aa, Rattus norvegicus; identical to SEQ ID NO: 10227
  ref <308>: DATABASE ACCESSION NUMBER: SWISS-Prot / O88777
  ref <309>: DATABASE ENTRY DATE: 2001-10-16

SEQ ID NO: 10236 - DNA, 2236 bp, Homo sapiens; identical to SEQ ID NO: 10228
  ref <308>: DATABASE ACCESSION NUMBER: EMBL / L43964
  ref <309>: DATABASE ENTRY DATE: 1999-07-02

SEQ ID NO: 10237 - protein, 448 aa, Homo sapiens; identical to SEQ ID NO: 10229
  ref <308>: DATABASE ACCESSION NUMBER: SWISS-Prot / P49810
  ref <309>: DATABASE ENTRY DATE: 2002-06-15

SEQ ID NO: 10238 - DNA, 2088 bp, Rattus norvegicus; identical to SEQ ID NO: 10226
  ref <308>: DATABASE ACCESSION NUMBER: EMBL / X99267
  ref <309>: DATABASE ENTRY DATE: 1998-08-01

SEQ ID NO: 10239 - protein, 448 aa, Rattus norvegicus; identical to SEQ ID NO: 10227
  ref <308>: DATABASE ACCESSION NUMBER: SWISS-Prot / O88777
  ref <309>: DATABASE ENTRY DATE: 2001-10-16

SEQ ID NO: 10240 - DNA, 2236 bp, Homo sapiens; identical to SEQ ID NO: 10228
  ref <308>: DATABASE ACCESSION NUMBER: EMBL / L43964
  ref <309>: DATABASE ENTRY DATE: 1999-07-02

SEQ ID NO: 10241 - protein, 448 aa, Homo sapiens; identical to SEQ ID NO: 10229
  ref <308>: DATABASE ACCESSION NUMBER: SWISS-Prot / P49810
  ref <309>: DATABASE ENTRY DATE: 2002-06-15

SEQ ID NO: 10242 - DNA, 2031 bp, Rattus norvegicus
  misc_feature (1)..(2031): n=a, c, g or t
  ref <308>: DATABASE ACCESSION NUMBER: EMBL / X99337
  ref <309>: DATABASE ENTRY DATE: 1997-01-23
gatgcttggcnaagtcctcatctccctcatccccacaggctcagacgcaaaggagaaggagcatggaagagtagaacctgaagacacaatccctaaatgcggggagtctgcccttccgttccacctcagtgggaaggactgttttccctttgtgagcctgcccattcgctgctcgctctccggctagggaggatgtcgggctcgtcgctccccggcgccctggccctctcgctcttgctggtctctggctcgctcctcccagggccaggcgctgctcagaacgaaccaagaattgtcaccagcgaagaggtcattattcgagacagcctccttcctgtcaccctgcagtgtaacctcacttccagctctcacacccttatgtacagctactggacaaagaatggggtagaactcactgccacccgtaagaatgccagcaacatggaatacaggatcaataagccaagagctgaggattcaggcgaataccactgtgtatatcattttgtcagcgctcctaaagcaaatgccaccattgaagtgaaagctgctcctgacatcactggccataaacgcagtgaaaacaaaaatgaagggcaggatgctatgatgtattgcaagtctgttggctacccccacccggaatggatgtggcgcaagaaggagaatggtgtgtttgaggagatttccaatagctctggtcgcttcttcatcatcaacaaggagaattacactgaattgaatattgtgaatctccaaatcacagaagatcctggagagtatgaatgtaatgccaccaactccattggctctgcctccgtttccacagtcctcagggtacggagccaccttgccccactttggcctttcttgggaattctggctgaaatcatcatccttgtggtgatcattgttgtgtatgagaagaggaagaggccagatgaggttcctgatgatgatgaaccagccgggccaatgaaaaccaactctaccaacaatcacaaagataaaaacttgcgccagagaaacacaaattaagtactgcttttaatctctttaggttcctgaaaaatgatggcaacatgacctgctaagttttctgcttggacctctttggtctctccctttcaagtgagcaacaccacaatgaccgtctaaagcatgccttatttagcctctcctataagggtgacctagccaggtacattttaaacaatgcttcagtgtagaaggtgtaaactattttggggcttgatgtgctgtgaatgttgctttccctccctttgttaaaatatttaaatagaagcgaaaggtcctttgaggatcagatcatgcatgcgccatttttttacttatacagctgttaaattggcaaagctctaaatgcactgctgccatctagtgatcattttgnaaagtacagcaaaacctacagatatatacagtatataaatatatatatattcatatcncngggggtgggagaaatccaaaataaagtcaaagcttgtttcatttttaagctgctgatactcattccttattatttgttgtcagatgaggaagctgcagttctggtacaaaaagatgagagtataaacttaagtctgtcattctaagggcttacttaccctataactttaagaacctggaacagtccactgaacggctagaatgaattgcagtatatatgtatgattgctttttaagtgactatttttccttttgtcaaatcatgtaaattctgaaatcttttgcactgatgtgtcgaaccttattcttgtatattcaatcaaggcaacttttataatttcccatttgttttcaatgaccctgaaatgttaatagcatggtgatattctatgcaactctagttataccttttggtttgacactgtattttcacattgatttcatgactgatgatagattttataacctgactgggttctcatgcggtactaactgtagatgcatgtacttgtgttctgtgtaattattgaagtgcaatggtgtacaaaaaaagtgaat

SEQ ID NO: 10243 - protein, 272 aa, Rattus norvegicus
  ref <308>: DATABASE ACCESSION NUMBER: SWISS-Prot / P26453
  ref <309>: DATABASE ENTRY DATE: 2002-06-15
MAAALLLALAFTFLSGQGACAAAGTIVTSVQEVDSKTQLTCFLNSSGIDIVGHRWMRGGKVLQEDTLPDLQMKYTVDADDRSGEYSCIFLPEPVGRGNINVEGPPRIKVGKKSEHASEGEFVKLICKSEASHPPVDEWVWFKTSDTGDQTISNGTEANSKYVIISTPELSELIISDLDMNVDPGTYVCNATNSQGSARETISLRVRSRLAALWPFLGIVAEVLVLVTIIFIYEKRRKPDQTLDEDDPGAAPLKGSGSHLNDKDKNVRQRNAT

SEQ ID NO: 10244 - DNA, 1646 bp, Homo sapiens
  ref <308>: DATABASE ACCESSION NUMBER: EMBL / AF035287
  ref <309>: DATABASE ENTRY DATE: 2000-07-10
actggacaaagaatggggtggaactgagtgccactcgtaagaatgccagcaacatggagtacaggatcaataagccgagagctgaggattcaggcgaataccactgcgtatatcactttgtcagcgctcctaaagcaaacgccaccattgaagtgaaagccgctcctgacatcactggccataaacggagtgagaacaagaatgaagggcaggatgccactatgtattgcaagtcagttggctacccccacccagactggatatggcgcaagaaggagaacgggatgcccatggacattgtcaatacctctggccgcttcttcatcatcaacaaggaaaattacactgagttgaacattgtgaacctgcagatcacggaagaccctggcgagtatgaatgtaatgccacctggccccactctggcctttcttgggaattctggctgaaattatcatccttgtggtgatcattgttgtgtatgagaagaggaagaggccagatgaggttcctgacgctggaccaatgaaaaccaactctaccaacaatcacaaagataaaaacttgcgccagagaaacacaaattaagtactgcttacaatatctttaggttcctgaaactggtggcaacatgacctgctaaaattttctgcttggacctctttggttctctcccctttcaagtgagcaacaccacaatgactgtctaaagcatgccttatttagcctctcctgtaagggtgatctagccaggtacattttaaacaatgcttcagtgtagaaggtgtaaactattttgggcttgatgtgctgtgaatgttgcttttttttttcctttgttaaaatatttaaatagaagtgaaaaggtcctctgaggatcagatcatgcatgcgccattttttacttaatgcagctgttaaattggcaaagctctaaaatgcactgctgccatctagtgatacacttttgtaaagtacagcaaaacctacagatatatacagtatataaatatatatatatatatatttatatttttgggggtgggagaaatccaaaataaagtaaatgcttgtttcatttttaagctgctgatattcattccttattgtatgttgtcagatgaggaaattgtgcagttctggtacataaagatgagtaatataaactgaaatctataattttaagggcttaacctgtgactttaataagctggaacagtccactgaatgggtataatgaattgcagtatatacgtatgattgctttttaagtgattatcttttcttctgttaagtcatgtaaattcataaatccttttgcactgatgtgttgaaccttattcttgtacattcattcaatcaaggcaaacttttataatttttcttttgtttccaatgaccttgaaatgttatagcatggtaatattctatgcaactatagttatactttttggtttgacactgtattttttcacattgatttactggttgatgatagattttataacctaacggttctcatgcggtgcgtaattgtagatgcatgtacttgtgtgttttgtgtaattattgaagtgcaatgatgtataaaaaagtggattcacctgtttttaaaaataaaacattgataaaaaaaaaaaaaaaaaaa

SEQ ID NO: 10245 - DNA, 2031 bp, Rattus norvegicus; identical to SEQ ID NO: 10242
  misc_feature (1)..(2031): n=a, c, g or t
  ref <308>: DATABASE ACCESSION NUMBER: EMBL / X99337
  ref <309>: DATABASE ENTRY DATE: 1997-01-23

SEQ ID NO: 10246 - protein, 281 aa, Rattus norvegicus
  ref <308>: DATABASE ACCESSION NUMBER: SWISS-Prot / CAA67711
  ref <309>: DATABASE ENTRY DATE: 2003-02-01
MSGSSLPGALALSLLLVSGSLLPGPGAAQNEPRIVTSEEVIIRDSLLPVTLQCNLTSSSHTLMYSYWTKNGVELTATRKNASNMEYRINKPRAEDSGEYHCVYHFVSAPKANATIEVKAAPDITGHKRSENKNEGQDAMMYCKSVGYPHPEWMWRKKENGVFEEISNSSGRFFIINKENYTELNIVNLQITEDPGEYECNATNSIGSASVSTVLRVRSHLAPLWPFLGILAEIIILVVIIVVYEKRKRPDEVPDDDEPAGPMKTNSTNNHKDKNLRQRNTN

SEQ ID NO: 10247 - DNA, 1646 bp, Homo sapiens; identical to SEQ ID NO: 10244
  ref <308>: DATABASE ACCESSION NUMBER: EMBL / AF035287
  ref <309>: DATABASE ENTRY DATE: 2000-07-10

SEQ ID NO: 10248 - protein, 398 aa, Homo sapiens
  ref <308>: DATABASE ACCESSION NUMBER: Refseq / NP_036560
  ref <309>: DATABASE ENTRY DATE: 2001-02-03
MSGSSLPSALALSLLLVSGSLLPGPGAAQNAGFVKSPMSETKLTGDAFELYCDVVGSPTPEIQWWYAEVNRAESFRQLWDGARKRRVTVNTAYGSNGVSVLRITRLTLEDSGTYECRASNDPKRNDLRQNPSITWIRAQATISVLQKPRIVTSEEVIIRDSPVLPVTLQCNLTSSSHTLTYSYWTKNGVELSATRKNASNMEYRINKPRAEDSGEYHCVYHFVSAPKANATIEVKAAPDITGHKRSENKNEGQDATMYCKSVGYPHPDWIWRKKENGMPMDIVNTSGRFFIINKENYTELNIVNLQITEDPGEYECNATNAIGSASVVTVLRVRSHLAPLWPFLGILAEIIILVVIIVVYEKRKRPDEVPDDDEPAGPMKTNSTNNHKDKNLRQRNTN

SEQ ID NO: 10249 - DNA, 2369 bp, Rattus norvegicus
  misc_feature (1)..(2369): n=a, c, g or t
  ref <308>: DATABASE ACCESSION NUMBER: EMBL / X99338
  ref <309>: DATABASE ENTRY DATE: 1997-01-23
gggacgggggaaggacggagctcggccgctgctgcctccctcgttcactccctcgcgctctcgcccgccccctccctccctcccctcccttccccgggcccgggcccggaccattcgctgctcgctctccggctagggaggatgtcgggctcgtcgctccccggcgccctggccctctcgctcttgctggtctctggctcgctcctcccagggccaggcgctgctcagaacgctgggtttgtcaagtcgcccatgtcagaaactaagctcacaggggacgcctttgagctgtactgtgatgtggtcgggagtcccacgccagagatccagtggtggtacgcagaagtcaaccgggcagagtctttcagacagctgtgggacggtgctcggaagcgccgtgtcaccgtaaacaccgcctacgggtcaaacggcgtgagtgtgctgagaataacccggctcaccttggaggactctgggacttacgagtgcagggcaagcaacgaccccaaacggaatgacttgaggcaaaacccttccataacatggattcgagcccaggccaccataagcgtccttcagaaaccaagaattgtcaccagcgaagaggtcattattcgagacagcctccttcctgtcaccctgcagtgtaacctcacttccagctctcacacccttatgtacagctactggacaaagaatggggtagaactcactgccacccgtaagaatgccagcaacatggaatacaggatcaataagccaagagctgaggattcaggcgaataccactgtgtatatcattttgtcagcgctcctaaagcaaatgccaccattgaagtgaaagctgctcctgacatcactggccataaacgcagtgaaaacaaaaatgaagggcaggatgctatgatgtattgcaagtctgttggctacccccacccggaatggatgtggcgcaagaaggagaatggtgtgtttgaggagatttccaatagctctggtcgcttcttcatcatcaacaaggagaattacactgaattgaatattgtgaatctccaaatcacagaagatcctggagagtatgaatgtaatgccaccaactccattggctctgcctccgtttccacagtcctcagggtacggagccaccttgccccactttggcctttcttgggaattctggctgaaatcatcatccttgtggtgatcattgttgtgtatgagaagaggaagaggccagatgaggttcctgatgccgggccaatgaaaaccaactctaccaacaatcacaaagataaaaacttgcgccagagaaacacaaattaagtactgcttttaatctctttaggttcctgaaaaatgatggcaacatgacctgctaagttttctgcttggacctctttggtctctccctttcaagtgagcaacaccacaatgaccgtctaaagcatgccttatttagcctctcctataagggtgacctagccaggtacattttaaacaatgcttcagtgtagaaggtgtaaactattttggggcttgatgtgctgtgaatgttgctttccctccctttgttaaaatatttaaatagaagcgaaaggtcctttgaggatcagatcatgcatgcgccatttttttacttatacagctgttaaattggcaaagctctaaatgcactgctgccatctagtgatcattttgnaaagtacagcaaaacctacagatatatacagtatataaatatatatatattcatatcncngggggtgggagaaatccaaaataaagtcaaagcttgtttcatttttaagctgctgatactcattccttattatttgttgtcagatgaggaagctgcagttctggtacaaaaagatgagagtataaacttaagtctgtcattctaagggcttacttaccctataactttaagaacctggaacagtccactgaacggctagaatgaattgcagtatatatgtatgattgctttttaagtgactatttttccttttgtcaaatcatgtaaattctgaaatcttttgcactgatgtgtcgaaccttattcttgtatattcaatcaaggcaacttttataatttcccatttgttttcaatgaccctgaaatgttaatagcatggtgatattctatgcaactctagttataccttttggtttgacactgtattttcacattgatttcatgactgatgatagattttataacctgactgggttctcatgcggtactaactgtagatgcatgtacttgtgttctgtgtaattattgaagtgcaatggtgtacaaaaaaagtgaattcacctgtttttaacaataaaacattgataaaaaaaaaaaaaaaaaaaaaaaa

SEQ ID NO: 10250 - protein, 393 aa, Rattus norvegicus
  ref <308>: DATABASE ACCESSION NUMBER: SWISS-Prot / CAA67712
  ref <309>: DATABASE ENTRY DATE: 2003-02-01
MSGSSLPGALALSLLLVSGSLLPGPGAAQNAGFVKSPMSETKLTGDAFELYCDVVGSPTPEIQWWYAEVNRAESFRQLWDGARKRRVTVNTAYGSNGVSVLRITRLTLEDSGTYECRASNDPKRNDLRQNPSITWIRAQATISVLQKPRIVTSEEVIIRDSLLPVTLQCNLTSSSHTLMYSYWTKNGVELTATRKNASNMEYRINKPRAEDSGEYHCVYHFVSAPKANATIEVKAAPDITGHKRSENKNEGQDAMMYCKSVGYPHPEWMWRKKENGVFEEISNSSGRFFIINKENYTELNIVNLQITEDPGEYECNATNSIGSASVSTVLRVRSHLAPLWPFLGILAEIIILVVIIVVYEKRKRPDEVPDAGPMKTNSTNNHKDKNLRQRNTN

SEQ ID NO: 10251 - DNA, 1646 bp, Homo sapiens; identical to SEQ ID NO: 10244
  ref <308>: DATABASE ACCESSION NUMBER: EMBL / AF035287
  ref <309>: DATABASE ENTRY DATE: 2000-07-10

SEQ ID NO: 10252 - protein, 398 aa, Homo sapiens; identical to SEQ ID NO: 10248
  ref <308>: DATABASE ACCESSION NUMBER: Refseq / NP_036560
  ref <309>: DATABASE ENTRY DATE: 2001-02-03

SEQ ID NO: 10253 - DNA, 2369 bp, Rattus norvegicus; identical to SEQ ID NO: 10249
  misc_feature (1)..(2369): n=a, c, g or t
  ref <308>: DATABASE ACCESSION NUMBER: EMBL / X99338
  ref <309>: DATABASE ENTRY DATE: 1997-01-23

SEQ ID NO: 10254 - protein, 393 aa, Rattus norvegicus; identical to SEQ ID NO: 10250
  ref <308>: DATABASE ACCESSION NUMBER: SWISS-Prot / CAA67712
  ref <309>: DATABASE ENTRY DATE: 2003-02-01

SEQ ID NO: 10255 - DNA, 1646 bp, Homo sapiens; identical to SEQ ID NO: 10244
  ref <308>: DATABASE ACCESSION NUMBER: EMBL / AF035287
  ref <309>: DATABASE ENTRY DATE: 2000-07-10

SEQ ID NO: 10256 - protein, 398 aa, Homo sapiens; identical to SEQ ID NO: 10248
  ref <308>: DATABASE ACCESSION NUMBER: Refseq / NP_036560
  ref <309>: DATABASE ENTRY DATE: 2001-02-03

SEQ ID NO: 10257 - DNA, 1271 bp, Rattus norvegicus
  ref <308>: DATABASE ACCESSION NUMBER: EMBL / Y00311
  ref <309>: DATABASE ENTRY DATE: 1993-09-12
agcgtggacacagaaggttgaaggagcaacaacccctaatcaactcacagaatggagacagcagtcaatgctaagagtcccaggaatgaaaaggttttgaactgtttgtatcaaaatcctgatgcagttttcaagctgatctgcttcccttgggcaggaggcggctccatccattttgccaagtggggccaaaagattaacgactctctggaagtgcatgctgtaagactggctggaagagaaacccgacttggagaacctttcgcaaatgacatctaccagatagctgatgaaatcgtgaccgccctgttgcccatcattcaggataaagcttttgcgttttttggccacagttttggatcctacattgctcttattactgctctgctcctaaaggagaaatacaaaatggagccgctgcatatttttgtatccggtgcatccgcccctcactcaacatcccggcctcaagttcctgatcttaacgaattgacagaagaacaagtcagacatcaccttctggatttcggaggcacgcccaagcatctcatagaagaccaggatgttctgaggatgttcattcctttgctgaaggcagatgctggcgttgtgaaaaaattcatctttgacaagccctccaaagctcttctctctctggacataacgggcttccttggatctgaagatacaataaaggacatagaaggctggcaagacctaaccagtgggaagtttgatgtccacatgctgccaggcgaccacttttatctgatgaagcccgacaacgagaactttatcaagaactacatagccaagtgcttggaactctcgtcactcacttgactacttttagatgagctttctttggggctgtggatatgcagacggttcaaaagctgctcctctgggtccagcttttagttcttagaggttggaaaggtgcatattaatgaatttcttcgtggagcatttatctctctggggaaaggacacggctgaagaggcgcacaggcactattgggagctaacagaggggagaggggggtggttttctttggggggatgttgccctcagtaggtacccatgctccagtaaatgacactacacccttgtggcacatgcaggcagctctaatcagactcagtgggaagttgggaggcatacatgttgggggacatctgtcacggggcttggaaagacaagtgagggtctgatcaaaacctgctgtttacattttcaaagaataaataaaaaatattgctaaaggaag

SEQ ID NO: 10258 - protein, 263 aa, Rattus norvegicus
  ref <308>: DATABASE ACCESSION NUMBER: SWISS-Prot / P08635
  ref <309>: DATABASE ENTRY DATE: 1996-02-01
METAVNAKSPRNEKVLNCLYQNPDAVFKLICFPWAGGGSIHFAKWGQKINDSLEVHAVRLAGRETRLGEPFANDIYQIADEIVTALLPIIQDKAFAFFGHSFGSYIALITALLLKEKYKMEPLHIFVSGASAPHSTSRPQVPDLNELTEEQVRHHLLDFGGTPKHLIEDQDVLRMFIPLLKADAGVVKKFIFDKPSKALLSLDITGFLGSEDTIKDIEGWQDLTSGKFDVHMLPGDHFYLMKPDNENFIKNYIAKCLELSSLT

SEQ ID NO: 10259 - DNA, 1765 bp, Homo sapiens
  ref <308>: DATABASE ACCESSION NUMBER: EMBL / AK001968
  ref <309>: DATABASE ENTRY DATE: 2002-08-06
agagttcatctcaaagcctggcaaggattggagaggtcaataagagtcagcgcctttaaaaagaaatctactcactcttctgtgtgcataaggccgagcagaggttcttcgtctcaagaggaactgacttctgttgagcactcaacacgccacagagaccagccatcttgcaacctcacctcacagcatggagagaggagaccaacctaagagaaccaggaatgaaaacattttcaactgcttatacaaaaaccctgaggcaacttttaagctgatttgctttccctggatgggaggtggctccactcattttgccaaatggggccaagatactcatgatttgctggaagagacagcatctcaccatgttgccaaggctggtctcaaactccggcgctcaagtgatcctcctgcttcagcctacccatgtgctggcgtgagccaccgtaggcgtgagccaccgtgcctggccaaaattcttggtctattctggattctaattttttttatgcactccttaaggcttcctggaagagaaagcagagttgaagaacctcttgaaaatgacatctcccagttagttgatgaagttgtttgtgctctgcagccagtcatccaggataaaccatttgcattttttggccacagtatgggatcctacattgcttttaggactgcactaggtctaaaagaaaacaatcaaccagaaccattgcatttatttttgtcaagtgcaactcctgtacattcaaaggcctggcatcgcattcccaaagatgatgaattgtcagaagaacaaataagtcattaccttatggaatttggaggcacccccaagcattttgctgaagccaaggaatttgtgaaacaatgtagtcccatcataagggcagatctgaacattgttagaagttgcacctctaacgtaccatctaaggctgttctttcctgtgacttgacatgttttgttggatctgaagacatagcaaaggacatggaagcctggaaagatgtaaccagtggaaatgctaaaatttaccagcttccagggggtcacttttatcttctggatcctgcgaacgagaaattaatcaagaactacataatcaagtgtctagaagtatcatcgatatccaatttttagatattttccctttcacttttaaaataatcaaagtaatatcatactcttctcagttattcagatatagctcagttttattcagattggaaattacacattttctactgtcagggagattcgttacataaatatatttacgtatctggggacaaaggtcaagccagtaaagaatacttctggcagcactttgggaggccaaggcgggcggatcacgaggtcaggagatcgagaccgtcctggctaacaccgtgaaaccccatctctactaaaaatacacaaaattagctgggcgtggtggtgggcacctgtagtcccagctactcgggaggctgaggcaggagaatggtgtgaacctgggaggtggagcttgcagtgaaccgagatcgctccactgcactccagcctgggtgacagatccagactctgtctcaaaaaaaaaaaaaaaaaatacttctggcagagtcttttatcttcctattaaaatctcacttgattctcctttatgggaagtttgtcgacaaaattcatgattagtaaattatccattttttccttcagttagtttaatggtgaagatgattaacaggggaaatgcttgaagtaaatgattgtttcaatggc

SEQ ID NO: 10260 - protein, 319 aa, Homo sapiens
  misc_feature (1)..(319): Xaa=Unknown amino acid
MERGDQPKRTRNENIFNCLYKNPEATFKLICFPWMGGGSTHFAKWGQDTHDLLEETASHHVAKAGLKLRRSSDPPASAYPCAGVSHRRREPPCLAKILGLFWILIFFMHSLRLPGRESRVEEPLENDISQLVDEVVCALQPVIQDKPFAFFGHSMGSYIAFRTALGLKENNQPEPLHLFLSSATPVHSKAWHRIPKDDELSEEQISHYLMEFGGTPKHFAEAKEFVKQCSPIIRADLNIVRSCTSNVPSKAVLSCDLTCFVGSEDIAKDMEAWKDVTSGNAKIYQLPGGHFYLLDPANEKLIKNYIIKCLEVSSISNFX

SEQ ID NO: 10261 - DNA, 3628 bp, Rattus norvegicus
  ref <308>: DATABASE ACCESSION NUMBER: EMBL / Y07704
  ref <309>: DATABASE ENTRY DATE: 2000-03-23
tggggatgctagtgcctactgcgctggctgctcggctgctgagcctgttccagcaacagctgggttccctctggagtggcctggccatgctgttctgctggctgagaatagcattggggtggccagatcctggaaagggacagccacgggtccggggtgagcccaaggagactcaggagacccacgaagatccaggcagtgctcagcccacaacccccgttagtgtcaactaccacttcacgcgtcagtgcaactacaaatgtggcttctgcttccacacggccaagacatccttcgtgctgcccctggaggaggccaagcgaggactgcttctgctcaaacaggctggtatggagaagatcaacttttcaggaggagaacccttcctacaggacaggggtgaatacttgggcaagctcgtgagattctgcaaggaggagctagccctgccctctgtgagcatagtgagcaatggcagccttatccgagagagatggttcaaggactatggagactatttggacattcttgctatctcctgtgacagctttgatgagcaggttaatgttctcattggtcgtggccaagggaaaaagaaccatgtggaaaaccttcaaaagctgcggaagtggtgcagggattacaaggtggctttcaagatcaattccgtcattaatcgcttcaacgtggacgaagatatgaatgagcacatcaaggcgctgagccctgtccgctggaaggttttccaatgcctcctgattgagggtgagaactcaggagaagatgccctgagggaagcagaaagatttcttataagcaatgaagaatttgaagcattcttacagcgtcacaaagatgtgtcctgcttggtgcctgaatctaaccagaagatgaaagactcctaccttatcctggatgaatatatgcgctttttgaactgtaccggtggccggaaggacccttccaggtccatcctggatgttggcgtggaggaagcgatcaaattcagtgggtttgatgagaagatgtttctgaagcgcggggggaagtatgtatggagtaaggctgacctgaagctagactggtgaggtgagattggacggagactctaaccagctacgaggagtccacgagcagccgctcgccaccacgcacatctggctgtctacggactgttgctactgagaatgcactctatgttctttctttcagtttgactgaactaagaaaggagtaaaaccattctgtgaacccttatacagccgataagggtcctccacaggggaaggagttcagttcacagaggaacaaggtccagcgatctcaaagaactcacattttatttgtattcgaatttttgtatggatcgttactgtgaatcccatgtttccttttccctttctgttcccccatgagaaactgggttattttctgctaactatgccagttttgtcaacaggaaggatcacaaaacacaccctgcgattactgctgactgttctaatgcttttctgctttggaatctcggactttttgctcagaaatatagaatcaagaagtgtgttatagagccgtacgtgagaaccttactcttttgcaaggagcatatggaaggaggtacttctgaggacggtgtgttcatggcctcagcctctgctgctgctgctgcttcaaggatggctgttctatatcgtaccaattccttcaaggttctggacaaagccaaggtacactttacctttcatggcatggccgtgaagatggcactgacagccgcaaccaccccagcactgaggctgcctgagtctgtcaggctaaaaggttgtcccacttttctgaaaagctacaagggctcttctgcacatccagcagaatcatgacaggatgggcatggaggactcttcaggagtatgaaatgtggctgctgctccttaccatatttctcatgaaactctgaaataagacctagtagtctaggtcaccatgagaaaataatttcttctctacatcaaataagcaaaagagagaacatgaactagcccaaatcttcttcctgtggaagcattgcatgagtttattcaacctagacagcctcactgcttggaaaataattccctggaaattaaataaataccatggaaaagaaattaaactcctctgcaatcccactgtggccactagagggcaccaggaagtcagacttcattgtctcagagacttttcttcagtctttttttagaatttggtgaattttaattctgttccttatctgttttgtctttgttttttgttttggtgcctattactaaaattaatactaaacattttccaaggaactggaattttggccatttacaaaaggtcttcattctttagtgaggtcactataattcaactaagacatactctgtctcattaaaaataggtcaggttttcctgtgttttctgtcttgtttggttgtgtgtgtgtgtttacctatttttgcttgaatatagatataactatgtatcccaggctagcctggaactcatgatacctctgccttaacctccccctcttaagtgcccaggaattacccaactcctgtacagagatttttaagagaagtttgagtcacattcccccctgcagattgtgatttttttttttaagttaagtcctgtgtacatagttcacatgggaaaccatgacatcccagaggacatgggcagacacccacttggtcacacgacagagggaagctgcatgtttctttccctaattaaagtagagcatgaagaaagtatgattggaaagtgagccatcatttacatgtacccccaaccccttgtgcatgcactggcggtgggagatctctgtgcttaaaatattgaaaagtcccctttccttaaagggaaaaattacgatattttactatcgtagtacaaatcaaacttggattagatcatacattggtttgctttttcagtgttaaatktgggtgttcattttgtaaagcatacgctccctgctggggaaacaaggagtgatctagttgacatttgttaagtgtgaccagcagataccttgtgtcccatgattgatttatgcagagcagtaatactgggaagggggatttacttaagaacatcgacgggtaggacatccaacactgatttcaaagttttggcttctttattataatgtgttcggcggtaaaaaaaagtcatgggttgttttctttgaagctgaaagtctcatggtgttatttacctaaattatctgaaaaatttaaaaggggcccaggtttcattctgcgttggagtttgggggtctaattgttgcataaataaacaggcaaccaatcatcagaggttgactcctcccatcaataattcagctcgtgttttacccttttgatggactgatgttgtttcataagctattagtagtccaagaacaatcatgcaggcctcatgtgaatgtgttcagatgaggtttgatgttcgggatacatgtgcatgtatctccctgtagaatgacactgtattttgaggcattgctctagtgtatggaaacgtgatctgtgtattaaaatgttttatgcatgacctcaaaaaaaaaaaaaaaaaaaaaaaaaaaaaaaga

SEQ ID NO: 10262 - protein, 360 aa, Rattus norvegicus
  ref <308>: DATABASE ACCESSION NUMBER: SWISS-Prot / CAA68971
  ref <309>: DATABASE ENTRY DATE: 2003-02-01
MLVPTALAARLLSLFQQQLGSLWSGLAMLFCWLRIALGWPDPGKGQPRVRGEPKETQETHEDPGSAQPTTPVSVNYHFTRQCNYKCGFCFHTAKTSFVLPLEEAKRGLLLLKQAGMEKINFSGGEPFLQDRGEYLGKLVRFCKEELALPSVSIVSNGSLIRERWFKDYGDYLDILAISCDSFDEQVNVLIGRGQGKKNHVENLQKLRKWCRDYKVAFKINSVINRFNVDEDMNEHIKALSPVRWKVFQCLLIEGENSGEDALREAERFLISNEEFEAFLQRHKDVSCLVPESNQKMKDSYLILDEYMRFLNCTGGRKDPSRSILDVGVEEAIKFSGFDEKMFLKRGGKYVWSKADLKLDW

SEQ ID NO: 10263 - DNA, 1442 bp, Homo sapiens
  ref <308>: DATABASE ACCESSION NUMBER: EMBL / BC017969
  ref <309>: DATABASE ENTRY DATE: 2002-09-02
gctctgctccaggcatctgccacaatgtgggtgcttacacctgctgcttttgctgggaagctcttgagtgtgttcaggcaacctctgagctctctgtggaggagcctggtcccgctgttctgctggctgagggcaaccttctggctgcgagctaccaagaggagaaagcagcagctggtcctgagagggccagatgagaccaaagaggaggaagaggaccctcctctgcccaccaccccaaccagcgtcaactatcacttcactcgccagtgcaactacaaatgcggcttctgtttccacacagccaaaacatcctttgtgctgccccttgaggaagcaaagagaggattgcttttgcttaaggaagctggtatggagaagatcaacttttcaggtggagagccatttcttcaagaccggggagaatacctgggcaagttggtgaggttctgcaaagtagagttgcggctgcccagcgtgagcatcgtgagcaatggaagcctgatccgggagaggtggttccagaattatggtgagtatttggacattctcgctatctcctgtgacagctttgacgaggaagtcaatgtccttattggccgtggccaaggaaagaagaaccatgtggaaaaccttcaaaagctgaggaggtggtgtagggattatagagtcgctttcaagataaattctgtcattaatcgtttcaacgtggaagaggacatgacggaacagatcaaagcactaaaccctgtccgctggaaagtgttccagtgcctcttaattgagggtgagaattgtggagaagatgctctaagagaagcagaaagatttgttattggtgatgaagaatttgaaagattcttggagcgccacaaagaagtgtcctgcttggtgcctgaatctaaccagaagatgaaagactcctaccttattctggatgaatatatgcgctttctgaactgtagaaagggacggaaggacccttccaagtccatcctggatgttggtgtagaagaagctataaaattcagtggatttgatgaaaagatgtttctgaagcgaggaggaaaatacatatggagtaaggctgatctgaagctggattggtagagcggaaagtggaacgagacttcaacacaccagtgggaaaactcctagagtaactgccattgtctgcaatactatcccgttggtatttcccagtggctgaaaacctgattttctgctgcacgtggcatctgattacctgtggtcactgaacacacgaataacttggatagcaaatcctgagacaatggaaaaccattaactttacttcattggcttataaccttgttgttattgaaacagcacttctgtttttgagtttgttttagctaaaaagaaggaatacacacaggaataatgaccccaaaaaaaaaaaaaaaaaaaaaaaaaaaaaa

SEQ ID NO: 10264 - protein, 362 aa, Homo sapiens
  misc_feature (1)..(362): Xaa=Unknown amino acid
MWVLTPAAFAGKLLSVFRQPLSSLWRSLVPLFCWLRATFWLRATKRRKQQLVLRGPDETKEEEEDPPLPTTPTSVNYHFTRQCNYKCGFCFHTAKTSFVLPLEEAKRGLLLLKEAGMEKINFSGGEPFLQDRGEYLGKLVRFCKVELRLPSVSIVSNGSLIRERWFQNYGEYLDILAISCDSFDEEVNVLIGRGQGKKNHVENLQKLRRWCRDYRVAFKINSVINRFNVEEDMTEQIKALNPVRWKVFQCLLIEGENCGEDALREAERFVIGDEEFERFLERHKEVSCLVPESNQKMKDSYLILDEYMRFLNCRKGRKDPSKSILDVGVEEAIKFSGFDEKMFLKRGGKYIWSKADLKLDWX

SEQ ID NO: 10265 - DNA, 3628 bp, Rattus norvegicus; identical to SEQ ID NO: 10261
  ref <308>: DATABASE ACCESSION NUMBER: EMBL / Y07704
  ref <309>: DATABASE ENTRY DATE: 2000-03-23

SEQ ID NO: 10266 - protein, 360 aa, Rattus norvegicus; identical to SEQ ID NO: 10262
  ref <308>: DATABASE ACCESSION NUMBER: SWISS-Prot / CAA68971
  ref <309>: DATABASE ENTRY DATE: 2003-02-01

SEQ ID NO: 10267 - DNA, 1442 bp, Homo sapiens; identical to SEQ ID NO: 10263
  ref <308>: DATABASE ACCESSION NUMBER: EMBL / BC017969
  ref <309>: DATABASE ENTRY DATE: 2002-09-02

SEQ ID NO: 10268 - protein, 362 aa, Homo sapiens; identical to SEQ ID NO: 10264
  misc_feature (1)..(362): Xaa=Unknown amino acid

SEQ ID NO: 10269 - DNA, 3628 bp, Rattus norvegicus; identical to SEQ ID NO: 10261
  ref <308>: DATABASE ACCESSION NUMBER: EMBL / Y07704
  ref <309>: DATABASE ENTRY DATE: 2000-03-23

SEQ ID NO: 10270 - protein, 360 aa, Rattus norvegicus; identical to SEQ ID NO: 10262
  ref <308>: DATABASE ACCESSION NUMBER: SWISS-Prot / CAA68971
  ref <309>: DATABASE ENTRY DATE: 2003-02-01

SEQ ID NO: 10271 - DNA, 1442 bp, Homo sapiens; identical to SEQ ID NO: 10263
  ref <308>: DATABASE ACCESSION NUMBER: EMBL / BC017969
  ref <309>: DATABASE ENTRY DATE: 2002-09-02

SEQ ID NO: 10272 - protein, 362 aa, Homo sapiens; identical to SEQ ID NO: 10264
  misc_feature (1)..(362): Xaa=Unknown amino acid

SEQ ID NO: 10273 - DNA, 3628 bp, Rattus norvegicus; identical to SEQ ID NO: 10261
  ref <308>: DATABASE ACCESSION NUMBER: EMBL / Y07704
  ref <309>: DATABASE ENTRY DATE: 2000-03-23

SEQ ID NO: 10274 - protein, 360 aa, Rattus norvegicus; identical to SEQ ID NO: 10262
  ref <308>: DATABASE ACCESSION NUMBER: SWISS-Prot / CAA68971
  ref <309>: DATABASE ENTRY DATE: 2003-02-01

SEQ ID NO: 10275 - DNA, 1442 bp, Homo sapiens; identical to SEQ ID NO: 10263
  ref <308>: DATABASE ACCESSION NUMBER: EMBL / BC017969
  ref <309>: DATABASE ENTRY DATE: 2002-09-02

SEQ ID NO: 10276 - protein, 362 aa, Homo sapiens; identical to SEQ ID NO: 10264
  misc_feature (1)..(362): Xaa=Unknown amino acid

SEQ ID NO: 10277 - DNA, 1711 bp, Rattus norvegicus
  ref <308>: DATABASE ACCESSION NUMBER: EMBL / Y09333
  ref <309>: DATABASE ENTRY DATE: 1998-02-03
cgggcctacggctcagtctaaggactgcaaataggcagctggccactagaggatctctaacttttcctacgaaactgagggctgaagtcaaagatacaaaatggtggcctcgtctttcgctgtcctgagagcaagcaggttgtgccaatggggttggaagagctggacgcagctgtcaggtcctccgccgctcagcaccggtggccggaccacttttgcgcggacaaatgctacgctgagcctggagcccgggagccgcagctgctgggacgagccgttgagcatcaccgtgcgcggcctggcccccgagcagcccgtcacgctgcgcgcggccctgcgtgacgagaagggcgcgctcttccgagcccacgcgcgctaccgcgccgacgccggtggtgagctggacctggcgcgcgctcccgcgctgggcggcagcttcacggggctcgagcccatggggctgatctgggccatggagcccgaacggcctctctggcgcctggtcaagcgcgacgtgcagaagccttatgtggtggagctggaggtgctggacggacacgagcccgacggcggtcagcggctggcacaggcagtgcacgagcgtcacttcatggctccaggggtgcggcgcgtgcccgtgcgcgacgggcgggtgcgcgccacgctcttcctgcccccagaacctgggccctttcctgaaatcatagacctttttggagttggaggcggccttctggagtaccgggcgagtctgctggctgggaagggttttgccgtcatggctctggcttattacaactacgacgacctccccaagaccatggaaaccatgcgcattgagtactttgaagaagccgtgaactacctgcgtggccaccctgaggtaaaaggaccaggaattgggctgcttgggatttccaaagggggtgaacttggccttgctatggcctccttcctgaagggcatcacggctgctgttgtcatcaatggctccgtggctgctgttgggaacaccgtatgctacaaggatgagactataccccctgtgtcccttctgagagacaaagtcaaaatgaccaaagatggtctcttggatgtcgtggaagctctgcaaagccctttggtagacaagaagagcttcatccctgtggaaaggtctgacacgaccttcctgttcctcgttggtcaggatgaccacaactggaagagcgagttctatgccagagaggcctccaaacgcttgcaggcccacgggaaagagaagccccagatcatctgctacccagaagcagggcactatatcgagcctccttacttcccactgtgcagcgctggcatgcacctcttggtgggtgctaacatcacctttggaggggagcctaagcctcactctgtggcccagttggatgcatggcagcaactccagactttcttccacaaacagttgagtggtaagagttaggaggtgccccctaaaatataacctgttatgtggtggtttggggaaaaacccaaatatcagaatgccacttcagtttagttcatttgaacacatactaatttttttaagtttctttcttccttcctttctttctttctgttttttttttttgttgttgttgttgttgtttgtttgtttgtttgagacagggtttgtctgtttacccctggctggcctggaacttgctttgtagaccagaggctaggcctg

SEQ ID NO: 10278 - protein, 453 aa, Rattus norvegicus
  ref <308>: DATABASE ACCESSION NUMBER: SWISS-Prot / O55171
  ref <309>: DATABASE ENTRY DATE: 2001-10-16
MVASSFAVLRASRLCQWGWKSWTQLSGPPPLSTGGRTTFARTNATLSLEPGSRSCWDEPLSITVRGLAPEQPVTLRAALRDEKGALFRAHARYRADAGGELDLARAPALGGSFTGLEPMGLIWAMEPERPLWRLVKRDVQKPYVVELEVLDGHEPDGGQRLAQAVHERHFMAPGVRRVPVRDGRVRATLFLPPEPGPFPEIIDLFGVGGGLLEYRASLLAGKGFAVMALAYYNYDDLPKTMETMRIEYFEEAVNYLRGHPEVKGPGIGLLGISKGGELGLAMASFLKGITAAVVINGSVAAVGNTVCYKDETIPPVSLLRDKVKMTKDGLLDVVEALQSPLVDKKSFIPVERSDTTFLFLVGQDDHNWKSEFYAREASKRLQAHGKEKPQIICYPEAGHYIEPPYFPLCSAGMHLLVGANITFGGEPKPHSVAQLDAWQQLQTFFHKQLSGKS

SEQ ID NO: 10279 - DNA, 1143 bp, Homo sapiens
  ref <308>: DATABASE ACCESSION NUMBER: EMBL / L40401
  ref <309>: DATABASE ENTRY DATE: 1997-02-12
cccccgggctgcaggaattcctgaattcaaaatggcctcatctcctgctgtccttcgagcgtcccggctgtaccaatggagcctgaagagttcggcgcagttcctggggtctccacagctgaggcagaacctgggccctttcctgggattgtggacatgttcgggaactggaggtggcctgctggagtatcgggctagtctgctggctgggaagggttttgctgtgatggctctggcttattataactatgaagacctccccaagaccatggagacgctccatctggagtactttgaagaagccatgaactacttgctcagtcatcccgaggtaaaaggtccaggagttgggctgcttggaatttccaaagggggtgagctctgcctttccatggcctctttcctgaagggcatcacggctgctgtcgtcatcaacggctctgtggccaatgttgggggaaccttacactacaagggcgagaccctgccccctgtgggcgtcaacagaaatcgcatcaaggtgaccaaagatggctatgcagacattgtggatgtcctgaacagccctttggaaggacctgaccagaagagcttcattcctgtggaaagggcagagagcaccttcctgttcctggtaggtcaggatgaccacaactggaagagtgagttctatgctaatgaggcctgtaaacgcttgcaggcccatgggaggagaaagccccagatcatctgttacccagagacagggcactatattgagcctccttacttccccctgtgtcgggcttccctgcatgccttggtgggcagtcctattatctggggaggggagcccagggctcatgccatggctcaggtggatgcttggaaacaactccagactttcttccacaaacacttgggtggccacgaggggacaatcccatcaaaagtgtaaattttatttgatcatgtggcctctctgttgctaatctctcctggaaacatctgccacatttagtgtgtgtatgtgtattcattcttttgtttttaataactaaagttttttcccctcattattaaaatgaatttaccagtaaaaaaaaaaaaaaaaaaaaaaaaaaaaaaggaattcgatatcaagcttatcgataccgtcgacct

SEQ ID NO: 10280 - protein, 421 aa, Homo sapiens
  ref <308>: DATABASE ACCESSION NUMBER: SWISS-Prot / P49753
  ref <309>: DATABASE ENTRY DATE: 2002-06-15
MAATLILEPAGRCCWDEPVRIAVRGLAPEQPVTLRASLRDEKGALFQAHARYRADTLGELDLERAPALGGSFAGLEPMGLLWALEPEKPLVRLVKRDVRTPLAVELEVLDGHDPDPGRLLCQTRHERYFLPPGVRREPVRVGRVRGTLFLPPEPGPFPGIVDMFGTGGGLLEYRASLLAGKGFAVMALAYYNYEDLPKTMETLHLEYFEEAMNYLLSHPEVKGPGVGLLGISKGGELCLSMASFLKGITAAVVINGSVANVGGTLRYKGETLPPVGVNRNRIKVTKDGYADIVDVLNSPLEGPDQKSFIPVERAESTFLFLVGQDDHNWKSEFYANEACKRLQAHGRRKPQIICYPETGHYIEPPYFPLCRASLHALVGSPIIWGGEPRAHAMAQVDAWKQLQTFFHKHLGGREGTIPSKV

SEQ ID NO: 10281 - DNA, 1711 bp, Rattus norvegicus; identical to SEQ ID NO: 10277
  ref <308>: DATABASE ACCESSION NUMBER: EMBL / Y09333
  ref <309>: DATABASE ENTRY DATE: 1998-02-03

SEQ ID NO: 10282 - protein, 453 aa, Rattus norvegicus; identical to SEQ ID NO: 10278
  ref <308>: DATABASE ACCESSION NUMBER: SWISS-Prot / O55171
  ref <309>: DATABASE ENTRY DATE: 2001-10-16

SEQ ID NO: 10283 - DNA, 1143 bp, Homo sapiens; identical to SEQ ID NO: 10279
  ref <308>: DATABASE ACCESSION NUMBER: EMBL / L40401
  ref <309>: DATABASE ENTRY DATE: 1997-02-12

SEQ ID NO: 10284 - protein, 421 aa, Homo sapiens; identical to SEQ ID NO: 10280
  ref <308>: DATABASE ACCESSION NUMBER: SWISS-Prot / P49753
  ref <309>: DATABASE ENTRY DATE: 2002-06-15

SEQ ID NO: 10285 - DNA, 2711 bp, Rattus norvegicus
  ref <308>: DATABASE ACCESSION NUMBER: EMBL / Y09507
  ref <309>: DATABASE ENTRY DATE: 2001-02-26
ccgcctcccaccccgcttctggacttgcccctttcttctgcgcgtgaggacagagccggcgcttaggccggagcgagcccaggggctgccggccggtgaagacaccgcgggcaccgattcgccatggagggcgccggcggcgagaacgagaagaaaaagatgagttccgaacgtcgaaaagaaaagtctagggatgcagcacgatctcggcgaagcaaagagtctgaagttttttatgagcttgctcatcagttgccacttccccacaacgtgagctcccatcttgataaagcttctgttatgaggctcaccatcagttacttacgtgtgaggaaacttctagatgctggtgatcttgacattgaagatgaaatgaaagcacagatgaactgcttttatctgaaagccccggatggctttgttatggtgctaacagatgatggtgacatgatttacatttctgataacgtgaacaaatacatggggttgactcagtttgaactaactggacacagtgtgtttgattttacccatccatgtgaccatgaggaaatgagagaaatgcttacacacagaaatggcccagtgagaaaggggaaagaacaaaacacgcagcgaagcttttttctcagaatgaaatgtaccctaacaagccgggggaggacgatgaacatcaagtcagcaacgtggaaggtgctgcactgcacaggccacattcatgtgtatgataccagcagtaaccagccgcagtgtggctacaagaaaccgcctatgacgtgcttggtgctgatttgtgaacccattcctcatccatcaaacattgaaattcctttagacagcaagacatttctcagtcgacacagcctcgatatgaaattttcttactgtgatgaaaggattactgagttgatgggttatgagccagaagaacttttgggccgttcaatttatgaatattatcatgctttggactctgatcatctgaccaaaactcatcatgacatgtttactaaaggacaagtcaccacaggacagtacaggatgcttgcaaaaagaggtggatatgtctgggttgagactcaagcaactgttatatataatacgaaggactctcagccacagtgcattgtgtgtgtgaattatgttgtaagtggtattattcagcacgacttgattttctcccttcaacaaacagaatctgtcctcaaaccagttgaatcttcagatatgaaaatgacccagctgttcactaaagtggaatctgaggacacgagctgcctcttcgacaagcttaagaaagagcccgatgccctgactctgctagctccagcggctggggacacgatcatatcactggacttcggcagcgatgacacggaaactgaagaccaacaacttgaagatgtcccgttgtacaatgatgtaatgttcccctcttctaatgagaaattaaatataaatctggcaatgtctccattacctgcctctgaaactccaaagccacttcgaagtagtgctgatcctgcactgaaccaagaggttgcattgaagttagagtcaagcccagagtcactgggactttcttttaccatgccccagattcaagatcagccagcaagtccttctgatggaagcactagacaaagctcacctgagcctaacagtcccagtgagtactgctttgatgtggacagcgatatggtcaatgtattcaagttggaactggtggaaaaactgtttgctgaagacacagaagcgaagaatccattttcagctcaggacactgatttagacttggaaatgctggctccctatatcccaatggatgatgatttccagttacgttcctttgatcagttgtcaccattagagagcaattctccaagccctccgagtgtgagcacagttacaggattccagcagacccagttacagaaacctaccatcactgtcactgccgcaactgccaccaccgccaccaccactgatgaatcaaaagcagtgacgaaggacaatatagaagacattaaaatactgattgcatctccaccttctacccaagtacctcaagaaatgaccactgctaaggcatcagcatacagtggtactcacagtcggacagcctcaccagacagagcaggaaagagagtcatagaaaaaacagacaaagctcatccaaggagccttaacttatctgtcactttgaatcaaagaaatactgttcctgaagaagaattaaacccaaggacaatagctttgcagaatgctcagaggaagcgaaaaatggaacatgatggctccctttttcaagcagcaggaattggaacgttactgcagcaaccaggtgaccgtgcccctactatgtcgctttcttggaaacgagtgaaaggatacatatctagtgaacaggatggaatggagcagaagacaatttttttaataccctctgatttagcatgtagactgctggggcagtcaatggatgagagtggattaccacagctgaccagttacgattgtgaagttaatgctcccatacaaggcagcagaaacctactgcagggtgaagaattactcagagctttggatcaagttaactgagcttttcctaatctcactcctttgattgttaatttttgtgttcagctgttgttgttgtctgtggggtttcgtttctgttggttgttttggacactggtggctcactacct

SEQ ID NO: 10286 - protein, 825 aa, Rattus norvegicus
  ref <308>: DATABASE ACCESSION NUMBER: SWISS-Prot / CAA70701
  ref <309>: DATABASE ENTRY DATE: 2003-02-01
MEGAGGENEKKKMSSERRKEKSRDAARSRRSKESEVFYELAHQLPLPHNVSSHLDKASVMRLTISYLRVRKLLDAGDLDIEDEMKAQMNCFYLKAPDGFVMVLTDDGDMIYISDNVNKYMGLTQFELTGHSVFDFTHPCDHEEMREMLTHRNGPVRKGKEQNTQRSFFLRMKCTLTSRGRTMNIKSATWKVLHCTGHIHVYDTSSNQPQCGYKKPPMTCLVLICEPIPHPSNIEIPLDSKTFLSRHSLDMKFSYCDERITELMGYEPEELLGRSIYEYYHALDSDHLTKTHHDMFTKGQVTTGQYRMLAKRGGYVWVETQATVIYNTKDSQPQCIVCVNYVVSGIIQHDLIFSLQQTESVLKPVESSDMKMTQLFTKVESEDTSCLFDKLKKEPDALTLLAPAAGDTIISLDFGSDDTETEDQQLEDVPLYNDVMFPSSNEKLNINLAMSPLPASETPKPLRSSADPALNQEVALKLESSPESLGLSFTMPQIQDQPASPSDGSTRQSSPEPNSPSEYCFDVDSDMVNVFKLELVEKLFAEDTEAKNPFSAQDTDLDLEMLAPYIPMDDDFQLRSFDQLSPLESNSPSPPSVSTVTGFQQTQLQKPTITVTAATATTATTTDESKAVTKDNIEDIKILIASPPSTQVPQEMTTAKASAYSGTHSRTASPDRAGKRVIEKTDKAHPRSLNLSVTLNQRNTVPEEELNPRTIALQNAQRKRKMEHDGSLFQAAGIGTLLQQPGDRAPTMSLSWKRVKGYISSEQDGMEQKTIFLIPSDLACRLLGQSMDESGLPQLTSYDCEVNAPIQGSRNLLQGEELLRALDQVN

SEQ ID NO: 10287 - DNA, 3551 bp, Homo sapiens
  ref <308>: DATABASE ACCESSION NUMBER: EMBL / AB073325
  ref <309>: DATABASE ENTRY DATE: 2001-10-25
gtgaagacatcgcggggaccgattcaccatggagggcgccggcggcgcgaacgacaagaaaaagataagttctgaacgtcgaaaagaaaagtctcgagatgcagccagatctcggcgaagtaaagaatctgaagttttttatgagcttgctcatcagttgccacttccacataatgtgagttcgcatcttgataaggcctctgtgatgaggcttaccatcagctatttgcgtgtgaggaaacttctggatgctggtgatttggatattgaagatgacatgaaagcacagatgaattgcttttatttgaaagccttggatggttttgttatggttctcacagatgatggtgacatgatttacatttctgataatgtgaacaaatacatgggattaactcagtttgaactaactggacacagtgtgtttgattttactcatccatgtgaccatgaggaaatgagagaaatgcttacacacagaaatggccttgtgaaaaagggtaaagaacaaaacacacagcgaagcttttttctcagaatgaagtgtaccctaactagccgaggaagaactatgaacataaagtctgcaacatggaaggtattgcactgcacaggccacattcacgtatatgataccaacagtaaccaacctcagtgtgggtataagaaaccacctatgacctgcttggtgctgatttgtgaacccattcctcacccatcaaatattgaaattcctttagatagcaagactttcctcagtcgacacagcctggatatgaaattttcttattgtgatgaaagaattaccgaattgatgggatatgagccagaagaacttttaggccgctcaatttatgaatattatcatgctttggactctgatcatctgaccaaaactcatcatgatatgtttactaaaggacaagtcaccacaggacagtacaggatgcttgccaaaagaggtggatatgtctgggttgaaactcaagcaactgtcatatataacaccaagaattctcaaccacagtgcattgtatgtgtgaattacgttgtgagtggtattattcagcacgacttgattttctcccttcaacaaacagaatgtgtccttaaaccggttgaatcttcagatatgaaaatgactcagctattcaccaaagttgaatcagaagatacaagtagcctctttgacaaacttaagaaggaacctgatgctttaactttgctggccccagccgctggagacacaatcatatctttagattttggcagcaacgacacagaaactgatgaccagcaacttgaggaagtaccattatataatgatgtaatgctcccctcacccaacgaaaaattacagaatataaatttggcaatgtctccattacccaccgctgaaacgccaaagccacttcgaagtagtgctgaccctgcactcaatcaagaagttgcattaaaattagaaccaaatccagagtcactggaactttcttttaccatgccccagattcaggatcagacacctagtccttccgatggaagcactagacaaagttcacctgagcctaatagtcccagtgaatattgtttttatgtggatagtgatatggtcaatgaattcaagttggaattggtagaaaaactttttgctgaagacacagaagcaaagaacccattttctactcaggacacagatttagacttggagatgttagctccctatatcccaatggatgatgacttccagttacgttccttcgatcagttgtcaccattagaaagcagttccgcaagccctgaaagcgcaagtcctcaaagcacagttacagtattccagcagactcaaatacaagaacctactgctaatgccaccactaccactgccaccactgatgaattaaaaacagtgacaaaagaccgtatggaagacattaaaatattgattgcatctccatctcctacccacatacataaagaaactactagtgccacatcatcaccatatagagatactcaaagtcggacagcctcaccaaacagagcaggaaaaggagtcatagaacagacagaaaaatctcatccaagaagccctaacgtgttatctgtcgctttgagtcaaagaactacagttcctgaggaagaactaaatccaaagatactagctttgcagaatgctcagagaaagcgaaaaatggaacatgatggttcactttttcaagcagtaggaattatttagcatgtagactgctggggcaatcaatggatgaaagtggattaccacagctgaccagttatgattgtgaagttaatgctcctatacaaggcagcagaaacctactgcagggtgaagaattactcagagctttggatcaagttaactgagctttttcttaatttcattcctttttttggacactggtggctcactacctaaagcagtctatttatattttctacatctaattttagaagcctggctacaatactgcacaaacttggttagttcaatttttgatcccctttctacttaatttacattaatgctcttttttagtatgttctttaatgctggatcacagacagctcattttctcagttttttggtatttaaaccattgcattgcagtagcatcattttaaaaaatgcacctttttatttatttatttttggctagggagtttatccctttttcgaattatttttaagaagatgccaatataatttttgtaagaaggcagtaacctttcatcatgatcataggcagttgaaaaatttttacaccttttttttcacattttacataaataataatgctttgccagcagtacgtggtagccacaattgcacaatatattttcttaaaaaataccagcagttactcatggaatatattctgcgtttataaaactagtttttaagaagaaattttttttggcctatgaaattgttaaacctggaacatgacattgttaatcatataataatgattcttaaatgctgtatggtttattatttaaatgggtaaagccatttacataatatagaaagatatgcatatatctagaaggtatgtggcatttatttggataaaattctcaattcagagaaatcatctgatgtttctatagtcactttgccagctcaaaagaaaacaataccctatgtagttgtggaagtttatgctaatattgtgtaactgatattaaacctaaatgttctgcctaccctgttggtataaagatattttgagcagactgtaaacaagaaaaaaaaaatcatgcattcttagcaaaattgcctagtatgttaatttgctcaaaatacaatgtttgattttatgcactttgtcgctattaacatcctttttttcatgtagatttcaataattgagtaattttagaagcattattttaggaatatatagttgtcacagtaaatatcttgttttttctatgtacattgtacaaatttttcattccttttgctctttgtggttggatctaacactaactgtattgttttgttacatcaaataaacatcttctgtgga

SEQ ID NO: 10288 - protein, 826 aa, Homo sapiens
  ref <308>: DATABASE ACCESSION NUMBER: SWISS-Prot / Q16665
  ref <309>: DATABASE ENTRY DATE: 2001-10-16
MEGAGGANDKKKISSERRKEKSRDAARSRRSKESEVFYELAHQLPLPHNVSSHLDKASVMRLTISYLRVRKLLDAGDLDIEDDMKAQMNCFYLKALDGFVMVLTDDGDMIYISDNVNKYMGLTQFELTGHSVFDFTHPCDHEEMREMLTHRNGLVKKGKEQNTQRSFFLRMKCTLTSRGRTMNIKSATWKVLHCTGHIHVYDTNSNQPQCGYKKPPMTCLVLICEPIPHPSNIEIPLDSKTFLSRHSLDMKFSYCDERITELMGYEPEELLGRSIYEYYHALDSDHLTKTHHDMFTKGQVTTGQYRMLAKRGGYVWVETQATVIYNTKNSQPQCIVCVNYVVSGIIQHDLIFSLQQTECVLKPVESSDMKMTQLFTKVESEDTSSLFDKLKKEPDALTLLAPAAGDTIISLDFGSNDTETDDQQLEEVPLYNDVMLPSPNEKLQNINLAMSPLPTAETPKPLRSSADPALNQEVALKLEPNPESLELSFTMPQIQDQTPSPSDGSTRQSSPEPNSPSEYCFYVDSDMVNEFKLELVEKLFAEDTEAKNPFSTQDTDLDLEMLAPYIPMDDDFQLRSFDQLSPLESSSASPESASPQSTVTVFQQTQIQEPTANATTTTATTDELKTVTKDRMEDIKILIASPSPTHIHKETTSATSSPYRDTQSRTASPNRAGKGVIEQTEKSHPRSPNVLSVALSQRTTVPEEELNPKILALQNAQRKRKMEHDGSLFQAVGIGTLLQQPDDHAATTSLSWKRVKGCKSSEQNGMEQKTIILIPSDLACRLLGQSMDESGLPQLTSYDCEVNAPIQGSRNLLQGEELLRALDQVN

SEQ ID NO: 10289 - DNA, 1457 bp, Rattus norvegicus
  ref <308>: DATABASE ACCESSION NUMBER: EMBL / Y12009
  ref <309>: DATABASE ENTRY DATE: 1998-03-25
tatttaggtggatttgtactgctctcctagcaagagaaggtgagacatccgttccctctacaagaaactctggctcttgcaggatggattttcaagggtcgattccaacctatatctatgacatcgattatagtatgtcagcaccctgccaaaaagtcaatgtgaaacaaattgcagcccagctcctgcccccactctactctctggtattcatctttggttttgtgggtaacatgatggtcttcctcatcctgataagctgcaaaaagctgaagagcatgactgatatctacctgttcaacctggccatctctgacctgctcttcctgctcacactcccattctgggctcactatgctgcaaatgagtgggtctttgggaatataatgtgcaaattattcacagggatctatcacattggttatttcggtggaatcttcttcattatcctcctgacaattgataggtacttggctattgtccatgctgtgtttgctataaaagccagaacagtcaactttggggtaataacaagtgtagtcacttgggtggtggctgtgtttgtctctctcccagaaataatctttatgagatctcaaaaagaaggttctcattatacatgcagtcctcattttctacatattcaatatcgtttctggaagcattttcaaacattaaagatggtcatcttgagcctgatcctacccctacttgtcatggtcatctgctactcaggaatcctcaacaccctgtttcgctgtaggaatgagaagaagaggcacagggctgtaaggctcatctttgccatcatgattgtctactttctcttctggactccctacaacattgtcctcctcctgaccaccttccaggaatactttggactgaataattgcagtagttctaatagactagaccaggcaatgcaggtgacagagactcttgggatgacacactgctgcctcaaccctgtcatctatgcctttgttggggagaagttccggaattatctctctgtgttcttccgaaaacacattgtcaaacgcttctgcaaacactgttcaattttccagcaagtcaatcctgatcgtgtaagctcagtctatacccggtccacaggagaacaggaagtttctactggtttatgaactggttgagttttgtgtatcacttagtttttctatgtagcttgagggtagagatggttcttttagaaaagaaattaatatagagggcctaaggtacgtgcattgttttaatatttatttgagatagattgggtctttgaaagctgagtagttttataaacgtgaatgagaatgtattgatgagacagtaatttctggcttcattcctatttaactacaattattcccaaactcttctttagccacaaaagttcactattaaaaaatactgagcattgggaaaaaaaaaaaaaaaaaaaaaaaaaaaaa

SEQ ID NO: 10290 - protein, 354 aa, Rattus norvegicus
  ref <308>: DATABASE ACCESSION NUMBER: SWISS-Prot / O08556
  ref <309>: DATABASE ENTRY DATE: 2000-05-30
MDFQGSIPTYIYDIDYSMSAPCQKVNVKQIAAQLLPPLYSLVFIFGFVGNMMVFLILISCKKLKSMTDIYLFNLAISDLLFLLTLPFWAHYAANEWVFGNIMCKLFTGIYHIGYFGGIFFIILLTIDRYLAIVHAVFAIKARTVNFGVITSVVTWVVAVFVSLPEIIFMRSQKEGSHYTCSPHFLHIQYRFWKHFQTLKMVILSLILPLLVMVICYSGILNTLFRCRNEKKRHRAVRLIFAIMIVYFLFWTPYNIVLLLTTFQEYFGLNNCSSSNRLDQAMQVTETLGMTHCCLNPVIYAFVGEKFRNYLSVFFRKHIVKRFCKHCSIFQQVNPDRVSSVYTRSTGEQEVSTGL

SEQ ID NO: 10291 - DNA, 2232 bp, Homo sapiens
  ref <308>: DATABASE ACCESSION NUMBER: EMBL / U03882
  ref <309>: DATABASE ENTRY DATE: 1999-09-02
ggattgaacaaggacgcatttccccagtacatccacaacatgctgtccacatctcgttctcggtttatcagaaataccaacgagagcggtgaagaagtcaccaccttttttgattatgattacggtgctccctgtcataaatttgacgtgaagcaaattggggcccaactcctgcctccgctctactcgctggtgttcatctttggttttgtgggcaacatgctggtcgtcctcatcttaataaactgcaaaaagctgaagtgcttgactgacatttacctgctcaacctggccatctctgatctgctttttcttattactctcccattgtgggctcactctgctgcaaatgagtgggtctttgggaatgcaatgtgcaaattattcacagggctgtatcacatcggttattttggcggaatcttcttcatcatcctcctgacaatcgatagatacctggctattgtccatgctgtgtttgctttaaaagccaggacggtcacctttggggtggtgacaagtgtgatcacctggttggtggctgtgtttgcttctgtcccaggaatcatctttactaaatgccagaaagaagattctgtttatgtctgtggcccttattttccacgaggatggaataatttccacacaataatgaggaacattttggggctggtcctgccgctgctcatcatggtcatctgctactcgggaatcctgaaaaccctgcttcggtgtcgaaacgagaagaagaggcatagggcagtgagagtcatcttcaccatcatgattgtttactttctcttctggactccctataacattgtcattctcctgaacaccttccaggaattcttcggcctgagtaactgtgaaagcaccagtcaactggaccaagccacgcaggtgacagagactcttgggatgactcactgctgcatcaatcccatcatctatgccttcgttggggagaagttcagaagcctttttcacatagctcttggctgtaggattgccccactccaaaaaccagtgtgtggaggtccaggagtgagaccaggaaagaatgtgaaagtgactacacaaggactcctcgatggtcgtggaaaaggaaagtcaattggcagagcccctgaagccagtcttcaggacaaagaaggagcctagagacagaaatgacagatctctgctttggaaatcacacgtctggcttcacagatgtgtgattcacagtgtgaatcttggtgtctacgttaccaggcaggaaggctgagaggagagagactccagctgggttggaaaacagtattttccaaactaccttccagttcctcatttttgaatacaggcatagagttcagactttttttaaatagtaaaaataaaattaaagctgaaaactgcaacttgtaaatgtggtaaagagttagtttgagttgctatcatgtcaaacgtgaaaatgctgtattagtcacagagataattctagctttgagcttaagaattttgagcaggtggtatgtttgggagactgctgagtcaacccaatagttgttgattggcaggagttggaagtgtgtgatctgtgggcacattagcctatgtgcatgcagcatctaagtaatgatgtcgtttgaatcacagtatacgctccatcgctgtcatctcagctggatctccattctctcaggcttgctgccaaaagccttttgtgttttgttttgtatcattatgaagtcatgcgtttaatcacattcgagtgtttcagtgcttcgcagatgtccttgatgctcatattgttccctaatttgccagtgggaactcctaaatcaaattggcttctaatcaaagcttttaaaccctattggtaaagaatggaaggtggagaagctccctgaagtaagcaaagactttcctcttagtcgagccaagttaagaatgttcttatgttgcccagtgtgtttctgatctgatgcaagcaagaaacactgggcttctagaaccaggcaacttgggaactagactcccaagctggactatggctctactttcaggccacatggctaaagaaggtttcagaaagaagtggggacagagcagaactttcaccttcatatatttgtatgatcctaatgaatgcataaaatgttaagttgatggtgatgaaatgtaaatactgtttttaacaactatgatttggaaaataaatcaatgctataactatgttgataaaag

SEQ ID NO: 10292 - protein, 374 aa, Homo sapiens
  ref <308>: DATABASE ACCESSION NUMBER: SWISS-Prot / P41597
  ref <309>: DATABASE ENTRY DATE: 2002-06-15
MLSTSRSRFIRNTNESGEEVTTFFDYDYGAPCHKFDVKQIGAQLLPPLYSLVFIFGFVGNMLVVLILINCKKLKCLTDIYLLNLAISDLLFLITLPLWAHSAANEWVFGNAMCKLFTGLYHIGYFGGIFFIILLTIDRYLAIVHAVFALKARTVTFGVVTSVITWLVAVFASVPGIIFTKCQKEDSVYVCGPYFPRGWNNFHTIMRNILGLVLPLLIMVICYSGILKTLLRCRNEKKRHRAVRVIFTIMIVYFLFWTPYNIVILLNTFQEFFGLSNCESTSQLDQATQVTETLGMTHCCINPIIYAFVGEKFRSLFHIALGCRIAPLQKPVCGGPGVRPGKNVKVTTQGLLDGRGKGKSIGRAPEASLQDKEGA

SEQ ID NO: 10293 - DNA, 1457 bp, Rattus norvegicus; identical to SEQ ID NO: 10289
  ref <308>: DATABASE ACCESSION NUMBER: EMBL / Y12009
  ref <309>: DATABASE ENTRY DATE: 1998-03-25

SEQ ID NO: 10294 - protein, 354 aa, Rattus norvegicus; identical to SEQ ID NO: 10290
  ref <308>: DATABASE ACCESSION NUMBER: SWISS-Prot / O08556
  ref <309>: DATABASE ENTRY DATE: 2000-05-30

SEQ ID NO: 10295 - DNA, 2232 bp, Homo sapiens; identical to SEQ ID NO: 10291
  ref <308>: DATABASE ACCESSION NUMBER: EMBL / U03882
  ref <309>: DATABASE ENTRY DATE: 1999-09-02

SEQ ID NO: 10296 - protein, 374 aa, Homo sapiens; identical to SEQ ID NO: 10292
  ref <308>: DATABASE ACCESSION NUMBER: SWISS-Prot / P41597
  ref <309>: DATABASE ENTRY DATE: 2002-06-15

SEQ ID NO: 10297 - DNA, 845 bp, Rattus norvegicus
  ref <308>: DATABASE ACCESSION NUMBER: EMBL / Y12517
  ref <309>: DATABASE ENTRY DATE: 1997-07-11
aggaagttagccgcagaatcccagatagcggccgagagggactcggatccaatggcgaccccagaggccagcggcagcggcaggaatggccagggctccgaccccgccgtcacctactaccggctggaggaggtggcgaagcgaaataccgcggaggagacgtggatggtgatccacgggcgagtctacgatatcacccgcttcctcagcgagcatcctggtggagaagaggttctactggaacaagctggtgccgatgcaactgaaagctttgaagatgtcggccactcccctgatgccagggagatgctaaagcagtactacattggtgatgtccatccgaatgaccttaaacctaaagatggtgacaaggacccttcaaaaaacaattcatgccaaagttcctgggcatattggattgtccccatcgtgggtgctattcttataggtttcctgtatcgtcacttctgggctgacagcaaatcctcctgaggagtccacgttgaagtgtcggagcacatctcctgggagtgagagggtggagacttgtgtggaggaggctgcagggtgctccttccttggatcctgccagttgttttctttccccttggagccaagatggttgaccagatatctatcctccttcaatgcaggaccagaatctgtccatcagcctgagcctgacgcccaaagcacctgctcacgttgtgtccttgtcagggtttcttctcactggttcccagtcattcccttcatttcaacagttgatgccaatgacttagagttcctttgttgtagtgacatttcctttggggacagtacatgatttctgatactttgaattc

SEQ ID NO: 10298 - protein, 146 aa, Rattus norvegicus
  ref <308>: DATABASE ACCESSION NUMBER: SWISS-Prot / P04166
  ref <309>: DATABASE ENTRY DATE: 2002-06-15
MATPEASGSGRNGQGSDPAVTYYRLEEVAKRNTAEETWMVIHGRVYDITRFLSEHPGGEEVLLEQAGADATESFEDVGHSPDAREMLKQYYIGDVHPNDLKPKDGDKDPSKNNSCQSSWAYWIVPIVGAILIGFLYRHFWADSKSS

SEQ ID NO: 10299 - DNA, 749 bp, Homo sapiens
  ref <308>: DATABASE ACCESSION NUMBER: EMBL / AB009282
  ref <309>: DATABASE ENTRY DATE: 1997-12-05
ctgcagcccgggggatccgcggccttatgggccctggttacggaagccgaggaaggctgagcgcgggctctcaaggaaagtagtcgcggaatctcagttagcggtggagaggcagtatgtccggttcaatggcgactgcggaagctagcggcagcgatgggaaagggcaggaagtcgagacctcagtcacctattaccggttggaggaggtggcaaagcgcaactccttgaaggaactgtggcttgtgatccatgggcgagtctacgatgtcacccgcttcctcaacgagcaccctggaggagaagaggttctgctggaacaagctggtgtagatgcaagtgaaagctttgaagatgtaggacactcttctgatgccagagaaatgctaaagcagtactacattggtgatatccatccgagtgaccttaaacctgaaagtggtagcaaggacccttcccaaaatgatacatgcaaaagttgctgggcatattggattttacccatcataggcgctgttctcttaggtttcctgtaccgctactacacatcggaaagcaaatcctcctgaggaagcccttgctgaagttagaaagtgcatccactttggggcgaaaactagagacttgcttgggggctgcagaagtgccctctcctcgaatcctgccagttgcattcttcccccttggagccaagacgattggccagacatcacctcagatctgagaccagcgtcttccatctcctcaga

SEQ ID NO: 10300 - protein, 146 aa, Homo sapiens
  ref <308>: DATABASE ACCESSION NUMBER: SWISS-Prot / O43169
  ref <309>: DATABASE ENTRY DATE: 2002-06-15
MATAEASGSDGKGQEVETSVTYYRLEEVAKRNSLKELWLVIHGRVYDVTRFLNEHPGGEEVLLEQAGVDASESFEDVGHSSDAREMLKQYYIGDIHPSDLKPESGSKDPSQNDTCKSCWAYWILPIIGAVLLGFLYRYYTSESKSS

SEQ ID NO: 10301 - DNA, 1614 bp, Rattus norvegicus
  ref <308>: DATABASE ACCESSION NUMBER: EMBL / Y12635
  ref <309>: DATABASE ENTRY DATE: 1998-04-23
cgggccagcacaagatggcgttgcgagcgatgcggggaatcgtgaacggggccgcgcccgagctgcccgtgcccaccggtgggccgatggccggagctcgggagcaggcgctggcggtgagccggaactacctctcccagcctcgtctcacctacaagactgtctctggagtgaatggtccactagtgatcttagatcatgtaaagtttcccagatatgctgagattgtccacttgacattaccagatggcacaaaaagaagtgggcaagttctagaagttagtggctccaaagctgtggttcaggtatttgaaggaacatccggcatagatgccaagaaaacatcctgtgagtttactggagatattctccgcacaccagtgtctgaggatatgcttggtcgagtattcaatggatcaggaaaacccattgaccgaggtcctgtggtgttggccgaagacttccttgacatcatgggtcagccaatcaaccctcagtgtcgcatctacccagaagagatgattcagacgggcatttctgccatcgacggcatgaacagtattgcgaggggacagaaaatccccatcttttctgctgccgggttaccacacaacgagattgcagctcagatctgtcgccaggctggtttggtaaagaaatccaaagacgtggtagactacagtgaagaaaactttgccattgtgtttgctgctatgggagtaaacatggaaacagcccggttcttcaaatctgactttgaagaaaatggctcaatggacaatgtctgccttttcttgaatctggctaatgacccaactatcgagaggatcatcactcctcgcctggctctgaccaccgctgagtttctggcttaccagtgtgagaagcatgtcctggtcatcctgacagatatgagttcttacgctgaagcacttcgagaggtttcagctgccagggaagaggttcctggtcggcgaggcttccccggctacatgtatacggatttagccaccatctatgaacgcgctgggcgagtggaaggtagaaatggctctattacccaaatccctattctcaccatgcccaatgatgatatcactcatcctatccctgacttgactgggtatattactgagggccagatctatgtggacagacagctgcacaacagacagatttaccctcctattaatgtgctgccctcactctctcggttaatgaagtcagctattggagaaggaatgaccaggaaggatcatgctgatgtgtctaaccagttgtacgcatgctatgctatcggtaaggatgtgcaagccatgaaagctgtggtgggagaagaagccctgacctcagatgacctcctttacttggaatttctgcagaagtttgagaaaaacttcattactcagggtccctatgaaaatcgaactgtctatgagactttggacattggctggcagttgcttcgaatcttccccaaagaaatgctgaagaggatccctcagagtaccctgagcgaattttaccctcgagactctgcaaagcactagctgctgctgcttgtgcggctcgaccctcttgtgaagtgctggttctgtttcctgattccttttg

SEQ ID NO: 10302 - protein, 511 aa, Rattus norvegicus
  ref <308>: DATABASE ACCESSION NUMBER: SWISS-Prot / P50517
  ref <309>: DATABASE ENTRY DATE: 2002-06-15
MALRAMRGIVNGAAPELPVPTGGPMAGAREQALAVSRNYLSQPRLTYKTVSGVNGPLVILDHVKFPRYAEIVHLTLPDGTKRSGQVLEVSGSKAVVQVFEGTSGIDAKKTSCEFTGDILRTPVSEDMLGRVFNGSGKPIDRGPVVLAEDFLDIMGQPINPQCRIYPEEMIQTGISAIDGMNSIARGQKIPIFSAAGLPHNEIAAQICRQAGLVKKSKDVVDYSEENFAIVFAAMGVNMETARFFKSDFEENGSMDNVCLFLNLANDPTIERIITPRLALTTAEFLAYQCEKHVLVILTDMSSYAEALREVSAAREEVPGRRGFPGYMYTDLATIYERAGRVEGRNGSITQIPILTMPNDDITHPIPDLTGYITEGQIYVDRQLHNRQIYPPINVLPSLSRLMKSAIGEGMTRKDHADVSNQLYACYAIGKDVQAMKAVVGEEALTSDDLLYLEFLQKFEKNFITQGPYENRTVYETLDIGWQLLRIFPKEMLKRIPQSTLSEFYPRDSAKH

SEQ ID NO: 10303 - DNA, 2858 bp, Homo sapiens
  ref <308>: DATABASE ACCESSION NUMBER: EMBL / BC003100
  ref <309>: DATABASE ENTRY DATE: 2001-07-13
ggacagaggagacaagatggcgctgcgggcgatgcgggggattgtcaacggggccgcacccgagctacccgtgcccaccggtgggccggcggtgggagctcgggagcaggcgctggcagtcagtcggaactacctctcccagcctcgcctcacatacaagacagtatctggagtcaatggtccactagtgatcttagatcatgttaagtttcccaggtatgctgaaattgtccatttgaccttaccggatggcacaaagagaagtgggcaagttctggaagttagtggttccaaggcagtagttcaggtatttgaagggacttcaggtatagatgctaagaaaacgtcctgtgagtttactggggatattctccgaacaccggtgtctgaggatatgcttggtcgggtattcaatggatcgggaaaacccattgacagaggtcctgttgtactggccgaagacttccttgatatcatgggtcagccaatcaaccctcaatgtcgaatctacccagaggaaatgattcagactggcatttcggccatcgatgggatgaacagtattgctagggggcagaaaattcctatcttctctgctgctgggctaccacacaatgagattgcagctcagatctgtcgccaggctggtttggtaaagaaatccaaagatgtagtagactacagtgaggaaaattttgcaattgtatttgctgctatgggtgtaaacatggaaactgcccggttcttcaaatctgactttgaagaaaatggctcaatggacaatgtctgcctctttttgaacttggctaatgacccaaccattgagcgaattatcactcctcgcctggctctaaccacagctgaatttctggcgtaccaatgtgagaaacatgtattggttattctaacagacatgagttcttatgctgaagcacttcgagaggtttcagcagccagggaagaggtacctggtcgacgaggttttccaggttacatgtatacagatttagccacgatatatgaacgcgctgggcgagtggaagggagaaacggctcgattactcaaatccctattctaaccatgcctaatgatgatatcactcaccccatcccagacttgactggctacattacagaggggcagatctatgtggacagacagctgcacaacagacagatttatccacctatcaatgtgctgccctcactatcacggttaatgaagtctgctattggagaagggatgaccaggaaggatcatgccgatgtatctaaccagctatatgcgtgctatgctattggaaaggatgtgcaagccatgaaagctgtcgttggagaagaagcccttacctcagatgatcttctctacttggaatttctgcagaagtttgagaggaacttcattgctcagggtccttacgaaaatcgcactgtctttgagactttggacattggctggcagctactccgaatcttccccaaagaaatgctgaagagaatccctcagagcaccctcagcgaattttaccctcgagactctgcaaagcattagctgctgcttctgcattgctccgcgctcttgtgaaatactggttctgttttctttattccttttgcactctcggttcccacctttgtgttggagtttaccatgttaccctgtaattaaaaacaaagaataggtaacatattgtgccagtgttgcaacgttttaaactgctaacagaccttaaaatatccccctacctgggtcctcagtgctatgtttaaagtgctgcagggatggagtggcgttttcttattgctgtatgtattgtacatagtggagtagttagttacctgataacagtcttgttatttgggtctcttagaccttacctctcaactccctcaagagtaccagtctctgaagttataatgctttggtctctacattaggggcaagatccagtctgagagaagtctcctttgagaagggccaagaggctctttcctgagtgtttgctttcggtttgttggtatgcctgtattgctgggctgtgctgctgctcgaagcagatggttttgactgtctttttgctctttcctatataatgaatagatgagtgaaaggagttttctttttctctttagtacttacgtattgggattcctgtgtcttacagctctccctctccaaataatacacagaatcctgcaactttttgcacagctggtatctgtctggtagcagtgagaccccttgtcttggtgatccttactgggtttccaagcagaggagtcacatgattacaattgccagtagagttgttgtttggggtacaagatgagaagaaagaaaaacctacagcctttctacattctgacatgctaacagtggtttaagtttctaaagtgtttaccagatgctgaaggcaaggggagggagcagaagcacttatgtttacggatattttaaactctgttagagagcagcctttgaaaatccccaatttggttctgctttttgacctctctctaccttttcagggtaatctttgtggcacaaacgatagcatttccaagctttagagttttctgaattcctgcgccttcctgacgtgagccctgagcgatcttctatgcagttctgccatgcgtcctgttggtctctctgtgttctttgttacttgggtgcaatagcaacttccctaccccgtgcattccatctttcatgttgtgtaaagttcttcacttttttctctgagggctgggggttgggggagtcagcatgattatattttaatgtagaaaatgtgacatctggatataaaatgaaaataaatgttaaattaaatggaaaaaaaaaaaaaaaaaaa

SEQ ID NO: 10304 - protein, 511 aa, Homo sapiens
  ref <308>: DATABASE ACCESSION NUMBER: SWISS-Prot / P21281
  ref <309>: DATABASE ENTRY DATE: 2002-06-15
MALRAMRGIVNGAAPELPVPTGGPAVGAREQALAVSRNYLSQPRLTYKTVSGVNGPLVILDHVKFPRYAEIVHLTLPDGTKRSGQVLEVSGSKAVVQVFEGTSGIDAKKTSCEFTGDILRTPVSEDMLGRVFNGSGKPIDRGPVVLAEDFLDIMGQPINPQCRIYPEEMIQTGISAIDGMNSIARGQKIPIFSAAGLPHNEIAAQICRQAGLVKKSKDVVDYSEENFAIVFAAMGVNMETARFFKSDFEENGSMDNVCLFLNLANDPTIERIITPRLALTTAEFLAYQCEKHVLVILTDMSSYAEALREVSAAREEVPGRRGFPGYMYTDLATIYERAGRVEGRNGSITQIPILTMPNDDITHPIPDLTGYITEGQIYVDRQLHNRQIYPPINVLPSLSRLMKSAIGEGMTRKDHADVSNQLYACYAIGKDVQAMKAVVGEEALTSDDLLYLEFLQKFERNFIAQGPYENRTVFETLDIGWQLLRIFPKEMLKRIPQSTLSEFYPRDSAKH

SEQ ID NO: 10305 - DNA, 1182 bp, Rattus norvegicus
  ref <308>: DATABASE ACCESSION NUMBER: EMBL / Y13275
  ref <309>: DATABASE ENTRY DATE: 1999-11-01
acttgcctgaagataacgtttgggatatttaaaggtgtgggttaattttttatccattttagtaactgggttttttttttttctttccgactacttccttgctttctattgctacccgaagctgcaggcacacggatctctgcaggcaaaatccctcagagccttcgcaggacagcctggtaacgactggttcgtcctactgtaactgggtggctgccccttctccgaaatggcaggtgtcagtggctgtttaaagtattcgatgtttttcttcaacttcttgttctgggtatgtggtacactgatcctgggtctagccatatggttgagagtaagcaaagacggcaaagagattatcacatccggtgacaatggcacgaaccccttcattgctgtgaatatcttgattgcagttgggtccatcatcatggttctgggtttcctgggatgctgcggagctgtgaaagaaagtcgctgcatgcttctcttgttttttatcggcttgctcctgattctgcttctgcaagtagccgcaggtatcctaggagctactttcaaatctgaatctagccgcattctgaatgaaacgctctatgaaaatgccaagcttttgtcagaaacaagcaatgaggcaaaagaagtacagaaggccatgattgcatttcagtcagagtttaagtgctgtggcttgagatttggagctgctgactggggaaaaaattttccagatgcgaaagagtcatgccaatgtacaggatctgattgtgaaagttataatggagagaatgtctatcgaacgacctgtctttctctgataaaagagctggttgaaaaaaacattattattgtcattggaattgcctttggactggcagttatcgagattcttggtttggtgttttctatggtgctctactgccaaattggaagcaaatgaatctgcggacttcctcagtcgttatagacaccatttaagtttttgctttggcttcgtaactttaaatactcgagtactgtacataccaggagcagatgtcttcttgatgagctctcacttaggcagactacaggtatcttcacatgtactcagctcatttaactgtgaaggacataataaaagtggtcgtgtatttttttttctcacaataaaaagtgttcgtgctgaaaaaaaaaaaaaaaaaa

SEQ ID NO: 10306 - protein, 235 aa, Rattus norvegicus
  ref <308>: DATABASE ACCESSION NUMBER: SWISS-Prot / CAA73724
  ref <309>: DATABASE ENTRY DATE: 2001-06-01
MAGVSGCLKYSMFFFNFLFWVCGTLILGLAIWLRVSKDGKEIITSGDNGTNPFIAVNILIAVGSIIMVLGFLGCCGAVKESRCMLLLFFIGLLLILLLQVAAGILGATFKSESSRILNETLYENAKLLSETSNEAKEVQKAMIAFQSEFKCCGLRFGAADWGKNFPDAKESCQCTGSDCESYNGENVYRTTCLSLIKELVEKNIIIVIGIAFGLAVIEILGLVFSMVLYCQIGSK

SEQ ID NO: 10307 - DNA, 1159 bp, Homo sapiens
  ref <308>: DATABASE ACCESSION NUMBER: EMBL / BC005246
  ref <309>: DATABASE ENTRY DATE: 2001-07-13
agtgccccaggagctatgacaagcaaaggaacatacttgcctggagatagcctttgcgatatttaaatgtccgtggatacagaaatctctgcaggcaagttgctccagagcatattgcaggacaagcctgtaacgaatagttaaattcacggcatctggattcctaatccttttccgaaatggcaggtgtgagtgcctgtataaaatattctatgtttaccttcaacttcttgttctggctatgtggtatcttgatcctagcattagcaatatgggtacgaataagcaatgactctcaagcaatttttggttctgaagatgtaggctctagctcctacgttgctgtggacatattgattgctgtaggtgccatcatcatgattctgggcttcctggcatgctgcggtgctataaaagaaagtcgctgcatgcttctgttgtttttcataggcttgcttctgatcctgctcctgcaggtggcgacaggtatcctaggagctgttttcaaatctaagtctgatcgcattgtgaatgaaactctctatgaaaacacaaagcttttgagcgccacaggggaaagtgaaaaacaattccaggaagccataattgtgtttcaagaagagtttaaatgctgcggtttggtcaatggagctgctgattggggaaataattttcaacactatcctgaattatgtgcctgtctagataagcagagaccatgccaaagctataatggaaaacaagtttacaaagagacctgtatttctttcataaaagacttcttggcaaaaaatttgattatagttattggaatagcatttggactggcagttattgagatactgggtttggtgttttctatggtcctgtattgccagatcgggaacaaatgaatctgtggatgcatcaagctatcgtcagtcaaacccctttaaaatgttgctttggctttgtaaatttaaatatgtaagtgctatataagtcaggagcagctgtctttttaaaatgtctcggctagctagaccacagatatcttctagacatattgaacacatttaagatttgagggatataagggaaaatgatatgaatgtgtatttttactcaaaataaaagtaactgtttacgcaaaaaaaaaaaaaaaaaaaaaaaaaaaaaa

SEQ ID NO: 10308 - protein, 237 aa, Homo sapiens
  ref <308>: DATABASE ACCESSION NUMBER: SWISS-Prot / P19075
  ref <309>: DATABASE ENTRY DATE: 2002-06-15
MAGVSACIKYSMFTFNFLFWLCGILILALAIWVRVSNDSQAIFGSEDVGSSSYVAVDILIAVGAIIMILGFLGCCGAIKESRCMLLLFFIGLLLILLLQVATGILGAVFKSKSDRIVNETLYENTKLLSATGESEKQFQEAIIVFQEEFKCCGLVNGAADWGNNFQHYPELCACLDKQRPCQSYNGKQVYKETCISFIKDFLAKNLIIVIGISFGLAVIEILGLVFSMVLYCQIGNK

SEQ ID NO: 10309 - DNA, 342 bp, Rattus norvegicus
  ref <308>: DATABASE ACCESSION NUMBER: EMBL / Y13336
  ref <309>: DATABASE ENTRY DATE: 1998-04-16
atgtcggcgtcggtagtgtccgtcatctcccggttcctggaggagtacttgagctccactccacagcggctgaagttgctggatgcctatctcctttatatattgctgaccggggcgctgcagttcggctactgtctcctcgtgggcaccttccccttcaactctttcctctctggcttcatctcttgtgtgggcagcttcatcttagcggtttgcttgagaatacagatcaacccccagaacaaggcggatttccaaggcatctctcctgagcgagcctttgctgattttctctttgccagcactatcctgcacctcgtcgtcatgaactttgttggctga

SEQ ID NO: 10310 - protein, 113 aa, Rattus norvegicus
  ref <308>: DATABASE ACCESSION NUMBER: SWISS-Prot / CAA73780
  ref <309>: DATABASE ENTRY DATE: 2002-06-15
MSASVVSVISRFLEEYLSSTPQRLKLLDAYLLYILLTGALQFGYCLLVGTFPFNSFLSGFISCVGSFILAVCLRIQINPQNKADFQGISPERAFADFLFASTILHLVVMNFVG

SEQ ID NO: 10311 - DNA, 699 bp, Homo sapiens
  ref <308>: DATABASE ACCESSION NUMBER: Refseq / NM_001344
  ref <309>: DATABASE ENTRY DATE: 2002-11-05
catccggtgtggtcgacgggtcctccaagagtttggggcgcggaccggagtaccttgcgtgcagttatgtcggcgtcggtagtgtctgtcatttcgcggttcttagaagagtacttgagctccactccgcagcgtctgaagttgctggacgcgtacctgctgtatatactgctgaccggggcgctgcagttcggttactgtctcctcgtggggaccttccccttcaactcttttctctcgggcttcatctcttgtgtggggagtttcatcctagcggtttgcctgagaatacagatcaacccacagaacaaagcggatttccaaggcatctccccagagcgagcctttgctgattttctctttgccagcaccatcctgcaccttgttgtcatgaactttgttggctgaatcattctcatttacttaattgaggagtaggagactaaaagaatgttcactctttgaatttcctggataagagttctggagatggcagcttattggacacatggattttcttcagatttgacacttactgctagctctgctttttatgacaggagaaaagcccagagttcactgtgtgtcagaacaactttctaacaaacatttattaatccagcctctgcctttcattaaatgtaaccttttgctttccaaattaaagaactccatgccactcctcaaaaaaaaaaaaaa

SEQ ID NO: 10312 - protein, 113 aa, Homo sapiens; identical to SEQ ID NO: 10310
  ref <308>: DATABASE ACCESSION NUMBER: SWISS-Prot / P46966
  ref <309>: DATABASE ENTRY DATE: 2002-06-15

SEQ ID NO: 10313 - DNA, 342 bp, Rattus norvegicus; identical to SEQ ID NO: 10309
  ref <308>: DATABASE ACCESSION NUMBER: EMBL / Y13336
  ref <309>: DATABASE ENTRY DATE: 1998-04-16

SEQ ID NO: 10314 - protein, 113 aa, Rattus norvegicus; identical to SEQ ID NO: 10310
  ref <308>: DATABASE ACCESSION NUMBER: SWISS-Prot / CAA73780
  ref <309>: DATABASE ENTRY DATE: 2002-06-15

SEQ ID NO: 10315 - DNA, 699 bp, Homo sapiens; identical to SEQ ID NO: 10311
  ref <308>: DATABASE ACCESSION NUMBER: Refseq / NM_001344
  ref <309>: DATABASE ENTRY DATE: 2002-11-05

SEQ ID NO: 10316 - protein, 113 aa, Homo sapiens; identical to SEQ ID NO: 10310
  ref <308>: DATABASE ACCESSION NUMBER: SWISS-Prot / P46966
  ref <309>: DATABASE ENTRY DATE: 2002-06-15

SEQ ID NO: 10317 - DNA, 2052 bp, Rattus norvegicus
  ref <308>: DATABASE ACCESSION NUMBER: EMBL / Y13381
  ref <309>: DATABASE ENTRY DATE: 1997-12-02
atggccgacatcaagacgggcatcttcgccaaaaacgtgcaaaagcggctcaaccgggcacaggaaaaggtcctccagaagctgggaaaggcagatgaaacaaaagatgaacagtttgaagaatatgttcagaacttcaagcggcaagaggcagagggtaccagacttcagcgagaactgcgaggatatttagcggcaatcaaaggtatgcaggaggcctcaatgaagcttaccgagtcactacatgaagtctacgagccagattggtatggacgggaagatgtaaagatggttggtgagaagtgtgatgtgctgtgggaagacttccatcaaaagctagtggatgggtccttgctgacactggacacgtacctgggccagtttcctgacataaagaatcgcatcgctaagcgcagcaggaagctcgtggattacgacagtgcccgccatcacctggaggctctgcagagttccaaaaggaaggatgagagtcggatctctaaggcagaagaggagtttcagaaagcacagaaagtgtttgaagagttcaatgttgacttacaagaagaattgccatcactatggtcaagacgagttgggttttatgtcaatactttcaaaaacgtctctagccttgaggccaagtttcacaaggaaatcgcagtgctttgccacaagctttatgaagtgatgacgaaacttggtgatcagcacgctgacaaggccttcagcattcaaggagctcccagtgattcgggtcctcttcgcattgcaaagacaccatcacccccagaggaggcttcacccctccccagcccaacggctagtcccaaccacacattagcacctgcatctcctgccccagtgcgacccagatcaccttcacagacaaggaaagggcctcctgtcccacctctgcctaaagtcaccccaacaaaggaactacagcaggagaacatcatcaatttctttgaggacaactttgtaccagaaatcaatgtgacaacaccttcccagaatgaagtcctggaggtgaagaaggaggagactttgctggatttggactttgaccctttcaaacctgatgtgaccccagcaggttctgctgcagcgacccactcacccatgtctcagacattgccctgggacttatggacgacaagcactgatttggtacaaccggcttctggaggttcgtttaatgattttacccagccccaggatacttcattattcacgatgcagacagatcagaatatggctgaaactgagcaggctctacctacagagccccaggcagaggagcctcccaccactgctgctgcacctactgctgggctggaccttgggctagagatggaggagccaaaggaggaggcagcgatccctcctggaactgatgctggtgagactgtgggaactgaggggtccacaggggaggaagcagaggcagagaaggcagccctacctgctggagaaggcgaaagtcctgagggagccaaaatcgatgtggaaagcactgagcttgcaagcagtgagagccctcaagcagcagagcttgaagctggtgctcctcaggaaaaggtcatcccttctgttgtcatagagccagcctccaaccatgaaggagaagaacaccaagaaaccactacgggtactgaaacaagggaggccactgaggacgtggctccccagggcccagccggtgagaagcaggaactggctacagagcccacgcctctggattctcaggctgctacgcctgcaccagcaggtgctgtggatgcttcgctgtctgcaggggatgccgctcaggaactgcctcctggctttctctacaaggtggaaactctgcatgacttcgaggcagcgaactctgatgaacttaccctacaaaggggtgatgtggtgctcgtggtgccctcagactcagaagccgaccaggatgcaggctggttggtgggggtgaaggagtcagactggcttcagtacagagacctggccacatacaaaggcctctttccagagaacttcacacgacacctagaatag

SEQ ID NO: 10318 - protein, 683 aa, Rattus norvegicus
  ref <308>: DATABASE ACCESSION NUMBER: SWISS-Prot / O08838
  ref <309>: DATABASE ENTRY DATE: 2001-10-16
MADIKTGIFAKNVQKRLNRAQEKVLQKLGKADETKDEQFEEYVQNFKRQEAEGTRLQRELRGYLAAIKGMQEASMKLTESLHEVYEPDWYGREDVKMVGEKCDVLWEDFHQKLVDGSLLTLDTYLGQFPDIKNRIAKRSRKLVDYDSARHHLEALQSSKRKDESRISKAEEEFQKAQKVFEEFNVDLQEELPSLWSRRVGFYVNTFKNVSSLEAKFHKEIAVLCHKLYEVMTKLGDQHADKAFSIQGAPSDSGPLRIAKTPSPPEEASPLPSPTASPNHTLAPASPAPVRPRSPSQTRKGPPVPPLPKVTPTKELQQENIINFFEDNFVPEINVTTPSQNEVLEVKKEETLLDLDFDPFKPDVTPAGSAAATHSPMSQTLPWDLWTTSTDLVQPASGGSFNDFTQPQDTSLFTMQTDQNMAETEQALPTEPQAEEPPTTAAAPTAGLDLGLEMEEPKEEAAIPPGTDAGETVGTEGSTGEEAEAEKAALPAGEGESPEGAKIDVESTELASSESPQAAELEAGAPQEKVIPSVVIEPASNHEGEEHQETTTGTETREATEDVAPQGPAGEKQELATEPTPLDSQAATPAPAGAVDASLSAGDAAQELPPGFLYKVETLHDFEAANSDELTLQRGDVVLVVPSDSEADQDAGWLVGVKESDWLQYRDLATYKGLFPENFTRHLE

SEQ ID NO: 10319 - DNA, 2377 bp, Homo sapiens
  ref <308>: DATABASE ACCESSION NUMBER: EMBL / U07616
  ref <309>: DATABASE ENTRY DATE: 1995-02-16
cggctctcagctgcactcctgtacatccacctgtcttcaggagagcactgtttgtgtgtgcccagccccgctgcgcgctctgctcttcgcagctccccggacccgcagccatggccgacatcaagacgggcatcttcgccaagaacgtccagaagcgactcaaccgcgcgcaggaaaaggtcctccaaaagctggggaaagctgatgagacaaaagacgaacagttcgaagaatatgtccagaacttcaaacggcaagaagcagagggtaccagacttcagcgagaactccgaggatatttagcagcaatcaaaggcatgcaggaggcctccatgaagctcacagagtcgctgcatgaagtctatgagcctgactggtatgggcgggaagatgtgaaaatggttggtgagaaatgtgatgtgctgtgggaagacttccatcaaaaactcgtggatgggtccttgctaacactggatacctacctggggcaatttcctgacataaagaatcgcatcgccaagcgcagcaggaagctagtggactatgacagtgcccgccaccatctggaagctctgcagagctccaagaggaaggatgagagtcgaatctctaaggcagaagaagaatttcagaaagcacagaaagtgtttgaagagtttaacgttgacttacaagaagagttaccatcattatggtcaagacgagttggattttatgttaatactttcaaaaacgtctccagccttgaagccaagtttcataaggaaattgcggtgctttgccacaaactgtatgaagtgatgacaaaactgggtgaccagcacgccgacaaggccttcaccatccaaggagcgcccagtgattcgggtcctctccgcattgcaaagacaccatcaccgcctgaggagccttcacccctcccgagcccgacagcaagtccaaatcatacattagcacctgcgtctcccgcaccagcacggcctcggtcaccttcacagacaaggaaagggcctcctgtcccacctctacctaaagtcaccccgacaaaggaactgcagcaggagaacatcatcagtttctttgaggacaactttgttccagaaatcagtgtgacaacaccttcccagaatgaagtccctgaggtgaagaaagaggagactttgctggatctggactttgatcctttcaagcccgaggtgacacctgcaggttctgctggagtgacccactcacccatgtctcagacattgccctgggacctatggacgacaagcactgatttggtacagccggcttctggtggttcatttaatggattcacacagccccaggatacttcattattcacaatgcagacagaccagagtatgatctgcaacttggctgaatctgaacaggctccacccacagagccaaaagcagaggagcctctggctgctgtcacacctgccgttggtctggaccttggaatggacactcgggctgaggagccagtggaggaggcagtgatcatacctggagctgatgctgatgcagctgttggaaccttggtgtcagcagctgagggggccccaggagaggaagcagaggcggagaaggccactgtccctgccggggaaggagtaagtttagaggaggccaaaattggaactgaaaccactgagggtgcagagagtgcccaacctgaagcagaggagctcgaagcaacagtgcctcaggagaaggtcattccttcggtggtcatagagcctgcctccaaccatgaagaggaaggagaaaacgaaataactataggtgcagagcccaaggagaccaccgaggacgcggctcctccgggccccaccagcgagacaccggagctggctacggagcagaagcctatccaggaccctcagcccacgccttctgcaccagccatgggggctgctgaccagctagcatctgcaagggaggcctctcaggaattgcctcctggctttctctacaaggtggaaacactgcatgattttgaggcagcaaattctgatgaacttaccttacaaaggggtgatgtggtgctggtggtcccctcagattcagaagctgatcaggatgcaggctggctggtgggagtgaaggaatcagactggcttcagtacagagaccttgccacctacaaaggcctctttccagagaacttcacccgacgcttagattagggcaacaagtactgcaagaaggagctcagttacggggtttttaaaccttcatgaaaacctgaagagttcacttttgttattatgctcttaatgatttacagactgatgccagacaaaccttgggaagatgtatcaatggagcatgtgtgcaaaaaaatgtaagaggaaaaaaaaaaccg

SEQ ID NO: 10320 - protein, 695 aa, Homo sapiens
  ref <308>: DATABASE ACCESSION NUMBER: SWISS-Prot / P49418
  ref <309>: DATABASE ENTRY DATE: 2001-10-16
MADIKTGIFAKNVQKRLNRAQEKVLQKLGKADETKDEQFEEYVQNFKRQEAEGTRLQRELRGYLAAIKGMQEASMKLTESLHEVYEPDWYGREDVKMVGEKCDVLWEDFHQKLVDGSLLTLDTYLGQFPDIKNRIAKRSRKLVDYDSARHHLEALQSSKRKDESRISKAEEEFQKAQKVFEEFNVDLQEELPSLWSRRVGFYVNTFKNVSSLEAKFHKEIAVLCHKLYEVMTKLGDQHADKAFTIQGAPSDSGPLRIAKTPSPPEEPSPLPSPTASPNHTLAPASPAPARPRSPSQTRKGPPVPPLPKVTPTKELQQENIISFFEDNFVPEISVTTPSQNEVPEVKKEETLLDLDFDPFKPEVTPAGSAGVTHSPMSQTLPWDLWTTSTDLVQPASGGSFNGFTQPQDTSLFTMQTDQSMICNLAESEQAPPTEPKAEEPLAAVTPAVGLDLGMDTRAEEPVEEAVIIPGADADAAVGTLVSAAEGAPGEEAEAEKATVPAGEGVSLEEAKIGTETTEGAESAQPEAEELEATVPQEKVIPSVVIEPASNHEEEGENEITIGAEPKETTEDAAPPGPTSETPELATEQKPIQDPQPTPSAPAMGAADQLASAREASQELPPGFLYKVETLHDFEAANSDELTLQRGDVVLVVPSDSEADQDAGWLVGVKESDWLQYRDLATYKGLFPENFTRRLD

SEQ ID NO: 10321 - DNA, 2024 bp, Rattus norvegicus
  ref <308>: DATABASE ACCESSION NUMBER: EMBL / Y13413
  ref <309>: DATABASE ENTRY DATE: 1998-06-11
ggtcttccgccgtcggaggaactcttagttaccgaccggtgcggagttcatcgtgtcagtacgcttcgtaggacacacgcaccgaaacacgcgaggactcgggaaaccagacgcacaggcagctcaggcccgcctctgccctcccccaaggccgtccctatcccgcccagtgtttgtttgcgcggtgccagttggcccggcggtctccggcgcagagaggctgggcttgtgtgccctgcagctccggaggtcgccttgggctgagaacgcaggccagtcgagactatgctgggcaaggattatatgctggccatcattctggtcaactgcgatgatgacttgtggggggaccaaaatctggagggggaaacaggcctaccccctggctggagaaagatccgtgatgctgcaggaacttattattggcatgtacccagcggtagcactcagtggcagcgcccaacctgggaactagcagaggacccaggaacgggaaaagaggggatttgggaactacgacctcccaaggggagatctttctccagcctggacagctcattgaaccgaagtaactctctaacatggtataatgaagattcctatgtccggagcctggagccaggagctaagtgctttgcagtccgctctctgggctgggtagaggtccctgaggaggacctggcaccagggaagagcagtattgctgtcaataactgtatccagcagctagcccaggcccgaaaccggagccagcctcatgatggtgcctggggtgagggccagaacatgctgatggtcctgaaaaaagatgccatgagcttgctgaatcccctggaccacagtctgatccattgtcagcctctggttcacatccgtgtatggggtgtgggcagctccaagggccgtgacagggactttgcttttgttgcgggtgacaaagacagctgtatgcttaaatgtcatgtgtttcgctgtgatgtgcccgcaaaagccatagcaagtcgtctacaggggctctgtgcacagatcttgtcagagagggtaggactcagtggagaagctgcttgttgttccccagatcctatttcccctgaagacttcccaaggcaagtggaattgctggatgcagtgagccaggctgctcagaagtatgaggcactgtacatggggatcctaccagtcaccaaagccatgggtatggatgtgctgaatgaggccattggtaccctcactggccgtggggaccggaaaacctgggtccccgctatgctcagtgtgtctgactctctgatgactgcacatcctattcaggcagaggctggtgcagaggaagagccactgtggcagtgtcctgtccgccttgtaacctttattggtgttggccatgatccacatacctttggcctcatcgctgatcttggttgtcagagcttccagtgtgcagctttctggtgccaacctcatgctgggggactctctgaagctgtgcaagctgcctgcatggttcagtaccagaagtgtctagtggcctcagcagctcggggtaaggcctggggtgctcaggctcgcgctcgcctgcggctcaagcggaccagctccatggactccccaggcggcccccttcctccccctctactcaaaggaggggttgggggtgctggagcagctcctcgaaagcggggtgtcttctcatttcttgatgccttcaggctaaaacctctcttctccatatgtcctaaattgatcttagagggctggggaaagaggctctatactcttccagtccctagggttctgtagcctctcaccttcctgccatccctgatcccttgcctactctgtatttatgaccaagttcgttgtttatatggatgactgagaggccctgcactctaacttaggcctgtagcaccactttcctttggtccttttgttccttgcccctgtccagccctgacaattggctctacctcatcaactttatagcagaatcagtgaaaataaaaatccctcagtaaaaaaaa

SEQ ID NO: 10322 - protein, 504 aa, Rattus norvegicus
  ref <308>: DATABASE ACCESSION NUMBER: SWISS-Prot / O35827
  ref <309>: DATABASE ENTRY DATE: 2001-10-16
MLGKDYMLAIILVNCDDDLWGDQNLEGETGLPPGWRKIRDAAGTYYWHVPSGSTQWQRPTWELAEDPGTGKEGIWELRPPKGRSFSSLDSSLNRSNSLTWYNEDSYVRSLEPGAKCFAVRSLGWVEVPEEDLAPGKSSIAVNNCIQQLAQARNRSQPHDGAWGEGQNMLMVLKKDAMSLLNPLDHSLIHCQPLVHIRVWGVGSSKGRDRDFAFVAGDKDSCMLKCHVFRCDVPAKAIASRLQGLCAQILSERVGLSGEAACCSPDPISPEDFPRQVELLDAVSQAAQKYEALYMGILPVTKAMGMDVLNEAIGTLTGRGDRKTWVPAMLSVSDSLMTAHPIQAEAGAEEEPLWQCPVRLVTFIGVGHDPHTFGLIADLGCQSFQCAAFWCQPHAGGLSEAVQAACMVQYQKCLVASAARGKAWGAQARARLRLKRTSSMDSPGGPLPPPLLKGGVGGAGAAPRKRGVFSFLDAFRLKPLFSICPKLILEGWGKRLYTLPVPRVL

SEQ ID NO: 10323 - DNA, 1809 bp, Homo sapiens
  ref <308>: DATABASE ACCESSION NUMBER: EMBL / AF224708
  ref <309>: DATABASE ENTRY DATE: 2000-04-24
catatggagcagccggggttatgctgggcaaggattacatgctggccatcattctggtcaactgcgatgatgacttgtggggggaccacagtctggaggtggaggctggcctgcctcctggctggaggaagatccacgatgctgcaggtacttactactggcatgtacccagcggtagcacccagtggcagcgcccaacctgggaactaggagatgcagaggacccaggcacgggaacggaggggatctggggactgcggccccccaaagggagatccttctccagcctggagagttcactggaccggagtaactctctgtcctggtatggtggggaatcctacatccagagcatggagccaggggctaagtgctttgcagtccgctctctgggctgggtagaggtacctgaagaggacctggcaccggggaagagcagtattgcagtcaataactgtatccagcagctggcccagacccgcagccggagccagcctccagatggtgcctggggtgagggccagaacatgctgatgatcctgaagaaggatgccatgagcctagtgaatcccctggaccacagtctgatccactgccagcctctggtgcacatccgtgtgtggggcgtggggagctccaagggccgccccatctctgcccctgctagggacttcgcttttgtggcaagtgacaaagatagctgtatgctcaagtgccatgtgtttcgctgtgatgtccctgccaaggccattgccagtgccctacatgggctttgtgcccagatcttgtcagagcgagtagaggtcagtggtgatgcctcttgctgctccccagaccccatctctcctgaagacctgccacggcaagtggagctgctagatgcggtaagccaagctgctcagaagtacgaggcactgtatatggggacactgccagtcaccaaggccatgggcatggatgtgctgaacgaggccattggtaccctcactgccaggggggaccggaatgcctgggtccccaccatgctcagtgtgtctgactctctcatgactgcacatcccattcaggcagaggccagtacagaggaggagccattgtggcagtgccctgtgcgccttgtgacatttattggtgttggccgcgacccacacacctttggcctcatcgctgacctgggccgtcagagcttccagtgcgcagccttctggtgccagccccatgcagggggactctctgaagctgtgcaggctgcctgtatggttcagtaccagaagtgtcttgtggcctctgcagctcgaggcaaggcctggggtgcccaggcccgtgcccgcctgcggctcaagcggaccagctccatggattccccaggaggtcccctgcccctccccctgctcaaaggaggggttggcggtgcaggggcaacccctcgaaagcggggtgtcttctcttttcttgatgccttccggctgaaaccctctctgctccatatgccctaaacttatctgggaaggctggggaagtaggctctgggtccatgcctaactctgtaccgttttattcctcaaggcctatagcctgtcactccttgaagccttctctgcctgtccctccgatccttgtccaccgtctatttattgcccaatttattgtttatacggatgactgggaggcactgcgccacaacgtaggaccctggctcccctttccttgggtccttgtgttccttgcccctgtccaaccctggacagttggctctacctcagtaacactttatagcaaaatcagtgcaaataaaaatccctcagtgac

SEQ ID NO: 10324 - protein, 486 aa, Homo sapiens
  ref <308>: DATABASE ACCESSION NUMBER: SWISS-Prot / O95704
  ref <309>: DATABASE ENTRY DATE: 2002-06-15
MLGKDYMLAIILVNCDDDLWGDHSLEVEAGLPPGWRKIHDAAGTYYWHVPSGSTQWQRPTWELGDAEDPGTGTEGIWGLRPPKGRSFSSLESSLDRSNSLSWYGGESYIQSMEPGAKCFAVRSLGWVEVPEEDLAPGKSSIAVNNCIQQLAQTRSRSQPPDGAWGEGQNMLMILKKDAMSLVNPLDHSLIHCQPLVHIRVWGVGSSKGRDRDFAFVASDKDSCMLKCHVFRCDVPAKAIASALHGLCAQILSERVEVSGDASCCSPDPISPEDLPRQVELLDAVSQAAQKYEALYMGTLPVTKAMGMDVLNEAIGTLTARGDRNAWVPTMLSVSDSLMTAHPIQAEASTEEEPLWQCPVRLVTFIGVGRDPHTFGLIADLGRQSFQCAAFWCQPHAGGLSEAVQAACMVQYQKCLVASAARGKAWGAQARARLRLKRTSSMDSPGGPLPLPLLKGGVGGAGATPRKRGVFSFLDAFRLKPSLLHMP

SEQ ID NO: 10325 - DNA, 2024 bp, Rattus norvegicus; identical to SEQ ID NO: 10321
  ref <308>: DATABASE ACCESSION NUMBER: EMBL / Y13413
  ref <309>: DATABASE ENTRY DATE: 1998-06-11

SEQ ID NO: 10326 - protein, 504 aa, Rattus norvegicus; identical to SEQ ID NO: 10322
  ref <308>: DATABASE ACCESSION NUMBER: SWISS-Prot / O35827
  ref <309>: DATABASE ENTRY DATE: 2001-10-16

SEQ ID NO: 10327 - DNA, 1809 bp, Homo sapiens; identical to SEQ ID NO: 10323
  ref <308>: DATABASE ACCESSION NUMBER: EMBL / AF224708
  ref <309>: DATABASE ENTRY DATE: 2000-04-24

SEQ ID NO: 10328 - protein, 486 aa, Homo sapiens; identical to SEQ ID NO: 10324
  ref <308>: DATABASE ACCESSION NUMBER: SWISS-Prot / O95704
  ref <309>: DATABASE ENTRY DATE: 2002-06-15

SEQ ID NO: 10329 - DNA, 328 bp, Rattus norvegicus
  ref <308>: DATABASE ACCESSION NUMBER: EMBL / Y13590
  ref <309>: DATABASE ENTRY DATE: 1998-02-24
ctggcacatctcccagaatgagtaccacaggagctaaggctgtgaaaatagagtctgagaagtcacaatcaagtgagccacctgtgattcatgagaaaaagccaaaaggaaagccaaaggaagggtcagagccccaaactcttcctaagcatgcatcagatacaggaagtaagcatgctcacaaagaaaaagcactttccagatcaaatgagcagatagtgtcagagaaatcatcagaatcaaagacaaaatttcaagatgcaacataaagtttatgcattttggtatctgaataaaaattcttcagctggtggatggtgacttttga

SEQ ID NO: 10330 - protein, 83 aa, Rattus norvegicus
  ref <308>: DATABASE ACCESSION NUMBER: SWISS-Prot / CAA73918
  ref <309>: DATABASE ENTRY DATE: 1998-11-01
MSTTGAKAVKIESEKSQSSEPPVIHEKKPKGKPKEGSEPQTLPKHASDTGSKHAHKEKALSRSNEQIVSEKSSESKTKFQDAT

SEQ ID NO: 10331 - DNA, 440 bp, Homo sapiens
  ref <308>: DATABASE ACCESSION NUMBER: EMBL / AW995804
  ref <309>: DATABASE ENTRY DATE: 2001-08-31
gtctcttctttggcttctccttgactttatccatcacaggttttccatcttctggatctgcttcctctttccccaggctatcagccaaggcttctacagcatcatctggcactgtgcccttcaaggtagccggctcagggggtgctgactgtatactacacatggaggtccgacacacagcctccgacacaggagctggagcagcggccttagattcttctgtcctttcagttggcttagatggtttctctttacattcagaccggtcaaaatcttctgaaataaatcatagaagagaatcactttttggatttttaatccaggtccttgtgtgtgtatgaaatacacacatatcttccttattagtcatggaagggcaaaagtggaccaaaaacaggtcagctaagacaggcatgtctggcttctgggctgtagctcag

SEQ ID NO: 10332 - protein, 708 aa, Homo sapiens
MNPTETKAIPVSQQMEGPHLPNKKKHKKQAVKTEPEKKSQSTKLSVVHEKKSQEGKPKEHTEPKSLPKQASDTGSNDAHNKKAVSRSAEQQPSEKSTEPKTKPQDMISAGGESVAGITAISGKPGDKKKEKKSLTPAVPVESKPDKPSGKSGMDAALDDLIDTLGGPEETEEENTTYTGPEVSDPMSSTYIEELGKREVTIPPKYRELLAKKEGITGPPADSSKPIGPDDAIDALSSDFTCGSPTAAGKKTEKEESTEVLKAQSAGTVRSAAPPQEKKRKVEKDTMSDQALEALSASLGTRQAEPELDLRSIKEVDEAKAKEEKLEKCGEDDETIPSEYRLKPATDKDGKPLLPEPEEKPKPRSESELIDELSEDFDRSECKEKPSKPTEKTEESKAAAPAPVSEAVCRTSMCSIQSAPPEPATLKGTVPDDAVEALADSLGKKEADPEDGKPVMDKVKEKAKEEDREKLGEKEETIPPDYRLEEVKDKDGKPLLPKESKEQLPPMSEDFLLDALSEDFSGPQNASSLKFEDAKLAAAISEVVSQTPASTTQAGAPPRDTSQSDKDLDDALDKLSDSLGQRQPDPDENKPMEDKVKEKAKAEHRDKLGERDDTIPPEYRHLLDDNGQDKPVKPPTKKSEDSKKPADDQDPIDALSGDLDSCPSTTETSQNTAKDKCKKAASSSKAPKNGGKAKDSAKTTEETSKPKDD

SEQ ID NO: 10333 - DNA, 606 bp, Rattus norvegicus
  ref <308>: DATABASE ACCESSION NUMBER: EMBL / Y13591
  ref <309>: DATABASE ENTRY DATE: 1998-02-24
ctggcacatctcccagaatgagtaccacaggagctaaggctgtgaaaatagagtctgagaagtctcaatcaagtgagccacctgtgattcatgagaaaaagccaaaaggaaagccaaaggaagggtcagagacaaaatttcaagatgctccttctgctgatggagagagtgtggctggaggtgtgactgtggccactgcctcagacaaggtggttgttaagaaaaaagagaagaaatcattaacacctactttacctatggagtccacactaaacaagctatctgacaagtcaggcgtgaatgctgctttggatgacctgatagacaccttaggtgaatgtgaagatactaacaaagatgatccaccatatactggaccagtagttctggacccaatggattctacctaccttgaggcactgggtataaaagaagagactattcctccagagtataggaaacttctggagaaaaatgaagctatcacaggacctcttccagattctcctaaacctatgggaatcgaccatgctatagatgcaacataaagtttatgcattttggtatctgaataaaaattcttcagctggtggatggtgactttta

SEQ ID NO: 10334 - protein, 176 aa, Rattus norvegicus
  ref <308>: DATABASE ACCESSION NUMBER: SWISS-Prot / CAA73919
  ref <309>: DATABASE ENTRY DATE: 2001-06-01
MSTTGAKAVKIESEKSQSSEPPVIHEKKPKGKPKEGSETKFQDAPSADGESVAGGVTVATASDKVVVKKKEKKSLTPTLPMESTLNKLSDKSGVNAALDDLIDTLGECEDTNKDDPPYTGPVVLDPMDSTYLEALGIKEETIPPEYRKLLEKNEAITGPLPDSPKPMGIDHAIDAT

SEQ ID NO: 10335 - DNA, 440 bp, Homo sapiens; identical to SEQ ID NO: 10331
  ref <308>: DATABASE ACCESSION NUMBER: EMBL / AW995804
  ref <309>: DATABASE ENTRY DATE: 2001-08-31

SEQ ID NO: 10336 - protein, 708 aa, Homo sapiens; identical to SEQ ID NO: 10332

SEQ ID NO: 10337 - DNA, 1950 bp, Rattus norvegicus
  ref <308>: DATABASE ACCESSION NUMBER: EMBL / Y15054
  ref <309>: DATABASE ENTRY DATE: 1999-07-28
gaggatccgggtaccatgcaccaaccttaaaggactcaacctcacaacaccgggcgaaagcgatggcttctgcgctaaccgactgcgtgtggcggttcccctgctcagcagtggtgggcaggtagctgtgcttgagctgcagaagccaggccgcctgcctgacacaggactgcctacgcttcagaatggggcggctgtaatggatctggtctgggatccctttgatccgcaccggcttgctgtggctggggaggacgcccggatccggctgtggcgggtgccccctggtggcctcaagaacattctcaccacacctgagactgtgcttacaggccacacagaaaagatttactctctgcgcttccaccccctggctgccgatgtactggcttccagttcttatgacctaaccattcgtatctgggaccttcaggctagaactgagcagctaaggctgcaaggccatcaggaccagattttcagcctggcttggagtccagatggaaagcagctggccactgtctgcaaggatgggcgtgttcgggtctatgatccccggagcagccctttacccctgcaggacggtccaggacctgaaggtggccgcggagccgcatcgtctgggtgtgtaatggtggttgtctgctggtatctggttttgacagccgaagtgagcgccagctgcagctgtacatggctgatgccctggcagaaggcccttcagcactgctgggcctcgattgtagctccctctaccctgcttcctagctatgaccctgacacaggcctggtgcttctcactggcaagggagatacccgcgtgttcctgtacgaggtgatcccagaggcccccttcttcttggagtgcaacagcttcacatcacctgaccctcacaagggctttatccttctgcccaagactgagtgtgacattcaggatgtggagtttgcccgatgcctgcggctacgccagacctccttggagcctgttgctttccggctgccccgggtcagaaaagaattccaagatgatgtgttcccagatacagctgtgacctgggcgtccgcactcgacgccaaagcctggttcaagggtgctaatggacaaccccggctactgagtttacagccccctggcatgaccccagtgagccaagccccccgggaggtccctgcccgaagaaccccatcctcagcacagtacttggaagagaagtctgaccagcaaaagaaagaagagctgctgaatgccatggtggcaaagctggggaaccgagaagacccactgccccaggactcctttgaaggggtggatgaagatgagtgggactagcctgcatgtgaggcacgcctacccacagctgccactgccacctccctgaaccgcctgcggcccctccacaccttatatctctgcaaactgaacagtgctgcgctggccctggcacacacatccagcccagaagccctgggcttcatgcaggcctcaggcacttccacagctgctgggcctcgccgcagctccagagactgtctgctcctttgctgtctggggccagctgtttattctcagcggcctgtcagcatgagacaccactgggtgggaggtaggtgtcagtagcatgtctctgggccaaccctggatggcctggctctcctagtctttctctggttttctctaacatcatctgccgtcactacaagccaagctatcttgcctaccgcaccagccccagtcaaggacactgggagctggtcccccacaggctgttggggacagctctctcctcgggcctaggaaccatttgccctgcttcttggggcttgagaaccaggagaaagggtctcgtggagctaacagccttcattacagtggtgtggaccccacaacaaacagcctatacactctggatgtgtccagcaattaaacttttctaagctaaaaaaaaa

SEQ ID NO: 10338 - protein, 443 aa, Rattus norvegicus
  ref <308>: DATABASE ACCESSION NUMBER: SWISS-Prot / O35828
  ref <309>: DATABASE ENTRY DATE: 2002-06-15
RIRVPCTNLKGLNLTTPGESDGFCANRLRVAVPLLSSGGQVAVLELQKPGRLPDTGLPTLQNGAAVMDLVWDPFDPHRLAVAGEDARIRLWRVPPGGLKNILTTPETVLTGHTEKIYSLRFHPLAADVLASSSYDLTIRIWDLQARTEQLRLQGHQDQIFSLAWSPDGKQLATVCKDGRVRVYDPRSSPLPLQDGPGPEGGRGAASSGCVMVVVCWYLVLTAEVSASCSCTWLMPWQKALQHCWASIVAPSTLLPSYDPDTGLVLLTGKGDTRVFLYEVIPEAPFFLECNSFTSPDPHKGFILLPKTECDIQDVEFARCLRLRQTSLEPVAFRLPRVRKEFQDDVFPDTAVTWASALDAKAWFKGANGQPRLLSLQPPGMTPVSQAPREVPARRTPSSAQYLEEKSDQQKKEELLNAMVAKLGNREDPLPQDSFEGVDEDEWD

SEQ ID NO: 10339 - DNA, 1632 bp, Rattus norvegicus
  ref <308>: DATABASE ACCESSION NUMBER: EMBL / Y15068
  ref <309>: DATABASE ENTRY DATE: 1998-03-31
atggagcaggtgaatgagctaaaggagaagggcaataaggccctgagtgctgggaacattgatgatgccttacagtgctactctgaggcaattaaactagatcctcagaaccatgtgctctatagcaatcgctctgcagcctatgccaagaaaggagactaccagaaggcgtatgaggacggttgcaagactgttgacctgaagcctgactggggcaagggttattcaagaaaagcagcagcccttgagttcctaaaccggtttgaagaagccaaacgaacctatgaagaaggtttaaaacatgaagccaataatctacagcttaaggaaggcttgcagaacatggaggccaggttggcagagaggaaatttatgaatcctttcaacttgcctaatctgtaccagaagttagagaatgatcccaggacaaggacactgctcagtgaccccacctacagggaactcatagagcaactacagaacaagccttcagacctgggcacgaaactccaagatccccgggtcatgactactctcagtgtcctccttggagttgatctgggcagtatggatgaagaggaagaggcagcaacacccccacctccaccccctcctaaaaaggaggccaagccagaaccaatggaagaagatcttccagagaataagaaacaggctctgaaagaaaaggagctgggaaatgatgcctacaagaagaaagattttgacaaggccctgaagcattatgacaaggccaaggagctggaccctaccaatatgacttacataactaatcaagcagctgtgcactttgagaagggcgactacaacaaatgccgggagctctgtgagaaggccattgaagtaggcagagagaaccgagaggactaccgtcagatcgccaaagcttatgctcgaattggcaattcctatttcaaagaagaaaggtacaaggatgctatccatttctacaacaagtctctggcagagcaccgaaccccagatgtgctcaagaagtgccagcaggcagagaaaattctgaaggaacaagagcgactggcttatatcaaccctgatttggctttggaggaaaagaataagggcaatgagtgcttccagaaaggggactacccccaggccatgaagcactatacagaagccattaaaaggaacccaagagatgccaaactatacagcaaccgagccgcctgctacaccaagctcctggagtttcagctggcactcaaggactgtgaagagtgcatccagctagagccaaccttcatcaagggttatacacggaaagcagctgccctggaagccatgaaggactatacaaaagccatggatgtgtaccagaaggcattagacctggactccagctgtaaggaagcagcagatggttaccaacgctgtatgatggcacagtacaacagacatgatagccctgaggatgtgaaacggcgggccatggctgaccctgaggtacagcagataatgagtgacccagccatgaggctcatcctggagcagatgcaaaaggacccccaagctctgagcgaacacttaaagaatcctgtaatagcacagaagatccagaagctgatggatgtgggtctcatcgcaattcggtga

SEQ ID NO: 10340 - protein, 544 aa, Rattus norvegicus
  misc_feature (1)..(544): Xaa=Unknown amino acid
MEQVNELKEKGNKALSAGNIDDALQCYSEAIKLDPQNHVLYSNRSAAYAKKGDYQKAYEDGCKTVDLKPDWGKGYSRKAAALEFLNRFEEAKRTYEEGLKHEANNLQLKEGLQNMEARLAERKFMNPFNLPNLYQKLENDPRTRTLLSDPTYRELIEQLQNKPSDLGTKLQDPRVMTTLSVLLGVDLGSMDEEEEAATPPPPPPPKKEAKPEPMEEDLPENKKQALKEKELGNDAYKKKDFDKALKHYDKAKELDPTNMTYITNQAAVHFEKGDYNKCRELCEKAIEVGRENREDYRQIAKAYARIGNSYFKEERYKDAIHFYNKSLAEHRTPDVLKKCQQAEKILKEQERLAYINPDLALEEKNKGNECFQKGDYPQAMKHYTEAIKRNPRDAKLYSNRAACYTKLLEFQLALKDCEECIQLEPTFIKGYTRKAAALEAMKDYTKAMDVYQKALDLDSSCKEAADGYQRCMMAQYNRHDSPEDVKRRAMADPEVQQIMSDPAMRLILEQMQKDPQALSEHLKNPVIAQKIQKLMDVGLIAIRX

SEQ ID NO: 10341 - DNA, 2113 bp, Homo sapiens
  ref <308>: DATABASE ACCESSION NUMBER: EMBL / M86752
  ref <309>: DATABASE ENTRY DATE: 2000-03-04
gtgcggttgggaacgcggagcggacggattcgattcaacggggttccggaccgcgctgcgctatggagcaggtcaatgagctgaaggagaaaggcaacaaggccctgagcgtgggtaacatcgatgatgccttacagtgctactccgaagctattaagctggatccccacaaccacgtgctgtacagcaaccgttctgctgcctatgccaagaaaggagactaccagaaggcttatgaggatggctgcaagactgtcgacctaaagcctgactggggcaagggctattcacgaaaagcagcagctctagagttcttaaaccgctttgaagaagccaagcgaacctatgaggagggcttaaaacacgaggcaaataaccctcaactgaaagagggtttacagaatatggaggccaggttggcagagagaaaattcatgaaccctttcaacatgcctaatctgtatcagaagttggagagtgatcccaggacaaggacactactcagtgatcctacctaccgggagctgatagagcagctacgaaacaagccttctgacctgggcacgaaactacaagatccccggatcatgaccactctcagcgtcctccttggggtcgatctgggcagtatggatgaggaggaagagattgcaacacctccaccaccaccccctcccaaaaaggagaccaagccagagccaatggaagaagatcttccagagaataagaagcaggcactgaaagaaaaagagctggggaacgatgcctacaagaagaaagactttgacacagccttgaagcattacgacaaagccaaggagctggaccccactaacatgacttacattaccaatcaagcagcggtatactttgaaaagggcgactacaataagtgccgggagctttgtgagaaggccattgaagtggggagagaaaaccgagaagactatcgacagattgccaaagcatatgctcgaattggcaactcctacttcaaagaagaaaagtacaaggatgccatccatttctataacaagtctctggcagagcaccgaaccccagatgtgctcaagaaatgccagcaggcagagaaaatcctgaaggagcaagagcggctggcctacataaaccccgacctggctttggaggagaagaacaaaggcaacgagtgttttcagaaaggggactatccccaggccatgaagcattatacagaagccatcaaaaggaacccgaaagatgccaaattatacagcaatcgagctgcctgctacaccaaactcctggagttccagctggcactcaaggactgtgaggaatgtatccagctggagccgaccttcatcaagggttatacacggaaagccgctgcgctggaagcgatgaaggactacaccaaagccatggatgtgtaccagaaggcgctagacctggactccagctgtaaggaggcggcagacggctaccagcgctgtatgatggcgcagtacaaccggcacgacagccccgaagatgtgaagcgacgagccatggccgaccctgaggtgcagcagatcatgagtgacccagccatgcgccttatcctggaacagatgcagaaggacccccaggcactcagcgaacacttaaagaatcctgtaatagcacagaagatccagaagctgatggatgtgggtctgattgcaattcggtgatgacttgttcatccccccttcccttcgccctcatgtggaaagaggagctgggaccgcggcgagcagcacggagcggaagggagagcaggggagagaaggcctcatctctctatatttatacataaccccggggaagacacagagactcgtacctgcgctgtttgtgccgccgctgcctctgggccctcccagcacacgcatggtctcttcaccgctgccctcgagttccatgtctctttcccctgcccctagttgctgtctcggctgctctcccatagttggttttttttttatttggggcagtgggcatgttatggggaggggagggggttcttccagcctcaggtcccagctgtctcacgttgtttattctgcgtccccttctccaataaaacaagccagttgggcgtggttataac

SEQ ID NO: 10342 - protein, 543 aa, Homo sapiens
  ref <308>: DATABASE ACCESSION NUMBER: SWISS-Prot / P31948
  ref <309>: DATABASE ENTRY DATE: 2002-06-15
MEQVNELKEKGNKALSVGNIDDALQCYSEAIKLDPHNHVLYSNRSAAYAKKGDYQKAYEDGCKTVDLKPDWGKGYSRKAAALEFLNRFEEAKRTYEEGLKHEANNPQLKEGLQNMEARLAERKFMNPFNMPNLYQKLESDPRTRTLLSDPTYRELIEQLRNKPSDLGTKLQDPRIMTTLSVLLGVDLGSMDEEEEIATPPPPPPPKKETKPEPMEEDLPENKKQALKEKELGNDAYKKKDFDTALKHYDKAKELDPTNMTYITNQAAVYFEKGDYNKCRELCEKAIEVGRENREDYRQIAKAYARIGNSYFKEEKYKDAIHFYNKSLAEHRTPDVLKKCQQAEKILKEQERLAYINPDLALEEKNKGNECFQKGDYPQAMKHYTEAIKRNPKDAKLYSNRAACYTKLLEFQLALKDCEECIQLEPTFIKGYTRKAAALEAMKDYTKAMDVYQKALDLDSSCKEAADGYQRCMMAQYNRHDSPEDVKRRAMADPEVQQIMSDPAMRLILEQMQKDPQALSEHLKNPVIAQKIQKLMDVGLIAIR

SEQ ID NO: 10343 - DNA, 1879 bp, Rattus norvegicus
  ref <308>: DATABASE ACCESSION NUMBER: EMBL / Y15748
  ref <309>: DATABASE ENTRY DATE: 1998-02-05
gcggccgcgcggagcagcgcaacgctgcgggggaggcgcccgcgccgactcggggctcatggccaggaccaccagccagctgtatgacgctgtgcccattcagtccagtgtggtgctatgttcctgcccatccccatcaatggtgaggtcccagactgagcccagctcgtcccctggcattcctagtggtgttagcaggcagggatccaccatggacggcaccacagctgaagcccgaccaagcaccaaccccttgcagcagcaccctgcccagctgccaccacagcctcgcaagaaacgccctgaagacttcaagtttgggaaaattcttggcgagggctctttttcgacagttgttctggcccgagaactggccacttccagagaatatgctattaaaattctggagaaacgtcatataataaaagaaaacaaagtcccgtatgtaactagagagagagatgtgatgtcacgcctggatcaccccttctttgtgaaactttactttacgtttcaggacgacgaaaagctgtattttggccttagttatgccaaaaatggagagctactcaaatacatccgcaaaatcggttcatttgatgagacctgtacccggttttacacagctgagattgtgtctgctttagagtacttgcatggcaagggcatcattcacagagaccttaaaccagaaaacatcttgttaaacgaagacatgcacatccagatcacagattttggaacagccaaagtattatccccagacagcaaacaagctagagccaattcatttgtaggaacagcgcagtatgtttctccagagctgctcacagagaagtcggcgtgtaaaagttcagacctttgggcccttggatgtataatctatcagcttgtggcaggacttccaccattcagagccggaaatgaatatcttatatttcagaagatcattaagttggaatatgatttcccagaaaaattcttccctaaggcaagagatcttgtggaaaaactcttggttttagatgccacaaagcgtttaggctgtgaagagatggaagggtacgggcctctcaaagctcatccattctttgagtccatcacgtgggagaatctgcaccagcagacgcctccgaagctcacagcttacttgccagccatgtcagaagatgatgaagactgttatggcaattacgacaatctcctgagccagtttggctgcatgcaggtgtcatcatcctcctcttcccactccctgtgtgcggtggatgccagcctgccccagaggtcgggcagcaacatagagcagtacattcatgatttggacactaactcttttgaactagacttacagttttcagaagatgaaaaaaggttgttattggaaaagcaagccggtggaaacccttggcaccagtttgtagaaaataatctaatattaaaaatgggcccagtggataagcgaaagggtttatttgcaagacgacggcagttattactcacagaagggccacatttatattatgtcgatcctgtcaacaaggtcttaaaaggtgaaattccatggtcacaagaactccgaccagaggccaagaattttaaaactttcttcgtccacacgcctaacaggacgtattacctgatggatccaagcgggaatgctcacaagtggtgcagaaagatccaggaggtttggaggcaacagtaccagagcagtccagatgctgctgtgcagtgacgtggcctgcggccgggctgcctatcgctgccaggacacctgcctcagcgcggctcggccgccacccaggacgcttccagaccacctgccagccatctcaaggagaacatagatggcaaaaaccttgcagcttttttattt

SEQ ID NO: 10344 - protein, 559 aa, Rattus norvegicus
  ref <308>: DATABASE ACCESSION NUMBER: SWISS-Prot / O55173
  ref <309>: DATABASE ENTRY DATE: 2002-06-15
MARTTSQLYDAVPIQSSVVLCSCPSPSMVRSQTEPSSSPGIPSGVSRQGSTMDGTTAEARPSTNPLQQHPAQLPPQPRKKRPEDFKFGKILGEGSFSTVVLARELATSREYAIKILEKRHIIKENKVPYVTRERDVMSRLDHPFFVKLYFTFQDDEKLYFGLSYAKNGELLKYIRKIGSFDETCTRFYTAEIVSALEYLHGKGIIHRDLKPENILLNEDMHIQITDFGTAKVLSPDSKQARANSFVGTAQYVSPELLTEKSACKSSDLWALGCIIYQLVAGLPPFRAGNEYLIFQKIIKLEYDFPEKFFPKARDLVEKLLVLDATKRLGCEEMEGYGPLKAHPFFESITWENLHQQTPPKLTAYLPAMSEDDEDCYGNYDNLLSQFGCMQVSSSSSSHSLCAVDASLPQRSGSNIEQYIHDLDTNSFELDLQFSEDEKRLLLEKQAGGNPWHQFVENNLILKMGPVDKRKGLFARRRQLLLTEGPHLYYVDPVNKVLKGEIPWSQELRPEAKNFKTFFVHTPNRTYYLMDPSGNAHKWCRKIQEVWRQQYQSSPDAAVQ

SEQ ID NO: 10345 - DNA, 2365 bp, Homo sapiens
  ref <308>: DATABASE ACCESSION NUMBER: EMBL / AK056253
  ref <309>: DATABASE ENTRY DATE: 2002-08-06
tctaaattttgctgaaaacaaaatgaacgaatgaatgtatatgatccttacaggctgacaaccagggctacaggcctaaagctcacaagcaacaagtgttggctggacacagtagggattcaccacctcacatctccatgtcattctaagtcgttttttaacgaagtaaaatctatcatttttaacgcacaaaatgaaagctatgcacacttctgagctgactttatcagaaagtcatgaaaaacgagaccagaaagaagtacacacagaagctacaactgaaaaagataaaaagcatcagtcaagatggtgaaaagaatcattagctcgccaggaaagacacgcaaccattgcatgtggtattggcaggagagcctctccacgtcagcgctccgtggacgtgtggcctcgccttggcactcaggctgtggcacaggcaggcatctcagtcccacccatccagggagcactccaacctggctgacctcaagggcgggggccatctgggcatcagccgtggcctgtgagccaaacggtcactggccctgatcatcaaactgacgtcctgcaaacccacccagccacccccgcggttacctgtgaatgatgcccttgccgtgcaagtactctaaagcagacacaatctcagccgtgtaaaatcgggtacaggtctcatcgaatgaaccgattttgcgaatatatttaagtagttctccatttttggcataactaaggccgaaatctgaatatcgtgcagttaaggaagtgtaaaaatctcttgtttcgttttggagcaggtttactccgttgcccagactggagtgcaggggcacaatcatagctcactgcagcctcaacctccctggctcaagcgatcctcccaccttaaccaacccaagtggctgggaacgtaggtacgcgctaccacgcctggcctaggagaagccacagcaaaccccacgttccccgccacaaagagaaggaagtccagagtcagtgccaggctgccacggctcaggggcccagcccaccacagcctttcatgcccccccacacactcctgcccaggagctgaaagagccccacactgccgccagcccctacccagccctaagactcttggcagcacatcttgctgccgggaagcctctgacacggatcgtcagtgcacgtccagctcctccaccaaaatcgaagcttctcgtgggcagagacaccacccggcatagcagcgcatccccatcacccatcaacctgcacttggcaagcacctccaaacagagagagcacacacactccgccggcagccgaaggagctgcaggatggtgctgagagtgggagcaggccagaacgaagctctaacacagaagagccgggtgctggggagagacggggaggacaggtgggaggactcaggcccctccccaggcaggatggggaggccacgacacttgggccagcttggagggtggcgggggaggagaagagcagatgcagactgcacctgctgggggtgacgacggtgcggcgtggccagcccagccactggcaggcccacaggtcagctggatggggcagaggtggggcccaccccaacttccaccgggccttgcctcccagattcctgagccaaggtttaataacagaaaagatggagctctaggggagcaagggacgccgaccaagcaagccgcagcagagaggactgtgctggagccacatcggtggcttctccgggaggtaacgtcctgtgcagactcccagccacaccctggcgctgcctcggctgcctccctgaatgtcagcggcctgagggaccccactcggcagggagcgggggctgcttgtgggaacacacagggtctgattccaagtgagaggggtgactggtgtggcttcagacggcaccaaccacgcaaaggatacacagcttctcgtcgtcctgaaatgtgaagtaaagcttaacaaagaaggggtgatccaggcgcgacatgacatcccgctctctggttacataggggaccttgttctcttttatgatatgtcgcttctccagaattttaacttcaggtgagagagaagtgagttactatcagaaacaacaaaaaacactaaagacatgactcacaaaggtaactggtacaaattaaagtctttcaaacattgtacacaacagcctggtggtctctaaagccaacagtgtcctgtaccctgaaatcagcacagaaacaccggccctgccaccccagccgccctgcacggagccgcttgccctgctcccggacgcacagctccctgcagcccatactcactcgcatattctctggaggttgccagttctcgagccaggacaacctggttggg

SEQ ID NO: 10346 - protein, 556 aa, Homo sapiens
  ref <308>: DATABASE ACCESSION NUMBER: Refseq / NP_002604
  ref <309>: DATABASE ENTRY DATE: 2000-10-31
MARTTSQLYDAVPIQSSVVLCSCPSPSMVRTQTESSTPPGIPGGSRQGPAMDGTAAEPRPGAGSLQHAQPPPQPRKKRPEDFKFGKILGEGSFSTVVLARELATSREYAIKILEKRHIIKENKVPYVTRERDVMSRLDHPFFVKLYFTFQDDEKLYFGLSYAKNGELLKYIRKIGSFDETCTRFYTAEIVSALEYLHGKGIIHRDLKPENILLNEDMHIQITDFGTAKVLSPESKQARANSFVGTAQYVSPELLTEKSACKSSDLWALGCIIYQLVAGLPPFRAGNEYLIFQKIIKLEYDFPEKFFPKARDLVEKLLVLDATKRLGCEEMEGYGPLKAHPFFESVTWENLHQQTPPKLTAYLPAMSEDDEDCYGNYDNLLSQFGCMQVSSSSSSHSLSASDTGLPQRSGSNIEQYIHDLDSNSFELDLQFSEDEKRLLLEKQAGGNPWHQFVENNLILKMGPVDKRKGLFARRRQLLLTEGPHLYYVDPVNKVLKGEIPWSQELRPEAKNFKTFFVHTPNRTYYLMDPSGNAHKWCRKIQEVWRQRYQSHPDAAVQ

SEQ ID NO: 10347 - DNA, 1879 bp, Rattus norvegicus; identical to SEQ ID NO: 10343
  ref <308>: DATABASE ACCESSION NUMBER: EMBL / Y15748
  ref <309>: DATABASE ENTRY DATE: 1998-02-05

SEQ ID NO: 10348 - protein, 559 aa, Rattus norvegicus; identical to SEQ ID NO: 10344
  ref <308>: DATABASE ACCESSION NUMBER: SWISS-Prot / O55173
  ref <309>: DATABASE ENTRY DATE: 2002-06-15

SEQ ID NO: 10349 - DNA, 2365 bp, Homo sapiens; identical to SEQ ID NO: 10345
  ref <308>: DATABASE ACCESSION NUMBER: EMBL / AK056253
  ref <309>: DATABASE ENTRY DATE: 2002-08-06

SEQ ID NO: 10350 - protein, 556 aa, Homo sapiens; identical to SEQ ID NO: 10346
  ref <308>: DATABASE ACCESSION NUMBER: Refseq / NP_002604
  ref <309>: DATABASE ENTRY DATE: 2000-10-31

SEQ ID NO: 10351 - DNA, 607 bp, Rattus norvegicus
  ref <308>: DATABASE ACCESSION NUMBER: EMBL / Y16188
  ref <309>: DATABASE ENTRY DATE: 1999-02-02
caatgacaaaccccaggagttggcccgagtctgcctgggccaggccaaccgccacttcggcatggctcttggtgccctctttgtacacgaacacttctcagctgccagtaaagccaaggtacagcagctggtggaagatatcaagtacatcttaggccagcgcctggaggagctggactggatggacgcccagaccaaggcagctgctcgggctaagctccagtacatgatggtcatggttggctatccagacttcctgctgaaacctgaggctgtagacaaagagtatgagtttgaggtccacgagaagacctacttcaagaacattttgaacagcatccgattcagcatccagttgtctgtcaagaagatccgacaggaggtggacaaatccacgtggctgctccctccgcaggcgctcaatgcctactatctgcccaacaagaaccaaatggtattcccagctggcatcctgcagcccaccctgtatgacccagacttcccgcagtctttgaactacgggggcatcggtaccatcattgggcatgaactgacccacggctatgatgactggggaggacagtatgaccgctcaggaaacctgctg

SEQ ID NO: 10352 - protein, 775 aa, Rattus norvegicus
  ref <308>: DATABASE ACCESSION NUMBER: SWISS-Prot / CAA76114
  ref <309>: DATABASE ENTRY DATE: 2002-06-15
MEAPYSMTAHYDEFQEVKYESRCGTGGARGTSLPPGFPRSSGRSASGARSGLPRWNRREVCLLSGLVFAAGLCAILAAMLALKYLGPGAAGTGGACPEGCPERKAFARAARFLSANLDASIDPCQDFYSFACGGWLRRHAIPDDKLTYGTIAAIGEQNEERLRRLLARPTGGPGGAAQRKVRAFFRSCLDMREIERLGPRPMLEVIEDCGGWDLGGAADRPGAARWDLNRLLYKAQGVYSAAALFSLTVSLDDRNSSRYVIRIDQDGLTLPERTLYLAQDEGSEKVLAAYKVFMERLLRLLGADAVEQKAQEILQLEQRLANISVSEYDDLRRDVSSVYNKVTLGQLQKITPHLQWKWLLDQIFQEDFSEEEEVVLLATDYMQQVSQLIRSTPRRILHNYLVWRVVVVLSEHLSPPFREALHELAKEMEGNDKPQELARVCLGQANRHFGMALGALFVHEHFSAASKAKVQQLVEDIKYILGQRLEELDWMDAQTKAAARAKLQYMMVMVGYPDFLLKPEAVDKEYEFEVHEKTYLKNILNSIRFSIQLSVKKIRQEVDKSTWLLPPQALNAYYLPNKNQMVFPAGILQPTLYDPDFPQSLNYGGIGTIIGHELTHGYDDWGGQYDRSGNLLHWWTEASYSRFLHKAECIVRLYDNFTVYNQRVNGKHTLGENIADMGGLKLAYYAYQKWVREHGPEHPLHRLKYTHNQLFFIAFAQNWCIKRRSQSIYLQVLTDKHAPEHYRVLGSVSQFEEFGRAFHCPKDSPMNPVHKCSVW

SEQ ID NO: 10353 - DNA, 2872 bp, Homo sapiens
  ref <308>: DATABASE ACCESSION NUMBER: EMBL / Y16187
  ref <309>: DATABASE ENTRY DATE: 1999-02-02
cggcgctgggagacaccggacgcccgctcggctgcgctgcggctcaggcccccgctcgggcccgacccgctcggtcaccgccggctcgggcgcgcacctgccggctgcggccccagggccatgcggaggcccacgaggaggccggcggccacgcgcatcccgtagcccaggtggcccaggtctgcaccgcggcggcctcggcgccatggagcccccgtattcgctgacggcgcactacgatgagttccaagaggtcaagtacgtgagccgctgcggcgcggggggcgcgcgcggggcctccctgcccccgggcttcccgttgggcgctgcgcgcagcgccaccggggcccggtccgggctgccgcgctggaaccggcgcgaggtgtgcctgctgtcggggctggtgttcgccgccggcctctgcgccattctggcggctatgctggccctcaagtacctgggcccggtcgcggccggcggcggcgcctgtcccgagggctgccctgagcgcaaggccttcgcgcgcgccgctcgcttcctggccgccaacctggacgccagcatcgacccatgccaggacttctactcgttcgcctgcggcggttggctgcggcgccacgccatccccgacgacaagctcacctatggcaccatcgcggccatcggcgagcaaaacgaggagcgcctacggcgcctgctggcgcggcccgggggtgggcctggcggcgcggcccagcgcaaggtgcgcgccttcttccgctcgtgcctcgacatgcgcgagatcgagcgactgggcccgcgacccatgctagaggtcatcgaggactgcgggggctgggacctgggcggcgcggaggagcgtccgggggtcgcggcgcgatgggacctcaaccggctgctgtacaaggcgcagggcgtgtacagcgccgccgcgctcttctcgctcacggtcagcctggacgacaggaactcctcgcgctacgtcatccgcattgaccaggatgggctcaccctgccagagaggaccctgtacctcgctcaggatgaggacagtgagaaggtcctggcagcatacagggtgttcatggagcgagtgctcagcctcctgggtgcagacgctgtggaacagaaggcccaagagatcctgcaagtggagcagcagctggccaacatcactgtgtcagagtatgacgacctacggcgagatgtcagctccatgtacaacaaggtgacgctggggcagctgcagaagatcaccccccacttgcggtggaagtggctgctagaccagatcttccaggaggacttctcagaggaagaggaggtggtgctgctggcgacagactacatgcagcaggtgtcgcagctcatccgctccacaccccaccgggtcctgcacaactacctggtgtggcgcgtggtggtggtcctgagtgaacacctgtccccgccattccgtgaggcactgcacgagctggcacaggagatggagggcagcgacaagccacaggagctggcccgggtctgcttgggccaggccaatcgccactttggcatggcgcttggcgccctctttgtacatgagcacttctcagctgccagcaaagccaaggtgcagcagctagtggaagacatcaagtacatcctgggccagcgcctggaggagctggactggatggacgccgagaccagggctgctgctcgggccaagctccagtacatgatggtgatggtcggctacccggacttcctgctgaaacccgatgctgtggacaaggagtatgagtttgaggtccatgagaagacctacttcaagaacatcttgaacagcatccgcttcagcatccagctctcagttaagaagattcggcaggaggtggacaagtccacgtggctgctccccccacaggcgctcaatgcctactatctacccaacaagaaccagatggtgttccccgcgggcatcctgcagcccaccctgtacgaccctgacttcccacagtctctcaactacgggggcatcggcaccatcattggacatgagctgacccacggctacgacgactgggggggccagtatgaccgctcagggaacctgctgcactggtggacggaggcctcctacagccgcttcctgcgaaaggctgagtgcatcgtccgtctctatgacaacttcactgtctacaaccagcgggtgaacgggaaacacacgcttggggagaacatcgcagatatgggcggcctcaagctggcctaccacgcctatcagaagtgggtgcgggagcacggcccagagcacccacttccccggctcaagtacacacatgaccagctcttcttcattgcctttgcccagaactggtgcatcaagcggcggtcgcagtccatctacctgcaggtgctgactgacaagcatgcccctgagcactacagggtgctgggcagtgtgtcccagtttgaggagtttggccgggttttacactgtccaaaggtctcacccatgaaccctgcccacaagtgttccgtgtggtgagcctggctgcccgcctgcacgcccccactgcccccgcacgaatcacctcctgctggctaccggggcaggcatgcacccggtgccagccccgctctgggcaccacctgccttccagcccctccaggacccggtccccctgctgcccctcacttcaggaggggcctggagcagggtgaggctggactttggggggctgtgagggaaatatactggggtccccagattctgctctaagggggccagaccctctgccaggctggattgtacgggccccaccttcgctgtgttcttgctgcaaagtctggtcaataaatcactgcactgttaaaaaaaaaaaaa

SEQ ID NO: 10354 - protein, 775 aa, Homo sapiens
  ref <308>: DATABASE ACCESSION NUMBER: SWISS-Prot / CAA76113
  ref <309>: DATABASE ENTRY DATE: 2002-06-15
MEPPYSLTAHYDEFQEVKYVSRCGAGGARGASLPPGFPLGAARSATGARSGLPRWNRREVCLLSGLVFAAGLCAILAAMLALKYLGPVAAGGGACPEGCPERKAFARAARFLAANLDASIDPCQDFYSFACGGWLRRHAIPDDKLTYGTIAAIGEQNEERLRRLLARPGGGPGGAAQRKVRAFFRSCLDMREIERLGPRPMLEVIEDCGGWDLGGAEERPGVAARWDLNRLLYKAQGVYSAAALFSLTVSLDDRNSSRYVIRIDQDGLTLPERTLYLAQDEDSEKVLAAYRVFMERVLSLLGADAVEQKAQEILQVEQQLANITVSEYDDLRRDVSSMYNKVTLGQLQKITPHLRWKWLLDQIFQEDFSEEEEVVLLATDYMQQVSQLIRSTPHRVLHNYLVWRVVVVLSEHLSPPFREALHELAQEMEGSDKPQELARVCLGQANRHFGMALGALFVHEHFSAASKAKVQQLVEDIKYILGQRLEELDWMDAETRAAARAKLQYMMVMVGYPDFLLKPDAVDKEYEFEVHEKTYFKNILNSIRFSIQLSVKKIRQEVDKSTWLLPPQALNAYYLPNKNQMVFPAGILQPTLYDPDFPQSLNYGGIGTIIGHELTHGYDDWGGQYDRSGNLLHWWTEASYSRFLRKAECIVRLYDNFTVYNQRVNGKHTLGENIADMGGLKLAYHAYQKWVREHGPEHPLPRLKYTHDQLFFIAFAQNWCIKRRSQSIYLQVLTDKHAPEHYRVLGSVSQFEEFGRVLHCPKVSPMNPAHKCSVW

SEQ ID NO: 10355 - DNA, 1549 bp, Rattus norvegicus
  ref <308>: DATABASE ACCESSION NUMBER: EMBL / Y17048
  ref <309>: DATABASE ENTRY DATE: 2002-01-07
cccagatccgcagcgccggccgccgggagctcgaggctccgggcgcagaggctgcgctgtcacatgggcggcggcgacggggccgcatttaagcggccaggggacggcgcccgcctgcagcgcgtcctcgggctcggctcccgccgggcgccccgctccctgccctccgggggccccgcgccacccccgccgggccatgcgagcgcgggccccgccgcgatgagctcgcacatcgccaagagcgagtccaagacgtcgctgctcaaggcggcggcggcgagcgggggcagccgggctccccgccacagctctgcgcgggaccccgggctgcgtggccgcaggctgcccggtccctgccccgactcgcctgcaacgtgcggggaccccagctcgcggaggcccctgtgccggccggtgccgcgggacgagggcgcgcgcgggagccggcgtgggctgccccaggcgcactgcaggccccgggagacgctaccgccggcccgcgggcgcgatggggaggaacgggggctggcgccggctctcagtctacggggctccctgcgatcgcggggtcgcggggacccggctcccgctggcacccccgaggcggacccgttcctccaccagctgcgccccatgctcagctccgccttcggtcaggatagatcgttacgaccagaggagatcgaagagctccgagaggccttccgggaatttgacaaggacaaagatggctacatcaactgccgggacctggggaactgcatgcgcaccatgggctacatgcccactgagatggaactcatcgagctgtcccagcagatcaacatgaacctgggtggccacgtggatttcgatgactttgtggaactgatgggccctaaactcctggcggagacagcagatatgatcggtgtaaaggaactgagagacgcctttcgggagtttgacaccaacggtgacggggagataagcacgagcgagctgcgagaggccatgaggaagctcctgggtcatcaggtgggacaccgggacatagaggaaattatccgagacgtggacctcaatggagatggacgagtggacttcgaagagtttgtccggatgatgtctcgctgaggccgctgaggggctcctccaggtctgccaactcccacaggcggggagaagagctgagctcgcctcaccccgcagtagctgccgagagcccaggatgtactggcggatggggcctgcctgcaccccggggaggtgcccaccccggacccccacccctctgcactgtgaaagactcacaactcctgcaactggaaaagggggcgcccgccggcgaggaggccacagtgccaagccggtagaggacacgcaaggcgccaagtgccatctgcccaaccgctgctggctgggtgggccagggagcccgccagcagaccccacacagcatgtctgccccgagggcagagcctttcagcgccctcccgatgcccgtcccagctcgcctagccctttgatctcagaaccaataaaaaaaaacggagaatgacaaaaaaaa

SEQ ID NO: 10356 - protein, 298 aa, Rattus norvegicus
  ref <308>: DATABASE ACCESSION NUMBER: SWISS-Prot / O88751
  ref <309>: DATABASE ENTRY DATE: 2002-06-15
MSSHIAKSESKTSLLKAAAASGGSRAPRHSSARDPGLRGRRLPGPCPDSPATCGDPSSRRPLCRPVPRDEGARGSRRGLPQAHCRPRETLPPARGRDGEERGLAPALSLRGSLRSRGRGDPAPAGTPEADPFLHQLRPMLSSAFGQDRSLRPEEIEELREAFREFDKDKDGYINCRDLGNCMRTMGYMPTEMELIELSQQINMNLGGHVDFDDFVELMGPKLLAETADMIGVKELRDAFREFDTNGDGEISTSELREAMRKLLGHQVGHRDIEEIIRDVDLNGDGRVDFEEFVRMMSR

SEQ ID NO: 10357 - DNA, 664 bp, Homo sapiens
  ref <308>: DATABASE ACCESSION NUMBER: EMBL / X94700
  ref <309>: DATABASE ENTRY DATE: 1999-02-08
ggcgctgcaggttagagcctggcaatgccgtttgggtgtgtgactctgggcgacaagaagaactataaccagccatcggaggtgactgacagatatgattggtgtaaaggaactgcgagatgctttccgagagtttgacaccaatggtgatggggaaataagcaccagtgagctgcgagaggctatgaggaagctcctgggtcatcaggtgggacaccgagacatagaggaaattatccgagatgtggacctcaatggggatggacgagtggactttgaagagtttgtccggatgatgtcccgctgaggccgcgagggcccctccaggactgccaagctcccaaaggcggggctaagaggagctagagcttgcctcacccgctgtatccgccgagagcccaggatgtactggcggatggggcctgcctgcaccccggggaggcgcccacccgggaccccacccctccgcactgtgaaagactaactcctgcaactggaaagcgggggcgcccgccgacgaggaggccaccgtgccaagccggcagaggtcatgccaggcgccaagggcaatgtgcccagctgctgctggctgggtgggccagggagcccgccagcagaccccacacagcatgtccgccccagggcaaagcttcccactttcgtt

SEQ ID NO: 10358 - protein, 226 aa, Homo sapiens
  ref <308>: DATABASE ACCESSION NUMBER: SWISS-Prot / Q9NZU7
  ref <309>: DATABASE ENTRY DATE: 2002-06-15
GNCVKYPLRNLSRKMCQEEQTSYMVVQTSEEGLAADAELPGPLLMLAQNCAVMHNLLGPACIFLRKGFAENRQPDRSLRPEEIEELREAFREFDKDKDGYINCRDLGNCMRTMGYMPTEMELIELSQQINMNLGGHVDFDDFVELMGPKLLAETADMIGVKELRDAFREFDTNGDGEISTSELREAMRKLLGHQVGHRDIEEIIRDVDLNGDGRVDFEEFVRMMSR

SEQ ID NO: 10359 - DNA, 1549 bp, Rattus norvegicus; identical to SEQ ID NO: 10355
  ref <308>: DATABASE ACCESSION NUMBER: EMBL / Y17048
  ref <309>: DATABASE ENTRY DATE: 2002-01-07

SEQ ID NO: 10360 - protein, 298 aa, Rattus norvegicus; identical to SEQ ID NO: 10356
  ref <308>: DATABASE ACCESSION NUMBER: SWISS-Prot / O88751
  ref <309>: DATABASE ENTRY DATE: 2002-06-15

SEQ ID NO: 10361 - DNA, 664 bp, Homo sapiens; identical to SEQ ID NO: 10357
  ref <308>: DATABASE ACCESSION NUMBER: EMBL / X94700
  ref <309>: DATABASE ENTRY DATE: 1999-02-08

SEQ ID NO: 10362 - protein, 226 aa, Homo sapiens; identical to SEQ ID NO: 10358
  ref <308>: DATABASE ACCESSION NUMBER: SWISS-Prot / Q9NZU7
  ref <309>: DATABASE ENTRY DATE: 2002-06-15

SEQ ID NO: 10363 - DNA, 1549 bp, Rattus norvegicus; identical to SEQ ID NO: 10355
  ref <308>: DATABASE ACCESSION NUMBER: EMBL / Y17048
  ref <309>: DATABASE ENTRY DATE: 2002-01-07

SEQ ID NO: 10364 - protein, 298 aa, Rattus norvegicus; identical to SEQ ID NO: 10356
  ref <308>: DATABASE ACCESSION NUMBER: SWISS-Prot / O88751
  ref <309>: DATABASE ENTRY DATE: 2002-06-15

SEQ ID NO: 10365 - DNA, 664 bp, Homo sapiens; identical to SEQ ID NO: 10357
  ref <308>: DATABASE ACCESSION NUMBER: EMBL / X94700
  ref <309>: DATABASE ENTRY DATE: 1999-02-08

SEQ ID NO: 10366 - protein, 226 aa, Homo sapiens; identical to SEQ ID NO: 10358
  ref <308>: DATABASE ACCESSION NUMBER: SWISS-Prot / Q9NZU7
  ref <309>: DATABASE ENTRY DATE: 2002-06-15

SEQ ID NO: 10367 - DNA, 1549 bp, Rattus norvegicus; identical to SEQ ID NO: 10355
  ref <308>: DATABASE ACCESSION NUMBER: EMBL / Y17048
  ref <309>: DATABASE ENTRY DATE: 2002-01-07

SEQ ID NO: 10368 - protein, 298 aa, Rattus norvegicus; identical to SEQ ID NO: 10356
  ref <308>: DATABASE ACCESSION NUMBER: SWISS-Prot / O88751
  ref <309>: DATABASE ENTRY DATE: 2002-06-15

SEQ ID NO: 10369 - DNA, 664 bp, Homo sapiens; identical to SEQ ID NO: 10357
  ref <308>: DATABASE ACCESSION NUMBER: EMBL / X94700
  ref <309>: DATABASE ENTRY DATE: 1999-02-08

SEQ ID NO: 10370 - protein, 226 aa, Homo sapiens; identical to SEQ ID NO: 10358
  ref <308>: DATABASE ACCESSION NUMBER: SWISS-Prot / Q9NZU7
  ref <309>: DATABASE ENTRY DATE: 2002-06-15

SEQ ID NO: 10371 - DNA, 2720 bp, Rattus norvegicus
  ref <308>: DATABASE ACCESSION NUMBER: EMBL / Y17606
  ref <309>: DATABASE ENTRY DATE: 1998-09-07
gggcctcagggcagaaaacagcccgggcggcgacttggggtaacagcgcgctggaatccctggaggtccaggcagagaaccctgaggatcagaagagccaccgtggacatttggctccctatatccaacctcgtccaggaaaaagagagatgtcctgtaccagtctctattagatgccaggccatcacatgacttctatagccctgcaagggagacacactgtgtagccatggtgagcgagtttccgggtccgggctctcgggtcccctggcggccaagggacgaggcgctgcgcgtgaacgtgggcggagtgcggcggctgctgagcgcgcgcgccctcgcgcgattcccgggcacgcggctgggccgcctacaggcggcggtgtccgaggagcaggcgcggcgcctatgcgacgactacgacgcggcggcgcgcgagttctacttcgatcggcacccgggcttcttcctcggcctgctgcacttctaccgcaccgggcacttgcatgtgctggacgagctgtgcgtcttcgccttcggccaggaggctgactattggggcctgggcgagaacgctctggccacgtgctgccgcgcgcgctacctggagcggcgtgtgacgcggcctcgcgcctgggacgaggacagcgatgccccgagcagcgtggacccgtgtcccgacgagatctccgacgtgcagcgggagctggcgcgctatggtgcggcccgctgtggtcgcctgcgccgtcgcctctggctcaccatggagaaccctggctactcgctgcccagcaagctcttcagctgcgtgtccatcggcgtggtgctcgcctccatcgctgccatgtgcatccacagcctgcccgagtaccaagcccgggaggcagcggcggcggtggctgcagtggccgcgggtcgcagcgcagaggacgtgcgcgacgacccggtgctgcgccgcctggagtacttctgcatcgcctggttcagcttcgaggtgtcgtcgcgcctgctgctggctcccagcacgcgcaacttcttctgccatccgctcaacctcatcgacatcgtgtcggtgctgcccttctatctcacactgctggccggcgcggcgcttggtgaccggcgcggagccagcggggaggagctcggagacctaggaaaggtggtacaagtgtttcgcctcatgcgcatcttccgcgtgctcaagctggcccgccactctaccgggctgcgctctctgggcgccacgctcaagcacagctaccgtgaggtgggcatcttactgctgtacctggccgtgggtgtgtcagtgttctctggcgtggcctacacagccgaagaaaagaacgtgggcttcgacacgatccccgcctgctggtggtggggcaccgtgagcatgaccacagtgggctatggggatgtggtcccggagactgtggcaggcaagctggcagcctctggctgcatcctggggggcatcctggtggtcgccctccccatcaccatcatcttcaacaagttttcccacttttaccggcgccagaaggcactggaggcggccgtgcggagcagcggccagcgggagtttgaggacttgctgagcagtgtggatggcgtatcagacgtgtctctggaaacatccagagagacttctcaggaagggcgctccacagacctggagacccaagcccccagtgagcctgcaaaatctcacagttattaaaacctgggctctgcactccctccccacagcctgggaatcagctaatgtagagcagagtcctcccctgcttaggttctgcatgggagccatacgcctgagcaaaacataggggccacagatctttctcgaaaaagcccagagcaggctagcaccgccctccattccaccagcccacagagaggcctcctctgaagtatgtacacaccaagaggaggaagaagacagcctctgtatgcgccggttagccttgtgcagatgattatccccatttcacagatgagagaactgaggctcagccgaatggcacggagaagtcagcttttaatgataagtccctggaaggagttgagggccgagtccttggaatctgtaggatcaataccacaatcatctgccatacccacttcctagggtgacttacagaaggagcctgactagagacccctctgggacccaatcccagctctacacctgccacgggaaaggtggccaaccccctgcccccagaactaggttctagcggatctgtcacagcgtgggacccagagagaaggtgactgagaagatccagctcaactctgaactgttggcggcagaggggtaccgcgcatgctccagtcctgctcggctttcttcaacttgacacaagctaaagtaatctgggaagaggaggctcaatggagggaacgcctccatcagattgcttgttggcaagcctgtgggacattatcttgattaatgattgatgtgggagggcccagcccactgtgcgtagcaccattcctaagcagatggtcctgggggtctataagaaagcagactgaacaagccacgggagcaagtcagtaagcagtattcctccatggtctctgcttccaggctcctgcttccgggttcctgccttatgctcctgccctggcatccctcagtgaactatgacccaggatatgtaagccaaataaaccctttcctctccaacaaaaaaaaaaaaaaaaaa

SEQ ID NO: 10372 - protein, 497 aa, Rattus norvegicus
  ref <308>: DATABASE ACCESSION NUMBER: SWISS-Prot / CAA76804
  ref <309>: DATABASE ENTRY DATE: 2002-06-15
MVSEFPGPGSRVPWRPRDEALRVNVGGVRRLLSARALARFPGTRLGRLQAAVSEEQARRLCDDYDAAAREFYFDRHPGFFLGLLHFYRTGHLHVLDELCVFAFGQEADYWGLGENALATCCRARYLERRVTRPRAWDEDSDAPSSVDPCPDEISDVQRELARYGAARCGRLRRRLWLTMENPGYSLPSKLFSCVSIGVVLASIAAMCIHSLPEYQAREAAAAVAAVAAGRSAEDVRDDPVLRRLEYFCIAWFSFEVSSRLLLAPSTRNFFCHPLNLIDIVSVLPFYLTLLAGAALGDRRGASGEELGDLGKVVQVFRLMRIFRVLKLARHSTGLRSLGATLKHSYREVGILLLYLAVGVSVFSGVAYTAEEKNVGFDTIPACWWWGTVSMTTVGYGDVVPETVAGKLAASGCILGGILVVALPITIIFNKFSHFYRRQKALEAAVRSSGQREFEDLLSSVDGVSDVSLETSRETSQEGRSTDLETQAPSEPAKSHSY

SEQ ID NO: 10373 - DNA, 4603 bp, Homo sapiens
  ref <308>: DATABASE ACCESSION NUMBER: EMBL / AF043473
  ref <309>: DATABASE ENTRY DATE: 2001-03-29
attacaggtgtgaccgcgcctgtaatcccggcacggacgcgtgggcagcgatcgatgcggccttcagccgcgggggactaggcaaggaagaaggaaggagagggcagcggggccgcctgcagcaggaggctcggcggggccggcggggcagaggcgagaccgagtatagccagcggctcccagcctcggtggctttgggacagacacgcgaggcgcccgggaggtgccaccacaggtggagatccaagtggaggtgggagcggagctacatcacacgtttattgtgcattgattatgtgccagggaccatgctgccgataaacaccttgcatcatttaattctctgagcctctcctggaaagtatgatgctacccggttccacagacagggaaacaagcccagagagggcgacgaatgcactcaaggacagcagctagtgatgctgatgctgctggtccggggaacacactatgagaacctccggtctaaagtggtgctgccaacacccctaggagggaggagcactgaaacctttgtgagcgagttcccgggccccgacaccgggatccgctggcggcgaagcgacgaggcgctgcgcgtgaacgtgggtggcgtgcggcggcagctgagcgcgcgcgccctggcgcgcttcccgggcacgcggctgggccgcctgcaggccgcggcgtcggaggagcaggcgcggcgcctgtgcgacgactacgacgaggcggcgcgcgaattctacttcgaccggcacccgggcttcttcctgagcctgctgcacttctaccgcactggccacctgcacgtgctcgacgagctgtgcgtcttcgcctttggccaggaggccgactactggggcctaggcgagaacgcgcttgccgcgtgctgccgcgcgcgctacctggagaggcggctgacccagccgcacgcctgggacgaggacagcgacacgccgagcagcgtggacccgtgccccgacgagatctccgacgtgcagcgagaactggcgcgctatggcgcggcgcgctgtggccgcctgcgccgccgcctctggctgaccatggagaacccgggctactcgctgccgagcaagctcttcagctgcgtctccatcagcgtggtgctcgcctccatcgccgccatgtgcatccacagcctgcccgagtaccaggcccgcgaggcggcggccgccgtggctgcggtggccgcgggccgcagcccggaaggcgtgcgcgacgacccggtgctgcgacgcctcgagtacttctgcatcgcctggttcagcttcgaggtgtcgtcgcgcctcctgctggcgcccagtacgcgcaacttcttctgccacccgctcaacctcatcgacattgtgtctgtgctgcccttctatctcacgctgctggctggtgtggcactgggcgaccagggcggcaaggagttcggccacctgggcaaggtggtgcaggtgttccgcctcatgcgcatcttccgcgtactcaagttggcgcgccattccaccgggctgcgctcgctgggagccacgctcaagcacagctaccgtgaggtgggcatcttgctgctgtacctggctgtgggtgtgtcagtgttctctggtgtggcctacacagctgaaaaggaggaggacgtgggctttaacaccatcccagcctgctggtggtggggcacagtgagcatgaccaccgtgggctatggggatgtggtgccagtgacggtggctggcaagctggcagcctcaggctgcatcctagggggcatcctggtggtagcactccccatcaccatcatcttcaacaagttctcccacttctaccggcgccagaaggctctggaggcagccgtgcgcaacagcaaccaccaagagtttgaggacttgctgagcagcattgatggggtgtcggaggcatctctggagacatcccgagaaacctctcaggagggacagtctgcagatctagagagccaggcccccagtgagcctccacaccctcagatgtattaaaaccagggatccgtgaccccctgccatgcccctacagtagagattcctcccctgctaaagttcttcatggtagtgagcctcccaggatcactcatgctgtcctgagaaatgagattcaaaagctgcattccttcctccaaaggcccaggacaggacagtgctaccctagattctgtgagattctgcaagcaactcagaaagctttataaacctgcctccaagccattcatgaagcaggcatgaagccagaggggaggaagttgaaaggatactaatgattcctgagcacctcctgtacatgaaccaggtcatgtttggccttgtgttggagaaagagaattatccccacttcacagatgaggaaaccaaggctaagagatgagcgatgcctctcccagatgtcacaattagaagtggcagagtcaggtttggaatctgggcttgttggtgtgcctggagcaatgctccatcaactccatctttcttctgccctcatgaagtttgcgtgtgttttttggtgattcatggatccccagagttgatccacaagataagaaatccctttcagagccaggggaagggtccagacaggagatttggatataggagctctggatctcagctgtggttcctttctaggagcatccaacaggagtcagcaatcaaagatgagtcctggagggaaggaggatgagtcctgggaggaagtaccatagcattgtacttgcctctttagctggtatgcaagatttgctaagcaataatcttccgaccttcctcccagggctgatgtgagagaaagaaaatctgaagggcccctggcctgagatctagacaacctagctgcgccaagacctgctgtgtaaagtggtccaatccctgcccccaagtccagattccagcccctctgtcaaatggtcagaatctgtgacccagaaggcaatgaaagccaaggagagcagaggggtctctaacttaaagccagctcagctctgaaatgttcagagggctgacatatatgaatactggcttctaagaccctcccccaacagtctgaccttggcagttcctttctgcccatcacacagacgtccagccctacattgtccagccctacctagagtacccatccaggcccatgtgtgagagtcctctcccttctggccagctccagccccctcacccttgctgggggcatatctctcatacccacctgctgaatcttctcttcacttgctgagaaagtcagaggaggggatccagtagccctttccacatactgtggctacagcacccagcactgtgctgttgttgtctgactgtggctatctctgtcccatcaccctgagcctcaagatggaagacattgtctgcttgaactctgggcttggtgcagagtaggtatttggtaaatgttgaatagatcaaccaattcctacagcccactgggtgccaagctcagagggggaaaaaaagatagccagagagagacctggacctcaaaaaggtgtgaacaagactgaaaaggaggtccgttcagctccgcctgccctgtccctgcttggttcttgaagtttttacaatatattccttgtaggttcttcactcactcactcaacaaatacccgttggaagagtcttaaactggggcttcatgtgtggcctgcagtcatgtttcggcttagtccaacagtgtttttattatattttaagaatctgaatgcctttgcgtgaggcatgcactctcaggttccccatagtgtctcccccgctgccacccacaaacagacacacatgccgttgtgttatgcccagccactctgatatactggcttctgacttatgggctgcttactagtctcaagagatacagtggtggaaaaatatatccctatactcatgaagcttaccgactagtagggaagatagactctaatgcaataatcacataaatatagcgagctctactaagtacaggtgtgtataatgtatcagggaccatggcccgagaaagtgagaaagctttcctgagcaagtgacaatctaacctgccatccaaatgataaattgctaattaagcaaatgaggttccaggggggagtactccaagcagagagaatggcatgtgtgaaggtgtgtgtcatacacagggcctagtacatagtgggccccctacatacgcatggattctgggtctccagattggaacagaggatggagctaagcagcaaagggcctcccttgaattcaccacacacataccagcccttctgcacactttgctccttacatctaggcccagctgaacccaggttaggggcagatcagaagggctgcgtgtagcacccttatggtcttgcagaacacaccaagaaacccgacggcttccatattttctgaccctacaaacaggtccctaatactgatgtggagaaagctcaagagggaatcatctggcctgagcctaccatgaggctgtttgtggttcctggcagaaaagcaacaactcgctccccttcccatgtatcagtgaaaaccattatgcaaataaagagctggcccccgaaaaaaaaaaaaaaaaa

SEQ ID NO: 10374 - protein, 526 aa, Homo sapiens
MLMLLVRGTHYENLRSKVVLPTPLGGRSTETFVSEFPGPDTGIRWRRSDEALRVNVGGVRRQLSARALARFPGTRLGRLQAAASEEQARRLCDDYDEAAREFYFDRHPGFFLSLLHFYRTGHLHVLDELCVFAFGQEADYWGLGENALAACCRARYLERRLTQPHAWDEDSDTPSSVDPCPDEISDVQRELARYGAARCGRLRRRLWLTMENPGYSLPSKLFSCVSISVVLASIAAMCIHSLPEYQAREAAAAVAAVAAGRSPEGVRDDPVLRRLEYFCIAWFSFEVSSRLLLAPSTRNFFCHPLNLIDIVSVLPFYLTLLAGVALGDQGGKEFGHLGKVVQVFRLMRIFRVLKLARHSTGLRSLGATLKHSYREVGILLLYLAVGVSVFSGVAYTAEKEEDVGFNTIPACWWWGTVSMTTVGYGDVVPVTVAGKLAASGCILGGILVVALPITIIFNKFSHFYRRQKALEAAVRNSNHQEFEDLLSSIDGVSEASLETSRETSQEGQSADLESQAPSEPPHPQMY

SEQ ID NO: 10375 - DNA, 2370 bp, Rattus norvegicus
  ref <308>: DATABASE ACCESSION NUMBER: EMBL / Y17607
  ref <309>: DATABASE ENTRY DATE: 1998-09-07
gtcaccgggagatggctcctctcccattctcctcacctttccacccagttccttccttttctccgtctgaggtgcatatgcttggtgcataagtccagccatctcttcagacttggtgaacttcactttgtagcatctgctttgactcgcacaaccagaggaccacatccttctcttctttgagccactaaatgccgatgcgcactccacactccagcaagggaagatgggaggagcttcttggatgacgatggatggtccactgtgcaggatgagggcaggctgtgtgacatcgccaccacgagggttcagcgtgatcttctgtgtctcccttctgggccagcactctgccttctcagtccatcatggtgtttggtgagtttttccatcgccctggacaagatgaggaacttgtcaacttgaacgtggggggttttaaacagtctgtggatcagagtacactcctgcggttcccccacacacgactggggaagctgcttacctgccactctgaggaggccattctggagctgtgtgatgactacagcgtggcagataaagagtactacttcgatcggaacccctccctgttcagatacgttttgaacttttattacacagggaagctgcacgtcatggaggaactgtgtgtcttctccttttgccaggagattgagtactggggcatcaacgagctcttcattgactcctgctgtagcagtcggtaccaggagcgcaaggaggagagccacgagaaggactgggaccagaaaagcaatgatgtgagcacagactcctcctttgaggaatcgtctctgtttgagaaagagctggagaagtttgatgagctgagatttggtcagctccgaaagaagatctggatccgaatggaaaacccagcttattgcctgtcagccaagctcatcgccatctcctccttgagtgtggtgctggcttccatcgtggccatgtgtgtacacagcatgtcagaattccagaacgaggatggagaagtggatgaccctgtgctggaaggtgtggagattgcctgcattgcatggttcaccggtgagctggccatccggctggttgctgctccatcacaaaagaagttctggaaaaaccctctgaacatcattgactttgtctccatcattcccttctatgccacgttggctgtggacaccaaggaagaagagagtgaggacattgagaacatgggcaaggtggtccagatcctccggctcatgaggattttccgcatcctgaagctcgcccggcattccgtagggcttcgttctcttggggccacgctgaggcacagttaccacgaagtggggctactgcttctcttcctctctgtgggtatctccattttctctgtgcttatttactctgtggagaaagatgaactcgcgtccagtctcactagcatccccatctgctggtggtgggccactatcagtatgaccacagtgggctatggagacacccacccagtcaccttagctgggaaaatcattgcgagcacctgcattatctgtggcatcttagtggtagcccttcccatcaccatcatcttcaacaagttttccaagtactaccagaagcagaaggacatggatgtggaccagtgcagcgaggacccaccggagaagtgccacgagctaccttactttaacattagggacgtttatgcacagcaagtacacgccttcatcaccagtctgtcttccattggcatcgtggtcagcgatcctgactccacagatgcctcaagtgtcgaagacaacgaggatgcttacaacaccgcatccctggagaactgtactgcaaaatgagcaggggcatttgcacggacagctcatgtcccttcctcacgttaggttaacacagctttataaacctcagtgggtttgttcaaatcaatcatttaattctcagggtgtaccttttagccatagttggacattcattgccgaattctgaaatgatagaattatctttatttttctcagtgagatcaattaaaatgccttgttctgaaatttattttttaacaagagagagttgtaatacggttttttgggggaaaaatgtcaatgatattgggaaggatttattgctacggcttacgcatcattctgtatctgccattcactcacattgagctaactataaattactgatgttagagcagaggcccagccgaccgaagacgacatgcatgtaagatctacaacatgagacaatgcatgtaaatccatgttcatgttccagacacgggaattaggagcccattaaacttctaattcggtatggagaaaaaaaaaaaaaaaaaaaaaaaaaaaaaaaaaaaaaaaaaaaaaa

SEQ ID NO: 10376 - protein, 491 aa, Rattus norvegicus
  ref <308>: DATABASE ACCESSION NUMBER: SWISS-Prot / CAA76805
  ref <309>: DATABASE ENTRY DATE: 2002-06-15
MVFGEFFHRPGQDEELVNLNVGGFKQSVDQSTLLRFPHTRLGKLLTCHSEEAILELCDDYSVADKEYYFDRNPSLFRYVLNFYYTGKLHVMEELCVFSFCQEIEYWGINELFIDSCCSSRYQERKEESHEKDWDQKSNDVSTDSSFEESSLFEKELEKFDELRFGQLRKKIWIRMENPAYCLSAKLIAISSLSVVLASIVAMCVHSMSEFQNEDGEVDDPVLEGVEIACIAWFTGELAIRLVAAPSQKKFWKNPLNIIDFVSIIPFYATLAVDTKEEESEDIENMGKVVQILRLMRIFRILKLARHSVGLRSLGATLRHSYHEVGLLLLFLSVGISIFSVLIYSVEKDELASSLTSIPICWWWATISMTTVGYGDTHPVTLAGKIIASTCIICGILVVALPITIIFNKFSKYYQKQKDMDVDQCSEDPPEKCHELPYFNIRDVYAQQVHAFITSLSSIGIVVSDPDSTDASSVEDNEDAYNTASLENCTAK

SEQ ID NO: 10377 - DNA, 2313 bp, Homo sapiens
  ref <308>: DATABASE ACCESSION NUMBER: EMBL / BC004987
  ref <309>: DATABASE ENTRY DATE: 2001-07-13
ggggccgcgccgcgaggcctgatccctgcagcgcgggcaggcggcgtcgcagagcggagctagctggatgcgtccggactcctgcaggtgagagtgattttccagtgattgctttggcctgtacaaccagagaacaggattcttcccttctttttggccaccaaatgcctatgtgcaccacacattccagtgtgctgagaagggcagagcttcttggatgatgatggacgtcccaccgggcaggatgaaggcagagcgtgtggcatctccacctcaagggtgcagcctgatcttcctcttctcccttgccagccagcactctgccttctgtatccaccatggtgtttggtgagtttttccatcgccctggacaagacgaggaacttgtcaacctgaatgtggggggctttaagcagtctgttgaccaaagcaccctcctgcggtttcctcacaccagactggggaagctgcttacttgccattctgaagaggccattctggagctgtgtgatgattacagtgtggccgataaggaatactactttgatcggaatccctccttgttcagatatgttttgaatttttattacacggggaagctgcatgtcatggaggagctgtgcgtattctcattctgccaggagatcgagtactggggcatcaacgagctcttcattgattcttgctgcagcaatcgctaccaggaacgcaaggaggaaaaccacgagaaggactgggaccagaaaagccatgatgtgagtaccgactcctcgtttgaagagtcgtctctgtttgagaaagagctggagaagtttgacacactgcgatttggtcagctccggaagaaaatctggattagaatggagaatccagcgtactgcctgtccgctaagcttatcgctatctcctccttgagcgtggtgctggcctccatcgtggccatgtgcgttcacagcatgtcggagttccagaatgaggatggagaagtggatgatccggtgctggaaggattggagatcgcgtgcattgcctggttcaccggggagcttgccgtccggctggctgccgctccttgtcaaaagaaattctggaaaaaccctctgaacatcattgactttgtctctattattcccttctatgccacgttggctgtagacaccaaggaggaagagagtgaggatattgagaacatgggcaaggtggtccagatcctacggcttatgaggattttccgaattctaaagcttgcccggcactcggtaggacttcggtctctaggtgccacactgagacacagctaccatgaagttgggcttctgcttctcttcctctctgtgggcatttccattttctctgtgcttatctactccgtggagaaagatgaccacacatccagcctcaccagcatccccatctgctggtggtgggccaccatcagcatgacaactgtgggctatggagacacccacccggtcaccttggcgggaaagctcatcgccagcacatgcatcatctgtggcatcttggtggtggcccttcccatcaccatcatcttcaacaagttttccaagtactaccagaagcaaaaggacattgatgtggaccagtgcagtgaggatgcaccagagaagtgtcatgagctaccttactttaacattagggatatatatgcacagcggatgcacgccttcattaccagtctctcttctgtaggcattgtggtgagcgatcctgactccacagatgcttcaagcattgaagacaatgaggacatttgtaacaccacctccttggagaattgcacagcaaaatgagcgggggtgtttgtgcctgtttctcttatcctttcccaacattaggttaacacagctttataaacctcagtgggttcgttaaaatcatttaattctcagggtgtacctttcagccatagttggacattcattgctgaattctgaaatgatagaattgtctttatttttctctgtgaggtcaattaaatgccttgttctgaaatttattttttacaagagagagttgtgatatagtttggaatataagataaatggtattgggtggggtttgtggctacagcttatgcatcattctgtgtttgtcatttactcacattgagctaactttaaattactgacaagtagaatcaaaggtgcagctgactgagacgacatgcatgtaagatccacaaaatgagacaatgcatgtaaatccatgctcatgttctaaacatggaaactaggagcctaataaacttcctaattcagtatggaaaaaaaaaaaaaaaaaaaaaaaaaa

SEQ ID NO: 10378 - protein, 491 aa, Homo sapiens
  ref <308>: DATABASE ACCESSION NUMBER: Refseq / NP_002243
  ref <309>: DATABASE ENTRY DATE: 2002-11-29
MVFGEFFHRPGQDEELVNLNVGGFKQYVDQSTLLRFPHTRLGKLLTCHSEEAILELCDDYSVADKEYYFDRNPSLFRYVLNFYYTGKLHVMEELCVFSFCQEIEYWGINELFIDSCCSNRYQERKEENHEKDWDQKSHDVSTDSSFEESSLFEKELEKFDTLRFGQLRKKIWIRMENPAYCLSAKLIAISSLSVVLASIVAMCVHSMSEFQNEDGEVDDPVLEGVEIACIAWFTGELAVRLAAAPCQKKFWKNPLNIIDFVSIIPFYATLAVDTKEEESEDIENMGKVVQILRLMRIFRILKLARHSVGLRSLGATLRHSYHEVGLLLLFLSVGISIFSVLIYSVEKDDHTSSLTSIPICWWWATISMTTVGYGDTHPVTLAGKLIASTCIICGILVVALPITIIFNKFSKYYQKQKDIDVDQCSEDAPEKCHELPYFNIRDIYAQRMHAFITSLSSVGIVVSDPDSTDASSIEDNEDICNTTSLENCTAK

SEQ ID NO: 10379 - DNA, 2370 bp, Rattus norvegicus; identical to SEQ ID NO: 10375
  ref <308>: DATABASE ACCESSION NUMBER: EMBL / Y17607
  ref <309>: DATABASE ENTRY DATE: 1998-09-07

SEQ ID NO: 10380 - protein, 491 aa, Rattus norvegicus; identical to SEQ ID NO: 10376
  ref <308>: DATABASE ACCESSION NUMBER: SWISS-Prot / CAA76805
  ref <309>: DATABASE ENTRY DATE: 2002-06-15

SEQ ID NO: 10381 - DNA, 2313 bp, Homo sapiens; identical to SEQ ID NO: 10377
  ref <308>: DATABASE ACCESSION NUMBER: EMBL / BC004987
  ref <309>: DATABASE ENTRY DATE: 2001-07-13

SEQ ID NO: 10382 - protein, 491 aa, Homo sapiens; identical to SEQ ID NO: 10378
  ref <308>: DATABASE ACCESSION NUMBER: Refseq / NP_002243
  ref <309>: DATABASE ENTRY DATE: 2002-11-29

SEQ ID NO: 10383 - DNA, 3702 bp, Rattus norvegicus
  ref <308>: DATABASE ACCESSION NUMBER: EMBL / Z11581
  ref <309>: DATABASE ENTRY DATE: 1992-03-16
tctagagttgggggccaccgccggcgcggagggggcccagtggactgccctctcccccggccccagcctcaccagcacccagcgtcggagcacctcctggttgtcgttcctcgggcctcgagggagcccagccctccgtcccaccaggatccgtggcgagtgggggccgcggcagctgcgtccccatgaggaggggaggaagatgccggctgagctgctgctgctgctgatagtcgccttcgccaaccccagctgccaggtgctgtcatcactgcgcatggctgcaatcctggacgaccagaccgtgtgtggccgtggtgagcgtctggccctggccctggcccgagagcagatcaatgggatcatcgaggtcccagccaaggcccgagtggaagtagacatctttgagctgcaacgggacagccagtacgagactacggacaccatgtgtcagatcctgcccaagggggttgtgtctgtcttgggaccctcctccagcccagcttctgcctccaccgtgagccatatctgtggggagaaggagattccccacatcaaggtaggccctgaggagacaccccgccttcagtacctccgctttgcatctgtcagcctgtatcccagtaatgaagatgtcagcctggcagtctcccggatcctcaagtcctttaactacccctccgctagcctcatctgcgccaaagctgagtgcctgctgcggttagaagaactggtgcgaggcttcctcatctccaaggagacactgtccgtgaggatgcttgatgacagccgggaccccacgccgctactcaaggagatccgagatgacaaagtgtccaccatcatcatcgatgccaacgcgtccatctcccaccttgtcctccgtaaggcttcggagctgggaatgacctcagcgttttacaagtacatcctcaccaccatggacttccccatcctgcatctggacggtatcgtagaggactcctccaacatcttgggcttttccatgttcaacacctcccatcccttctacccggagtttgtgcgcagcctcaacatgtcctggagggagaactgcgaagccagcacctaccctggccctgcgctgtcggcagccctgatgtttgatgccgtgcatgtggtggtaagcgctgtccgagagctgaaccggagccaggagattggtgtcaagccactggcttgcacttcggccaacatctggccccatgggaccagcctcatgaactacctgcgcatggtagagtatgacgggctgactgggcgggttgagttcaacagcaaagggcagaggaccaactacacactgcgcatcctggagaagtcccgccagggccaccgtgagataggggtgtggtactctaaccggaccctggccatgaatgctaccaccctggacatcaacctgtcacagactctagccaacaagactctggtggtcacaacaatcctggagaacccgtatgtcatgcgccggcccaacttccaggccctgtcagggaacgagcgctttgagggcttctgcgtggacatgcttcgggagctggccgagctgctgcgcttccggtatcgcctgcggttggtggaggacggactgtacggggcacctgagcccaatggttcctggacaggaatggttggcgagctcatcaaccggaaggcagacctggctgtggcagccttcaccatcaccgcggagagagagaaggtcatcgacttctccaagccattcatgaccctggggatcagcatcctctacagggtgcacatgggccgcaagcctggctacttctccttcctggaccctttctcccctgccgtgtggctcttcatgcttcttgcctacctggctgtcagctgtgtcttgtttctggctgccaggctgagcccttatgagtggtataaccctcacccgtgtcttcgggcgcgtccccatatcctggagaaccagtacacgctgggtaacagcctttggttccctgtgggtggcttcatgcagcagggctcggagatcatgccccgggcgctgtccacacgctgtgtcagcggagtctggtgggccttcaccttgatcatcatctcctcctacacggccaacctggctgccttcctcacggtgcagcgcatggaggtgccggtggagtctgcagacgacttggcggatcagaccaacattgagtacggcactatccacgctggctccaccatgaccttctttcagaactcacggtaccagacgtaccagcggatgtggaattacatgcagtcgaagcagcccagcgtgttcgtcaagagcacagaggaggggatcgcccgtgtcctcaactcacgttacgccttcctgctggagtccaccatgaacgagtaccacaggcgcctcaattgcaacctcacccagatcgggggcctcctcgacaccaagggctacggcatcggcatgccgctgggctccccattccgggatgagatcacgctggccatcctgcagctccaggagaacaacaggctggagatcctgaagcgcaagtggtgggagggcggccggtgccccaaggaggaggaccacagggccaaaggtttgggcatggagaacattggcggtatttttgtcgtgctgatctgtggcctcatcattgctgtcttcgtggcggtcatggaattcatctggtccacgcggaggtcagcggagtctgaggaggtgtcggtgtgccaggagatgctgcaggagctgcgccacgccgtgtcttgccgcaagacctcgcgttcccgccggcgccggcgccctggcggcccgagccgggccctgctgtcgctgcgcgcggtccgcgagatgcgactcagcaacggcaagctctactcggccggcgcgggcggggacgcgggcgcgcacgggggtccgcagcgcctcctggacgaccccgggcctcctgggggaccccggccccaggctcccacgccctgcacgcacgtgcgcgtctgccaggagtgcaggcgcatccaggcgctgcgagcttcaggggccggggcgcccccgcgtggcctgggcactccggccgaagccaccagcccgcctcggccgcggcctggacccactggaccccgcgagctgactgagcatgaatgaccgtggacggggccgggcgtgcgccccgactgactgcagggacgcgatgcgccccaggcggacaggacgccgcgattttgccttcagtttctggtgaagtccaagcccggctccggagcaggcctgcgcctcctagtggactccagcgagggtgtcgcggacgcccgcattccatcccgcgccgcgggcgggaggagcgcagagaccgaggactcttaagggccgtggactgtgagggccgctcctggcgttggaaagcggtccgcggggaggaccccaacctgggactgcccagatgtcccaagacttgacacggctctccacacttctggaggtcgagagggcctctggacatgtgggtgtcccctggtgcccctctcttctttctctcttttttggggggagaaacctcagaatttctatgagacgcccccaggagagggtctcttgggcccctatatctccccctgccacatctcagaccctgttggaataaaaaaagaacaaaaccccaaaaaaaaaaaaaaaaaaatccgacgcgatcgagctcagtctctcta

SEQ ID NO: 10384 - protein, 919 aa, Rattus norvegicus
  ref <308>: DATABASE ACCESSION NUMBER: SWISS-Prot / P42264
  ref <309>: DATABASE ENTRY DATE: 2002-06-15
MTAPWRRLRSLVWEYWAGFLVCAFWIPDSRGMPHVIRIGGIFEYADGPNAQVMNAEEHAFRFSANIINRNRTLLPNTTLTYDIQRIHFHDSFEATKKACDQLALGVVAIFGPSQGSCTNAVQSICNALEVPHIQLRWKHHPLDNKDTFYVNLYPDYASLSHAILDLVQSLKWRSATVVYDDSTGLIRLQELIMAPSRYNIRLKIRQLPIDSDDSRPLLKEMKRGREFRIIFDCSHTMAAQILKQAMAMGMMTEYYHFIFTTLDLYALDLEPYRYSGVNLTGFRILNVDNAHVSAIVEKWSMERLQAAPRAESGLLDGVMMTDAALLYDAVHIVSVCYQRASQMTVNSLQCHRHKPWRFGGRFMNFIKEAQWEGLTGRIVFNKTSGLRTDFDLDIISLKEDGLEKVGVWSPADGLNITEVAKGRGPNVTDSLTNRSLIVTTLLEEPFVMFRKSDRTLYGNDRFEGYCIDLLKELAHILGFSYEIRLVEDGKYGAQDDKGQWNGMVKELIDHKADLAVAPLTITHVREKAIDFSKPFMTLGVSILYRKPNGTNPSVFSFLNPLSPDIWMYVLLAYLGVSCVLFVIARFSPYEWYDAHPCNPGSEVVENNFTLLNSFWFGMGSLMQQGSELMPKALSTRIIGGIWWFFTLIIISSYTANLAAFLTVERMESPIDSADDLAKQTKIEYGAVKDGATMTFFKKSKISTFEKMWAFMSSKPSALVKNNEEGIQRTLTADYALLMESTTIEYITQRNCNLTQIGGLIDSKGYGIGTPMGSPYRDKITIAILQLQEEDKLHIMKEKWWRGSGCPEEENKEASALGIQKIGGIFIVLAAGLVLSVLVAVGEFIYKLRKTAEREQRSFCSTVADEIRFSLTCQRRLKHKPQPPMMVKTDAVINMHTFNDRRLPGKDSMSCSTSLAPVFP

SEQ ID NO: 10385 - DNA, 3321 bp, Homo sapiens
  ref <308>: DATABASE ACCESSION NUMBER: EMBL / AJ249209
  ref <309>: DATABASE ENTRY DATE: 2001-12-05
cgcggcagctgcgtccccatgaggaggggaggaagatgccggctgagctgctgctgctgctgattgttgccttcgccagccccagctgccaggtgctctcatcactgcgcatggctgcaatcctggatgatcagacagtgtgtggccgcggtgagcgtctggccttggccttggcccgggagcagatcaacgggatcatcgaggtcccagccaaggcccgagtggaagtagacatctttgagctgcagcgggacagccagtacgagaccacggacaccatgtgtcagatcttacccaaaggggttgtgtctgtccttgggccctcctctagcccagcatctgcctccaccgtgagccatatctgtggagagaaggagatcccccacatcaaggtgggtcccgaggagacaccccgccttcagtaccttcgcttcgcgtctgtcagcctgtaccccagtaacgaggacgtcagcttggcggtctcccgaatcctcaagtccttcaactacccctcggccagcctcatctgcgccaaggctgagtgcctgctgcgattggaggaactggtgcgtggcttcctcatctccaaggagacgctgtcagtgaggatgttggacgacagccgggaccccacaccactgctcaaggagatccgtgatgacaaggtgtccaccatcatcatcgacgccaacgcctccatctcccacctcatcctccgtaaggcctcggaactgggaatgacctcagcgttttacaagtacatcctcaccaccatggacttccccatcctgcatctggacggtattgtggaggactcctccaacatcctgggcttctccatgttcaacacgtcccaccccttctaccctgagtttgtccgcagcctcaacatgtcctggagggagaactgtgaagccagcacctacctgggccctgcgctgtcagccgccctgatgtttgacgccgtgcacgtggtggtgagcgctgtccgagagctgaaccgcagccaggagatcggtgtgaagcctctggcctgtacatcggccaacatttggccccacgggaccagcctcatgaactacctgcgcatggtagagtatgatgggctgaccgggcgggtcgagttcaacagcaaagggcagagaaccaactacaccctgcgcatcctagaaaagtcccggcagggccaccgtgagattggggtgtggtactctaaccgcaccctggccatgaatgccaccaccctggacatcaacctgtcgcagacactggccaacaagaccctggtggtcacaaccatcctggagaacccatacgtcatgcgccggcccaacttccaggccctgtcggggaacgaacgcttcgagggcttctgcgtggacatgctgcgggagctggccgagctgctgcgcttccgctaccgcctgcggttggtggaggatgggctgtacggggcgcccgagcccaacggctcctggacgggcatggttggcgagctcatcaaccggaaggcagacctggctgtggccgccttcaccatcacagctgagcgggagaaggtcatcgacttttccaagccctttatgaccctggggatcagcatcctctaccgagtgcacatgggccgcaagcctggctacttctccttcctggaccccttctcccctgctgtgtggctcttcatgcttcttgcctacctggctgtcagctgcgtcctgtttctggctgccaggctgagcccctatgagtggtataacccacacccatgcctgcgggcacgcccccacatcctggagaaccagtacacgctgggcaacagcctgtggtttcccgtggggggcttcatgcagcagggctcggagatcatgccccgggcgctgtccacgcgctgtgtcagcggagtctggtgggccttcaccttgatcatcatctcctcctacacggccaacctggccgccttcctcaccgtgcagcgcatggaggtgcctgtggagtcggccgatgacctggcagatcagaccaacatcgagtatggcaccatccacgccggctccaccatgaccttcttccagaattcacggtaccaaacgtaccagcgcatgtggaactacatgcagtcgaagcagcccagcgtgttcgtcaagagcacagaagagggcattgcccgcgtcctcaactcccgctacgccttcctgctcgagtccaccatgaacgaataccaccggcgcctcaactgcaacctcacccagatcgggggactcctcgacaccaagggctacggcattggcatgccgctgggctccccgttccgggatgagatcacactggccatcctgcagcttcaggagaacaaccggctggagatcctgaagcgcaagtggtgggaggggggccggtgccccaaggaggaggaccatcgagctaaaggtttgggcatggagaacattggtggcatttttatcgtgctcatctgtggcctcatcattgctgtcttcgtggcggtcatggaattcatatggtccacacggaggtcagctgagtccgaggagaccccagctctgcatccagctgcctgccagtgttctgcacttggcccaaggactcctctgaaggagccgtccatgctgctagtaaaggtgccctccacccgtgtccaggttgccttctcaaggacatccctccggcaagtctgtcctttcctcctgcagcatcagttgtcctctctttattggattcaggccaccaacgtacaaatatgctgtcatttctccagtcttaaaccctctcctgacctcactttccctcccagccaccgcccactttcttcccttctctttacagccttggcagcagtggggggtctccctgatgcttccagtttcttctttcctcccatttcctcttgccccccactccagtctggcatcggtccctgccactccactgaagccactcttgtcaccagcaacttccatgtctgaaattcccggtctcaggcctcatgtatatgaggtagcagtgggcttcggcacagccagtcactctcaatcctcaaagccccttcttccccttctcccacttctccggtcactccttcccaggctccctcgttgggtttctctttctccccaggctctgtttgttgtggggctccagggctcagtccttagactgcttctcttctcggtctttctccactacttcaatgatcccaccagccaaatggctcttaagacccactatgtgctggtgattcttgtgttagttatctattgctatcataacaaatgaccttaacagcttttaaaaaaaaaaaaaaaa

SEQ ID NO: 10386 - protein, 980 aa, Homo sapiens [sequence omitted]

SEQ ID NO: 10387 - DNA, 1644 bp, Rattus norvegicus
  ref <308>: DATABASE ACCESSION NUMBER: EMBL / Z11995
  ref <309>: DATABASE ENTRY DATE: 1999-09-14
gcactacaaagagaagatccacgagtacaatgtactgctagatacactgagcagagctgaagaaggttatgagaaccttctcagcccctctgacatgacccacatcaagagtgacaccctggccagcaagcacagtgaactgaaggacagactgcgtagtatcaaccagggcctagaccgcctgaggaaggtcagccaccagggctacggccccgccactgagtttgaagagccccgagtgatagatctgtgggacctggctcagtctgccaacttcactgagaaggaactggagtcgttcagggaggagcttaagcacttcgaggccaaaatcgaaaagcacaaccactaccagaagcagctggagatttcccaccagaagctgaagcacgtggagagcatcggtgaccccgagcacatcagccgcaacaaggagaagtacgtcctgctggaggagaagacaaaggagctgggctacaaggtgaagaagcatctgcaggacctgtccagcagggtctcaagggctcggcacaatgagctctgagaccagaagccactggcagtagcctagagaggctcttgaagacactgggaactgtcaacttgtcatactggtgtggctgtccacagtggcaaggagaaataccgatctgatcctgctgcggctggcaaggactaattttctttcaagcaagtgtagctgtcaccgccctggttgagggctttgggtacatctaccaatgagatatgaccggtctccatgctgcagcaaaagtttacattgaaattatataaatctgtcgccgacagtttattgaaaggaaatcttgctttatccatgaagtcacttccatggaggtagctgtgataaagtgtctcttccccatgacaacgcatagcaccaatccctactgaaagacctgcccgagtacaccaactgtcctggtggaatgacactctggagcaggaaaaacaaatttctaaaaggcatacagtgattatcttctgagctttgcagctggcaacatgtatgttttcacacaagatatttttaagctagcgaaagaaaatactcaagcaggattagttcttaaagcaataaacaggggaataaaaacatcatgtatatataagaaaaccaaggcatgctcacaggtttgagccaagaaagacctggagccctaatccccaccttgtcccaggatgcacctgtcatgatcacagggaagagatgagtctgggatttacaaacctctctctaaacctcagtccagtgttgtgccgctggctgtaccacacacaccgcacaagccccgactgctcccattccattacggcacaggagacatgttctcaccctgcctagcctgctttggtggggggaggcggcggcagggaactctacaagtgtttccagtggtgacctctgttctccctttcaggagctgttttccttcatgtagctagccccatggctaccagaaagaactagaataggagctggctgattttgtcaaaccccaaaacaaacacccctttcctccgggtcttgattttgtcacctgaatctctgggacgagtggccaaggcatttctaggcttactgcaagtatcagatgacgacataagattctagaagtcaag

SEQ ID NO: 10388 - protein, 357 aa, Rattus norvegicus
  ref <308>: DATABASE ACCESSION NUMBER: SWISS-Prot / Q99068
  ref <309>: DATABASE ENTRY DATE: 2001-10-16
LRDRVSTLPRLQLLVLLLLPLLLVPQPIAGHGGKYSREKNEPEMAAKRESGEEFRMEKLNQLWEKAKRLHLSPVRLAELHSDLKIQERDELNWKKLKVEGLDGDGEKEAKLVHNLNVILARYGLDGRKDTQTVHSNALNEDTQDELGDPRLEKLWHKAKTSGKFSSEELDKLWREFLHYKEKIHEYNVLLDTLSRAEEGYENLLSPSDMTHIKSDTLASKHSELKDRLRSINQGLDRLRKVSHQGYGPATEFEEPRVIDLWDLAQSANFTEKELESFREELKHFEAKIEKHNHYQKQLEISHQKLKHVESIGDPEHISRNKEKYVLLEEKTKELGYKVKKHLQDLSSRVSRARHNEL

SEQ ID NO: 10389 - DNA, 1832 bp, Homo sapiens
  ref <308>: DATABASE ACCESSION NUMBER: EMBL / AK027025
  ref <309>: DATABASE ENTRY DATE: 2000-09-29
aaagctgggggatgtgtgggcaagaggtggattgagcaggatctcagggttatgtcgaggaagggaagaaagaaacagaagtcaggcagaggcgtgtctgtgcaaactggaggactccttccaacttcctggaacaaagcgacatcgccagcagcaggctggcagggagtggttgaggtctgggggccaggccacatggctggagaggaatttcagggagcatagcatcgggaggatgctacatatccagggactccctcctggccttcctgtgtcacttcacaatgtgacagtccccaggcatgcccacaggccaggcccagtcacagctgggcttccacaggtcagaatatgggacaggacatagggagaggaccctgtgagttggtgacatatatgtggcagagatggtagtgttcagctgcttcagcagtgtccccaaccatcccaatagggtgggggcctgtgggccagaggactccatgacagtagccatggagtcccacctgtgccaggtcagagcccacccggcaggtttcagagtggtcagcccagtttaagggtgggagtctggagccagacagccaagccccttccacatctacagggtcactgtcatcctcaccacagccaggggtgattctcacctctgcctgcttatgtggggtgtggccgattcctccctttagtcattcattcatttagcacatatttattgggcatcggtgatgtgtcaggcacagtccttggcacacagaatacagcagtgaattaaacaggcaaaaattcctcccctcctggagctcagtgtcaggaaagggggtgataaatgacaatcaaatcgacatggaggttgagcacctctgcactcaggccctctgtctgtccttctgaggacgcaacaagcctggttccctagagctcactttgaccctcaatatgttcataatttccctgctgcttctcccatcgttagacatctgccagtaagcctgctgagagaagcctcagcccactcatacctagagacgctgctggggaaggtcagcacacccaagaactttgggagtgtgtgtctgttttggtttgtgagaaagtagctgcccctcattctggccagttctttccagtagccatggggctggctacaagaagcaaaactgcccatgcaaagagaacacaggtcacttttcaaaacacttgcatcattaccctaaaaataggctgttatgcgttttgacaattgcgctatcctacactctgagggagttggcaacgcatgcggtatagtggagtgggaagagtcgagactgaaagttaagagaagggttttcaagtcccagctcatctcaccccagtgaccttgacagtgtgctcactctcagagccatggattacctggaacaaagtgcagattagtgcccatggtcctttccaggtataacatgctatcgttctttaattttattatatatacatacttttcttctgttttttgctttaagaactaaccccgatcaagagtattttctttagctagcttaaaaagaaaacatatattttatgtgaaaacacatacatggccaaatgcaatactgaagagacaatcatcctgtatcttttatggtttttcctgcttctgagtgtcgttctacaatgcccgttgacttattccattgcgtctctgctttagggtatggtttggtcgctttggttgtcatgagaaagagacattctccttgcagctacctccatgtgagtgaattcctggataaagcaagatttcctttcaataaacgctgtcacccaatgggaaaaaaaaaaaaaaaaaa

SEQ ID NO: 10390 - protein, 357 aa, Homo sapiens
  ref <308>: DATABASE ACCESSION NUMBER: SWISS-Prot / P30533
  ref <309>: DATABASE ENTRY DATE: 2002-06-15
MAPRRVRSFLRGLPALLLLLLFLGPWPAASHGGKYSREKNQPKPSPKRESGEEFRMEKLNQLWEKAQRLHLPPVRLAELHADLKIQERDELAWKKLKLDGLDEDGEKEARLIRNLNVILAKYGLDGKKDARQVTSNSLSGTQEDGLDDPRLEKLWHKAKTSGKFSGEELDKLWREFLHHKEKVHEYNVLLETLSRTEEIHENVISPSDLSDIKGSVLHSRHTELKEKLRSINQGLDRLRRVSHQGYSTEAEFEEPRVIDLWDLAQSANLTDKELEAFREELKHFEAKIEKHNHYQKQLEIAHEKLRHAESVGDGERVSRSREKHALLEGRTKELGYTVKKHLQDLSGRISRARHNEL

SEQ ID NO: 10391 - DNA, 1644 bp, Rattus norvegicus; identical to SEQ ID NO: 10387
  ref <308>: DATABASE ACCESSION NUMBER: EMBL / Z11995
  ref <309>: DATABASE ENTRY DATE: 1999-09-14

SEQ ID NO: 10392 - protein, 357 aa, Rattus norvegicus; identical to SEQ ID NO: 10388
  ref <308>: DATABASE ACCESSION NUMBER: SWISS-Prot / Q99068
  ref <309>: DATABASE ENTRY DATE: 2001-10-16

SEQ ID NO: 10393 - DNA, 1832 bp, Homo sapiens; identical to SEQ ID NO: 10389
  ref <308>: DATABASE ACCESSION NUMBER: EMBL / AK027025
  ref <309>: DATABASE ENTRY DATE: 2000-09-29

SEQ ID NO: 10394 - protein, 357 aa, Homo sapiens; identical to SEQ ID NO: 10390
  ref <308>: DATABASE ACCESSION NUMBER: SWISS-Prot / P30533
  ref <309>: DATABASE ENTRY DATE: 2002-06-15

SEQ ID NO: 10395 - DNA, 1644 bp, Rattus norvegicus; identical to SEQ ID NO: 10387
  ref <308>: DATABASE ACCESSION NUMBER: EMBL / Z11995
  ref <309>: DATABASE ENTRY DATE: 1999-09-14

SEQ ID NO: 10396 - protein, 357 aa, Rattus norvegicus; identical to SEQ ID NO: 10388
  ref <308>: DATABASE ACCESSION NUMBER: SWISS-Prot / Q99068
  ref <309>: DATABASE ENTRY DATE: 2001-10-16

SEQ ID NO: 10397 - DNA, 1832 bp, Homo sapiens; identical to SEQ ID NO: 10389
  ref <308>: DATABASE ACCESSION NUMBER: EMBL / AK027025
  ref <309>: DATABASE ENTRY DATE: 2000-09-29

SEQ ID NO: 10398 - protein, 357 aa, Homo sapiens; identical to SEQ ID NO: 10390
  ref <308>: DATABASE ACCESSION NUMBER: SWISS-Prot / P30533
  ref <309>: DATABASE ENTRY DATE: 2002-06-15

SEQ ID NO: 10399 - DNA, 1644 bp, Rattus norvegicus; identical to SEQ ID NO: 10387
  ref <308>: DATABASE ACCESSION NUMBER: EMBL / Z11995
  ref <309>: DATABASE ENTRY DATE: 1999-09-14

SEQ ID NO: 10400 - protein, 357 aa, Rattus norvegicus; identical to SEQ ID NO: 10388
  ref <308>: DATABASE ACCESSION NUMBER: SWISS-Prot / Q99068
  ref <309>: DATABASE ENTRY DATE: 2001-10-16

SEQ ID NO: 10401 - DNA, 1832 bp, Homo sapiens; identical to SEQ ID NO: 10389
  ref <308>: DATABASE ACCESSION NUMBER: EMBL / AK027025
  ref <309>: DATABASE ENTRY DATE: 2000-09-29

SEQ ID NO: 10402 - protein, 357 aa, Homo sapiens; identical to SEQ ID NO: 10390
  ref <308>: DATABASE ACCESSION NUMBER: SWISS-Prot / P30533
  ref <309>: DATABASE ENTRY DATE: 2002-06-15

SEQ ID NO: 10403 - DNA, 1644 bp, Rattus norvegicus; identical to SEQ ID NO: 10387
  ref <308>: DATABASE ACCESSION NUMBER: EMBL / Z11995
  ref <309>: DATABASE ENTRY DATE: 1999-09-14

SEQ ID NO: 10404 - protein, 357 aa, Rattus norvegicus; identical to SEQ ID NO: 10388
  ref <308>: DATABASE ACCESSION NUMBER: SWISS-Prot / Q99068
  ref <309>: DATABASE ENTRY DATE: 2001-10-16

SEQ ID NO: 10405 - DNA, 1832 bp, Homo sapiens; identical to SEQ ID NO: 10389
  ref <308>: DATABASE ACCESSION NUMBER: EMBL / AK027025
  ref <309>: DATABASE ENTRY DATE: 2000-09-29

SEQ ID NO: 10406 - protein, 357 aa, Homo sapiens; identical to SEQ ID NO: 10390
  ref <308>: DATABASE ACCESSION NUMBER: SWISS-Prot / P30533
  ref <309>: DATABASE ENTRY DATE: 2002-06-15

SEQ ID NO: 10407 - DNA, 1644 bp, Rattus norvegicus; identical to SEQ ID NO: 10387
  ref <308>: DATABASE ACCESSION NUMBER: EMBL / Z11995
  ref <309>: DATABASE ENTRY DATE: 1999-09-14

SEQ ID NO: 10408 - protein, 357 aa, Rattus norvegicus; identical to SEQ ID NO: 10388
  ref <308>: DATABASE ACCESSION NUMBER: SWISS-Prot / Q99068
  ref <309>: DATABASE ENTRY DATE: 2001-10-16

SEQ ID NO: 10409 - DNA, 1832 bp, Homo sapiens; identical to SEQ ID NO: 10389
  ref <308>: DATABASE ACCESSION NUMBER: EMBL / AK027025
  ref <309>: DATABASE ENTRY DATE: 2000-09-29

SEQ ID NO: 10410 - protein, 357 aa, Homo sapiens; identical to SEQ ID NO: 10390
  ref <308>: DATABASE ACCESSION NUMBER: SWISS-Prot / P30533
  ref <309>: DATABASE ENTRY DATE: 2002-06-15

SEQ ID NO: 10411 - DNA, 2854 bp, Rattus norvegicus
  ref <308>: DATABASE ACCESSION NUMBER: EMBL / Z12158
  ref <309>: DATABASE ENTRY DATE: 1994-05-30
atcgctcctttttgagtgcctgggtgccgcggctgccgcgtcagtctgctgcgctccatgaggaagatgcttgccgctgtgtcccacgtgttggcaggcgctgcgcagaagccggcaagcagagtgctggtagcttcccgtaatttcgcaaatgatgctacatttgagattaagaaatgtgaccttcatcgtctagaagagggccctccagtcaccacagtgctcaccagagaggatgggctcaagtactacaggatgatgcagaccgtgcgccggatggagctcaaggcggatcagctgtataagcagaaaattattcgtggtttctgtcacttgtgtgatggtcaggaagcctgctgtgtgggcctggaggctggcataaaccccacggaccatctcatcactgcctatcgagcccatggcttcaccttcactcggggcctgcctgtccgagcaattcttgcagaattaacaggacgaagaggaggctgtgctaaggggaaaggcggatcaatgcacatgtacgccaagaacttctatggcggcaacggtatcgttggagctcaggtgcccctgggtgcaggaattgctctggcctgcaagtataatggcaaagatgaggtctgtttgacattatatggtgatggtgctgctaaccagggtcagatatttgaagcttacaatatggcagcattgtggaaattaccttgtattttcatctgtgagaataaccgctatggcatgggcacatctgttgagagagcagcagccagcacggattactacaaaagaggagatttcattcctggactgagggtagatggaatggatatcttgtgtgtccgagaggcaacaaagtttgcagctgcctactgcaggtctggtaaggggcctatcctgatggagctacagacttaccgctaccatggacatagtatgagtgaccctggagtcagttatcgcactcgagaagaaatccaggaagtaagaagtaagagtgaccctattatgcttctcaaggatagaatggtgaacagcaatcttgcaagtgttgaagaattaaaggagattgatgtggaagtgaggaaagaaatcgaggatgctgcccagtttgccacggctgatccggagccgccattggaggagctaggctatcatatctacagcagtgacccacccttcgaagtgcgtggtgccaaccagtggatcaagtttaagtcagtcagttaatgggagagtattagatggatgggcgtttctcatccgttgtaagaaactctttgtgctctcaactttgacaggaaatacccagacaacaaaagtcttgaaaacatgtaaattaagggagagtaaaattgcatgcagtttgtacattgttgtattcggtgtattcatgtgaataagagtgtataggattggagatgggtaatgcagtttataaccttcatcatgtcctaggtcagttactaaaaggaacaactctgccatttggtgatgtgatcatagctttgaatgaccttgtggaggcatgctgggattaatgcaaagcacaggttagaagtgtatggtcaccatgaattgtggaggctggactctgtttggcactgaccgttatgtctttgatcaaaggctatatataatcatgtgttttaaaataagggtacttcagtcacttcaaaggtaaaataatttaattttctccatttagacatttaacaaacacaaaattgtactcccattccaaggcacactttttaacttttcacatttaagtaattacactggtttataaaatacttaggctttatctttccagcaactgctataaggtatgctgacattttaaatactaggtcaggagagacattacttacaatccggtttataaacaagtatgctctaaatcacatgtgcttgaatgaaacgaacaagggtctttctgtgtaaacgcaggatttgtgtgtgcactaacagaagctttaatcgtgagcaggtgtagggtactttttgctcattctccccagcttggcttattgtgaggactcctgcatttgtcttctgtgctgggagactgcatgccagagcctacagaggacaccaccactgcaaaacaataattttcataagaaaagcaaacttgaagccacccatctactcttcaaatgtaatctctaacttaaaagtatgtaaccttttcctagacatggtaccataggaacactgggtgatctgggtagaggtgtgggcatttaaacaatgtaaagaaaggtctggcacctcatgccttgccaacctgagaaaatgagctgtgcttgctacaacataggaaagataaatttcaaagatcggggaaactaccagcattaaaaataaaagtattcacataaaaaagccccattttattatttaaattgtttgcaggctctcttaccgtagtctgaggcaccttaggtcttccttagtgatatcattgagaatatcagaaagtgtgtaatcttcttcaacaatctgaaagattcaacatacattcaacaacataagcagcttttcaacagtatcataggaatcctttgatttagaaatttaccttttctattgtatttgcatccactccttgtagctgcaaccagtctataagctctctgttggttcccagtccgtcatggggtggtgggttctctgttccacctataaagattccaattttgttttattgtatagtaatgtataaccataaaatgcttcaaaaataacaaagtggatgtaatcatgtatccaaacagaaatgtaaatgtgctgtgaaaaggaaatgaattaaacttgtttgacccgctaaaaaaaaaaaaaaaaaaaa

SEQ ID NO: 10412 - protein, 390 aa, Rattus norvegicus
  ref <308>: DATABASE ACCESSION NUMBER: SWISS-Prot / CAA78146
  ref <309>: DATABASE ENTRY DATE: 2002-06-15
MRKMLAAVSRVLAGAAQKPASRVLVASRNFANDATFEIKKCDLHRLEEGPPVTTVLTREDGLKYYRMMQTVRRMELKADQLYKQKIIRGFCHLCDGQEACCVGLEAGINPTDHLITAYRAHGFTFNRGHAVRAVLAELTGRRGGCAKGKGGSMHMYAKNFYGGNGIVGAQVPLGAGIALACKYNGKDEVCLTLYGDGAANQGQIFEAYNMAALWKLPCIFICENNRYGMGTSVERAAASTDYYKRGDFIPGLRVDGMDILCVREATKFAAAYCRSGKGPILMELQTYRYHGHSMSDPGVSYRTREEIQEVRSKSDPIMLLKDRMVNSNLASVEELKEIDVEVRKEIEDAAQFATADPEPPLEELGYHIYSSDPPFEVRGANQWIKFKSVS

SEQ ID NO: 10413 - DNA, 1472 bp, Homo sapiens
  ref <308>: DATABASE ACCESSION NUMBER: Refseq / NM_000284
  ref <309>: DATABASE ENTRY DATE: 2002-11-05
actgaggcgtggcgtctgctggggcacctgaaggagacttgggggcacccgcgtcgtgcctcctgggttgtgaggagtcgccgctgccgccactgcctgtgcttcatgaggaagatgctcgccgccgtctcccgcgtgctgtctggcgcttctcagaagccggcaagcagagtgctggtagcatcccgtaattttgcaaatgatgctacatttgaaattaagaaatgtgaccttcaccggctggaagaaggccctcctgtcacaacagtgctcaccagggaggatgggctcaaatactacaggatgatgcagactgtacgccgaatggagttgaaagcagatcagctgtataaacagaaaattattcgtggtttctgtcacttgtgtgatggtcaggaagcttgctgtgtgggcctggaggccggcatcaaccccacagaccatctcatcacagcctaccgggctcacggctttactttcacccggggcctttccgtccgagaaattctcgcagagcttacaggacgaaaaggaggttgtgctaaagggaaaggaggatcgatgcacatgtatgccaagaacttctacgggggcaatggcatcgtgggagcgcaggtgcccctgggcgctgggattgctctagcctgtaagtataatggaaaagatgaggtctgcctgactttatatggcgatggtgctgctaaccagggccagatattcgaagcttacaacatggcagctttgtggaaattaccttgtattttcatctgtgagaataatcgctatggaatgggaacgtctgttgagagagcggcagccagcactgattactacaagagaggcgatttcattcctgggctgagagtggatggaatggatatcctgtgcgtccgagaggcaacaaggtttgctgctgcctattgtagatctgggaaggggcccatcctgatggagctgcagacttaccgttaccacggacacagtatgagtgaccctggagtcagttaccgtacacgagaagaaattcaggaagtaagaagtaagagtgaccctattatgcttctcaaggacaggatggtgaacagcaatcttgccagtgtggaagaactaaaggaaattgatgtggaagtgaggaaggagattgaggatgctgcccagtttgccacggccgatcctgagccacctttggaagagctgggctaccacatctactccagcgacccaccttttgaagttcgtggtgccaatcagtggatcaagtttaagtcagtcagttaaggggaggagaaggagaggttataccttcagggggctaccagacagtgttctcaacttggttaaggaggaagaaaacccagtcaatgaaattcaatgaaattcttggaaacttccattaagtgtgtagattgagcaggtagtaattgcatgcagtttgtacattagtgcattaaaagatgaattattgagtgctt

SEQ ID NO: 10414 - protein, 390 aa, Homo sapiens
  ref <308>: DATABASE ACCESSION NUMBER: SWISS-Prot / P08559
  ref <309>: DATABASE ENTRY DATE: 2002-06-15
MRKMLAAVSRVLSGASQKPASRVLVASRNFANDATFEIKKCDLHRLEEGPPVTTVLTREDGLKYYRMMQTVRRMELKADQLYKQKIIRGFCHLCDGQEACCVGLEAGINPTDHLITAYRAHGFTFTRGLSVREILAELTGRKGGCAKGKGGSMHMYAKNFYGGNGIVGAQVPLGAGIALACKYNGKDEVCLTLYGDGAANQGQIFEAYNMAALWKLPCIFICENNRYGMGTSVERAAASTDYYKRGDFIPGLRVDGMDILCVREATRFAAAYCRSGKGPILMELQTYRYHGHSMSDPGVSYRTREEIQEVRSKSDPIMLLKDRMVNSNLASVEELKEIDVEVRKEIEDAAQFATADPEPPLEELGYHIYSSDPPFEVRGANQWIKFKSVS

SEQ ID NO: 10415 - DNA, 2854 bp, Rattus norvegicus; identical to SEQ ID NO: 10411
  ref <308>: DATABASE ACCESSION NUMBER: EMBL / Z12158
  ref <309>: DATABASE ENTRY DATE: 1994-05-30

SEQ ID NO: 10416 - protein, 390 aa, Rattus norvegicus; identical to SEQ ID NO: 10412
  ref <308>: DATABASE ACCESSION NUMBER: SWISS-Prot / CAA78146
  ref <309>: DATABASE ENTRY DATE: 2002-06-15

SEQ ID NO: 10417 - DNA, 1472 bp, Homo sapiens; identical to SEQ ID NO: 10413
  ref <308>: DATABASE ACCESSION NUMBER: Refseq / NM_000284
  ref <309>: DATABASE ENTRY DATE: 2002-11-05

SEQ ID NO: 10418 - protein, 390 aa, Homo sapiens; identical to SEQ ID NO: 10414
  ref <308>: DATABASE ACCESSION NUMBER: SWISS-Prot / P08559
  ref <309>: DATABASE ENTRY DATE: 2002-06-15

SEQ ID NO: 10419 - DNA, 1421 bp, Rattus norvegicus
  ref <308>: DATABASE ACCESSION NUMBER: EMBL / Z18877
  ref <309>: DATABASE ENTRY DATE: 1993-11-10
agctccaccgcggtggcgccgcgcgagacacaggacctgcaggctgcagaggcaaaagctccggaggtcatggagcaggaactcaggagcaccccgtcctggaagctggacaagttcatagaggtttacctccttccaaacaccagcttccgtgatgatgtcaaatcagctatcaatgtcctgtgtgatttcctgaaggagagatgcttccgagatactgtccacccagtgagggtctccaaggtggtgaagggtggctcctcaggcaaaggcaccacactcaagggcaagtcagacgctgacctggtggtgttccttaacaatttcaccagctttgaggatcagttaaacagacggggagagttcatcaaggaaattaagaaacagctgtatgaggttcagcgtgaaaaacattttagagtgaagtttgaggtccagagttcatggtggcccaacccccgggctctgagcttcaagctgagtgcaccacacctccaacaggaggtggagtttgatgtgcttccagcctatgatgtcctaggtcatgttagcctctacagcaatcctgatcccaagatctacaccatcctcatctccgaatgtatctccctggggaaggatggcgagttctctacctgcttcacggagctccagaggaacttcctgaagcagcgcccaaccaagctgaagagtctcatccgcctggtcaagcactggtaccaactgtgtaaggagaagctggggaagccgctgcccccacagtacgccctggagctgctcacggtctatgcctgggaacgtggaaatggaattactgagttcaacacagctcagggcttccggacaatcttggaactggtcacaaagtaccagcagcttcgaatctactggacaaagtattatgactttcaacacccagatgtctccaaatacctacacagacagctcagaaaatccaggcctgtgatcctggaccctgctgacccaacagggaacgtggctggtgggaaccaagaaggctggcggcggttggcctcagaggcgaggctgtggctgcagtacccatgttttatgaacaggggtggttccccagtgagttcctgggaagtgccggtggatgaggcctggtcatgcatcctgctgtgaacccagcagcaccagcccaggaggctccggagtcaggggcacgtgctgctctgctgcaggaccttgacacagtgagggaggccccactcgggatcacagtccatgcttctgatgcccgcccgccatgtttgaatactgtccaatcacagacagccttcctcaacagattcagaaggggcggaaagaactcaagcttgacttccatctgaccgtccacctgttgggaggttctgtccaaccatgtctgtcaacaacaataaagtacagcaggtgcc

SEQ ID NO: 10420 - protein, 358 aa, Rattus norvegicus
  ref <308>: DATABASE ACCESSION NUMBER: SWISS-Prot / Q05961
  ref <309>: DATABASE ENTRY DATE: 2001-10-16
MEQELRSTPSWKLDKFIEVYLLPNTSFRDDVKSAINVLCDFLKERCFRDTVHPVRVSKVVKGGSSGKGTTLKGKSDADLVVFLNNFTSFEDQLNRRGEFIKEIKKQLYEVQREKHFRVKFEVQSSWWPNPRALSFKLSAPHLQQEVEFDVLPAYDVLGHVSLYSNPDPKIYTILISECISLGKDGEFSTCFTELQRNFLKQRPTKLKSLIRLVKHWYQLCKEKLGKPLPPQYALELLTVYAWERGNGITEFNTAQGFRTILELVTKYQQLRIYWTKYYDFQHPDVSKYLHRQLRKSRPVILDPADPTGNVAGGNQEGWRRLASEARLWLQYPCFMNRGGSPVSSWEVPVDEAWSCILL

SEQ ID NO: 10421 - DNA, 1347 bp, Homo sapiens
  ref <308>: DATABASE ACCESSION NUMBER: EMBL / D00068
  ref <309>: DATABASE ENTRY DATE: 1998-02-20
gggggaagagataaaagcaaacaggtctgggaggcagttctgttgccactctctctcctgtcaatgatggatctcagaaataccccagccaaatctctggacaagttcattgaagactatctcttgccagacacgtgtttccgcatgcaaatcaaccatgccattgacatcatctgtgggttcctgaaggaaaggtgcttccgaggtagctcctaccctgtgtgtgtgtccaaggtggtaaagggtggctcctcaggcaagggcaccaccctcagaggccgatctgacgctgacctggttgtcttcctcagtcctctcaccacttttcaggatcagttaaatcgccggggagagttcatccaggaaattaggagacagctggaagcctgtcaaagagagagagcattttccgtgaagtttgaggtccaggctccacgctggggcaacccccgtgcgctcagcttcgtactgagttcgctccagctcggggagggggtggagttcgatgtgctgcctgcctttgatgccctgggtcagttgactggcagctataaacctaacccccaaatctatgtcaagctcatcgaggagtgcaccgacctgcagaaagagggcgagttctccacctgcttcacagaactacagagagacttcctgaagcagcgccccaccaagctcaagagcctcatccgcctagtcaagcactggtaccaaaattgtaagaagaagcttgggaagctgccacctcagtatgccctggagctcctgacggtctatgcttgggagcgagggagcatgaaaacacatttcaacacagcccagggatttcggacggtcttggaattagtcataaactaccagcaactctgcatctactggacaaagtattatgactttaaaaaccccattattgaaaagtacctgagaaggcagctcacgaaacccaggcctgtgatcctggacccggcggaccctacaggaaacttgggtggtggagacccaaagggttggaggcagctggcacaagaggctgaggcctggctgaattacccatgctttaagaattgggatgggtccccagtgagctcctggattctgctggtgagacctcctgcttcctccctgccattcatccctgcccctctccatgaagcttgagacatatagctggagaccattctttccaaagaacttacctcttgccaaaggccatttatattcatatagtgacaggctgtgctccatattttacagtcattttggtcacaatcgagggtttctggaattttcacatcccttgtccagaattcattcccctaagagtaataataaataatctctaacacc

SEQ ID NO: 10422 - protein, 400 aa, Homo sapiens [sequence omitted]

SEQ ID NO: 10423 - DNA, 4987 bp, Rattus norvegicus
  ref <308>: DATABASE ACCESSION NUMBER: EMBL / Z19552
  ref <309>: DATABASE ENTRY DATE: 1993-03-01
atggaagtgtcaccattgcagcctgtaaatgaaaatatgctactcaacaaaaagaagaatgaagatggcaagaaaagactgtccgttgaaagaatctatcagaaaaaaacccaactggaacatatactgctccgcccagatacctacatcggctctgtggagttagtgacccagcaaatgtgggtttacgatgaagatgttggtattaactacagggaagtcacttttgttcctggtttgtataaaatctttgatgaaattctagttaatgctgctgataacaaacaaagggacccaaaaatgtcttgcattagagtcacaatgatgcgaaataatttaattagtatatggaataatggaaagggaattcctgttgttgaacacaaagtggagaaaatgtatgtcccagctctcatatttggacagctcctgacctccagtaactacgatgatgatgagaagaaagtgacaggtggtcgaaatggctatggagctaaactgtgtaacatattcagcaccaaatttactgtggaaacagccagtagggaatacaagaaaatgttcaaacagacatggatggataacatggggagagctggtgacatggagctcaagccctttagcggagaggattacacgtgtattaccttccagcctgacttatctaagtttaaaatgcaaagcctggacaaagatattgtcgcactgatggtcagaagagcatacgatattgctggttccaccaaagatgtaaaagtctttcttaatggaaacaggctgccagtcaaagggttccgtagttacgtggatatgtatttgaaggataaggttgatgaaactgggaacgctctgaaggtggtgcatgaacaagtaaatccccggtgggaagtgtgcttaacaatgagcgagaaaggctttcagcagattagcttcgtcaacagcatcgctacttctaagggtggcagacatgtcgattatgtagccgatcagattgtgagtaaactcgttgatgtggtgaaaaagaagaacaagggaggtgttgcagtgaaggccgatcaggtgaagaatcacatgtggatttttggaaatgcggtaattgaaaacccaacctttgattctcaaacaaaagaaaacatgactttacaagccaagagctttggatcaacttgtcaattaagtgaaaaattcatcaaagctgcaattggttgtggtattgtcgaaagcatactaaactgggtgaagtttaaggcccaaatccaattaaacaagaagtgttcagctgtaaaacataacaggatcaagggaatccccaaacttgacgacgccaatgacgcagggagccgaaactctgctgaatgcacacttatcctgactgaaggggactcagccaaaactctggcagtctcaggacttggagtggttggaagagacaaatatggggtgttccctctcagaggaaaaatactcaatgtgcgagaagcttctcataaacagatcatggaaaatgctgaaattaacaatatcatcaagattgtggggcttcagtacaagaaaaactatgaggatgaagattcattgaaaactcttcgttatgggaagatcatgattatgacagatcaggaccaagatggttcccacatcaaaggcttgctgatcaattttatccatcacaattggccatctcttctgcgacatcgttttctagaagaatttatcactcctattgtaaaggtatctaaaaacaagcaagaaatagcattctacagtcttcccgagtttgaagaatggaagagtacaaatccaaatcacaaaaaatggaaagtcaagtactacaaaggtttgggcacgagcacatcaaaggaagctaaggagtattttgcaaatatgaaacgacatcgtattcagttcaaatactctggccctgaagacgatgctgcgatcagcctggcctttagtaaaaaacaggtcgatgatcgaaaggaatggttaactaatttcatggaagatagaagacagcggaagttacttggccttcctgaggattatttgtatggacaaaccactatgtacctgacctataatgatttcattaacaaggaacttatcctcttttcaaactctgataatgaaagatctatcccatctatggtagatggtttgaaaccaggtcagagaaaggttttgtttacttgtttcaaacggaatgacaagcgagaggtgaaagttgcccagttagctgggtcagtggcagaaatgtcctcttatcaccatggtgagatgtcgctgatgatgaccattatcaatttggctcagaattttgtgggtagcaataatttgaaccttctacagcctattggtcagtttggtaccaggctgcatggtggcaaggactcagccagccctaggtacatctttacaatgctcagccctttggctcggttgttatttccatcaaaagatgatcacacgttacggtttctgtatgacgacaaccagcgtgttgagcctgaatggtacatccctattatacccatggtgctgataaatggtgctgagggaattggtactgggtggtcctgcaaaatccccaactttgatgttcgtgaagtcgtaaataatatcaggcggctgttggatggagaagagcctctgcccatgctcccaagttataagaattacaaaggtactattgaagaactggcttcaaatcagtatgtgattaatggagaagtagctattctgaattccacaaccattgagatcactgagcttcccatcagaacatggacccagacatataaggaacaggttctagaacctatgttgaatggcaccgagaagacaccccctctaataacagactatagggaataccacacagataccactgtgaagtttgtcataaagatgactgaagaaaaattggcagaggcagagagagtgggactacacaaagtcttcaaactccagactagtctcacttgcaactctatggtactttttgaccatgttggttgtttaaagaaatatgacactgtgttggatattctaagagacttctttgagctcaggcttaaatattatggattaagaaaagaatggcttctaggaatgcttggtgcagaatcttctaaactgaataatcaagctcgctttatattagagaaaatagatggcaaaatagtcattgaaaataaacctaagaaagaattaattaaagttctgattcagagaggctatgactccgaccctgtgaaagcctggaaagaagctcagcagaaggtcccagaagaagaggaaaatgaagagaatgaagagagcgagagtgaaagcacgagccctgcagcggagtctggaccgaccttcaactaccttcttgatatgcccctgtggtatctaaccaaggagaagaaggacgagctgtgcaagcaaagggacgagaaggaacaagagctcaacacgttaaagaaaaagactccatcggatttgtggaaggaagacctggctgcttttgtggaagaactggaggttgttgaagccaaggaaaaacaggatgaacaagtaggacttcctggaaagggggtgaaagcgaaggggaagaaagcgcagatatctgaagtcctgccttctcctgtggggaaaagggtcatcccgcaggtgactatggagatgagagctgaggcagagaagaaaatcaggaggaaaattaagagcgagaatgttgagggcacccctgctgaggatggtgctgagccaggactccggcagagactagagaagaggcagaagagagagccaggtaccagggcaaagaagcaaactacattgccatttaagcctatcaaaaaagcccaaaagcaaaacccttggtctgattctgaatcagatatgagcagcaacgaaagcaattttgatgtccctccacgagagaaagagccaagaattgctgcaacaaaagccaaattcacggcggatttagactctgatgacgatttctcaggcttggatgagaaggatgaggatgaagatttcttcccattagatgatactccacctaagaccaaaatgcccccaaaaaatactaaaaaagcactgaagccacagaagagctccacatcagttgatcttgaaagtgatgggaaagacagtgtaccagcttctccaggcgcttctgctgctgacgtcccagctgagactgaaccctccaagccgtcctccaaacagacagtgggagtgaagaggacaataaccaaaggtcagtctttaacctccactgctggcaccaaaaagagagctgtaccaaaggagaccaagtcagattcagccttgaatgctcatgtctccaaaaagcctgctcctgccaaagccaagaacagtcgcaagaggatgccatcttcttctgacagctcggactctgagtttgagaaggcgatttctaaaggtgccacaagcaagaaactcaagggagaggagcgggatttccatgtggacttagatgacactgtggctcctcgagcaaaatccggacgagcaaggaagccgattaagtacctggaggagtcggatgacgacctcttctaaggggtgaggggatttcaggaatggttttactgagccacgttagttttaaagttcttccttaaccactctgaatttaattggcaggaagacttttttttaaataagaatatgcaagtgagcaggcccctgtggccttcacctttgttctcaacatactgtcagtagtggccgtctcgtgggcattgtcgtcttctctgattgtctgttttatgtctgttttctttggtctctgaaacctggcttgaatattttttggattccacataattatatgcttactcagcacagtagcatttatcaatttaaactaaagtgcaaatggtttcaaaagcattcctgcctcctttcctatcccactaaatatgaggtaagacagcccttgttttcaattttataggtagaattc

SEQ ID NO: 10424 - protein, 1526 aa, Rattus norvegicus; identical to SEQ ID NO: 7148
  ref <308>: DATABASE ACCESSION NUMBER: SWISS-Prot / P41516
  ref <309>: DATABASE ENTRY DATE: 2001-10-16

SEQ ID NO: 10425 - DNA, 1213 bp, Homo sapiens; identical to SEQ ID NO: 7149
  ref <308>: DATABASE ACCESSION NUMBER: EMBL / AK024080
  ref <309>: DATABASE ENTRY DATE: 2002-08-06

SEQ ID NO: 10426 - protein, 1531 aa, Homo sapiens; identical to SEQ ID NO: 7150
  ref <308>: DATABASE ACCESSION NUMBER: SWISS-Prot / P11388
  ref <309>: DATABASE ENTRY DATE: 2002-06-15

SEQ ID NO: 10427 - DNA, 705 bp, Rattus norvegicus
  ref <308>: DATABASE ACCESSION NUMBER: EMBL / Z29072
  ref <309>: DATABASE ENTRY DATE: 1994-03-02
ttgtgttccaatgttccacttgatcagcttggacaaaaagtggtttgtaatatagaagatggtctagtgtgcaaaaatgcagaacagggaataggagggattattcccatgcgcatgtgtctcaactatgaaatcaatgtttactgctgtatatgtattacttcaaccccaccatccaccaccacggagatccaaactacaacatcaacaacaaagacttccattccaacatcaactgccatgaagacaccaagcccatctcctacaactacagtgactccaactccagaaacaaccaccacacagatttcaacttcaacatctactaccaccaagatcacaaccccaacacccatcacggagacttccactcctatatctaccaccagccagacaccaagtccagcctctactaccacagtgactccagttacaacatctactactacagagacctcaatgtcattatctactactacacagaccacatctgcaacacctatagtaacggagacatctactcctagatctaccactactcagacaccaagcacagtctccaccaccacagggactccaactacgacaccaacaattggaaagacgacaaccccaacatctacagtgacagagacatctactcctacatcaaccactactcagacatcaagtccaacccctacaaccacagggactccaccctcg

SEQ ID NO: 10428 - protein, 235 aa, Rattus norvegicus
  ref <308>: DATABASE ACCESSION NUMBER: SWISS-Prot / CAA82313
  ref <309>: DATABASE ENTRY DATE: 2003-02-01
LCSNVPLDQLGQKVVCNIEDGLVCKNAEQGIGGIIPMRMCLNYEINVYCCICITSTPPSTTTEIQTTTSTTKTSIPTSTAMKTPSPSPTTTVTPTPETTTTQISTSTSTTTKITTPTPITETSTPISTTSQTPSPASTTTVTPVTTSTTTETSMSLSTTTQTTSATPIVTETSTPRSTTTQTPSTVSTTTGTPTTTPTIGKTTTPTSTVTETSTPTSTTTQTSSPTPTTTGTPPS

SEQ ID NO: 10429 - DNA, 15720 bp, Homo sapiens
  ref <308>: DATABASE ACCESSION NUMBER: EMBL / L21998
  ref <309>: DATABASE ENTRY DATE: 1998-01-13
caacccacaccgcccctgccagccaccatggggctgccactagcccgcctggcggctgtgtgcctggccctgtctttggcagggggctcggagctccagacagagggcagaacccgataccacggccgcaacgtctgcagcacctggggcaacttccactacaagaccttcgacggggacgtcttccgcttccccggcctctgcgactacaacttcgcctccgactgccgaggctcctacaaggaatttgctgtgcacctgaagcggggtccgggccaggctgaggcccccgccggggtggagtccatcctgctgaccatcaaggatgacaccatctacctcacccgccacctggctgtgcttaacggggccgtggtcagcaccccgcactacagccccgggctgctcattgagaagagcgatgcctacaccaaagtctactcccgcgccggcctcaccctcatgtggaaccgggaggatgcactcatgctggagctggacactaagttccggaaccacacctgtggcctctgcggggactacaacggcctgcagagctattcagaattcctctctgacggcgtgctcttcagtcccctggagtttgggaacatgcagaagatcaaccagcccgatgtggtgtgtgaggatcccgaggaggaggtggcccccgcatcctgctccgagcaccgcgccgagtgtgagaggctgctgaccgccgaggccttcgcggactgtcaggacctggtgccgctggagccgtatctgcgcgcctgccagcaggaccgctgccggtgcccgggcggtgacacctgcgtctgcagcaccgtggccgagttctcccgccagtgctcccacgccggcggccggcccgggaactggaggaccgccacgctctgccccaagacctgccccgggaacctggtgtacctggagagcggctcgccctgcatggacacctgctcacacctggaggtgagcagcctgtgcgaggagcaccgcatggacggctgtttctgcccagaaggcaccgtatatgacgacatcggggacagtggctgcgttcctgtgagccagtgccactgcaggctgcacggacacctgtacacaccgggccaggagatcaccaatgactgcgagcagtgtgtctgtaacgctggccgctgggtgtgcaaagacctgccctgccccggcacctgtgccctggaaggcggctcccacatcaccaccttcgatgggaagacgtacaccttccacggggactgctactatgtcctggccaagggtgaccacaacgattcctacgctctcctgggcgagctggccccctgtggctccacagacaagcagacctgcctgaagacggtggtgctgctggctgacaagaagaagaatgcggtggtcttcaagtccgatggcagtgtactgctcaaccagctgcaggtgaacctgccccacgtgaccgcgagcttctctgtcttccgcccgtcttcctaccacatcatggtgagcatggccattggcgtccggctgcaggtgcagctggccccagtcatgcaactctttgtgacactggaccaggcctcccaggggcaggtgcagggcctctgcgggaacttcaacggcctggaaggtgacgacttcaagacggccagcgggctggtggaggccacgggggccggctttgccaacacctggaaggcacagtcaacctgccatgacaagctggactggttggacgatccctgctccctgaacatcgagagcgccaactacgccgagcactggtgctccctcctgaagaagacagagaccccctttggcaggtgccactcggctgtggaccctgctgagtattacaagaggtgcaaatatgacacgtgtaactgtcagaacaatgaggactgcctgtgcgccgccctgtcctcctacgcgcgcgcctgcaccgccaagggcgtcatgctgtggggctggcgggagcatgtctgcaacaaggatgtgggctcctgccccaactcgcaggtcttcctgtacaacctgaccacctgccagcagacctgccgctccctctccgaggccgacagccactgtctcgagggctttgcgcctgtggacggctgcggctgccctgaccacaccttcctggacgagaagggccgctgcgtacccctggccaagtgctcctgttaccaccgcggtctctacctggaggcgggggatgtggtcgtcaggcaggaagaacgatgtgtgtgccgggatgggcggctgcactgtaggcagatccggctgatcggccagagctgcacggccccaaagatccacatggactgcagcaacctgactgcactggccacctcgaagccccgagccctcagctgccagacgctggccgccggctattaccacacagagtgtgtcagtggctgtgtgtgccccgacgggctgatggatgacggccggggtggctgcgtggtggagaaggaatgcccttgcgtccataacaacgacctgtattcttccggcgccaagatcaaggtggactgcaatacctgcacctgcaagagaggacgctgggtgtgcacccaggctgtgtgccatggcacctgctccatttacgggagtggccactacatcacctttgatgggaagtactacgactttgacggacactgctcctacgtggctgttcaggactactgcggccagaactcctcactgggctcattcagcatcatcaccgagaacgtcccctgtggcactacgggcgtcacctgctccaaggccatcaagatcttcatggggaggacggagctgaagttggaagacaagcaccgtgtggtgatccagcgtgatgagggtcaccacgtggcctacaccacgcgggaggtgggccagtacctggtggtggagtccagcacgggcatcatcgtcatctgggacaagaggaccaccgtgttcatcaagctggctccctcctacaagggcaccgtgtgtggcctgtgtgggaactttgaccaccgctccaacaacgacttcaccacgcgggaccacatggtggtgagcagcgagctggacttcgggaacagctggaaggaggcccccacctgcccagatgtgagcaccaaccccgagccctgcagcctgaacccgcaccgccgctcctgggccgagaagcagtgcagcatcctcaaaagcagcgtgttcagcatctgccacagcaaggtggaccccaagcccttctacgaggcctgtgtgcacgactcgtgctcctgtgacacgggtggggactgtgagtgcttctgctctgccgtggcctcctacgcccaggagtgtaccaaagagggggcctgcgtgttctggaggacgccggacctgtgccccatattctgcgactactacaaccctccgcatgagtgtgagtggcactatgagccatgtgggaaccggagcttcgagacctgcaggaccatcaacggcatccactccaacatctccgtgtcctacctggagggctgctacccccggtgccccaaggacaggcccatctatgaggaggatctgaagaagtgtgtcactgcagacaagtgtggctgctatgtcgaggacacccactacccacctggagcatcggttcccaccgaggagacctgcaagtcctgcgtgtgtaccaactcctcccaagtcgtctgcaggccggaggaaggaaagattcttaaccagacccaggatggcgccttctgctactgggagatctgtggccccaacgggacggtggagaagcacttcaacatctgttccattacgacacgcccgtccaccctgaccaccttcaccaccatcaccctccccaccacccccacctccttcaccactaccaccaccaccaccaccccgacctccagcacagttttatcaacaactccgaagctgtgctgcctctggtctgactggatcaatgaggaccaccccagcagtggcagcgacgacggtgaccgagaaccatttgatggggtctgcggggcccctgaggacatcgagtgcaggtcggtcaaggatccccacctcagcttggagcagcatggccagaaggtgcagtgtgatgtctctgttgggttcatttgcaagaatgaagaccagtttggaaatggaccatttggactgtgttacgactacaagatacgtgtcaattgttgctggcccatggataagtgtatcaccactcccagccctccaactaccactcccagccctccaccaaccacgacgaccacccttccaccaaccaccacccccagccctccaaccaccaccacaaccacccctccaccaaccaccacccccagccctccaataaccaccacgaccacccctctaccaaccaccactcccagccctccaataagcaccacaaccacccctccaccaaccaccactcccagccctccaaccaccactcccagccctccaaccaccactcccagccctccaacaaccaccacaaccacccctccaccaaccaccactcccagccctccaatgactacgcccatcactccaccagccagcactaccacccttccaccaaccaccactcccagccctccaacaaccaccacaaccacccctccaccaaccaccactcccagtcctccaacgactacgcccatcactccaccaaccagcactactacccttccaccaaccaccactcccagccctccaccaaccaccacaaccacccctccaccaaccaccactcccagccctccaacaaccaccactcccagtcctccaacaatcaccacaaccacccctccaccaaccaccactcccagccctccaacaacgaccacaaccacccctccaccaaccaccactcccagccctccaacgactacacccatcactccaccaaccagcactaccacccttccaccaaccaccactcccagccctccaccaaccaccacaaccacccctccaccaaccaccactcccagccctccaacaaccaccactcccagccctccaataaccaccacaaccacccctccaccaaccaccactcccagctctccaataaccaccactcccagccctccaacaaccaccatgaccaccccttcaccaaccaccacccccagctctccaataaccaccacaaccaccccttcctcaactaccactcccagccctccaccaaccaccatgaccaccccttcaccaaccaccactcccagccctccaacaaccaccatgaccacccttccaccaaccaccacttccagccctctaacaactactcctctacctccatcaataactcctcctacattttcaccattctcaacgacaacccctactaccccatgcgtgcctctctgcaattggactggctggctggattctggaaaacccaactttcacaaaccaggtggagacacagaattgattggagacgtctgtggaccaggctgggcagctaacatctcttgcagagccaccatgtatcctgatgttcccattggacagcttggacaaacagtggtgtgtgatgtctctgtggggctgatatgcaaaaatgaagaccaaaagccaggtggggtcatccctatggccttctgcctcaactacgagatcaacgttcagtgctgtgagtgtgtcacccaacccaccaccatgacaaccaccaccacagagaacccaactccgccaaccacgacacccatcaccaccaccactacggtgaccccaaccccaacacccaccggcacacagaccccaaccacgacacccatcaccaccaccactacggtgaccccaaccccaacacccaccggcacacagaccccaaccacgacacccatcaccaccaccactacggtgaccccaaccccaacacccaccggcacacagaccccaaccacgacacccatcaccaccaccactacggtgaccccaaccccaacacccaccggcacacagaccccaaccacgacacccatcaccaccaccactacggtgaccccaaccccaacacccaccggcacacagaccccaaccacgacacccatcaccaccaccactacggtgaccccaaccccaacacccaccggcacacagaccccaaccacgacacccatcaccaccaccactacggtgaccccaaccccaacacccaccggcacacagaccccaaccacgacacccatcaccaccaccactacggtgaccccaaccccaacacccaccggcacacagaccccaaccacgacacccatcaccaccaccactacggtgaccccaaccccaacacccaccggcacacagaccccaaccacgacacccatcaccaccaccactacggtgaccccaaccccaacacccaccggcacacagaccccaaccacgacacccatcaccaccaccactacggtgaccccaaccccaacacccaccggcacacagaccccaaccacgacacccatcaccaccaccactacggtgaccccaaccccaacacccaccggcacacagaccccaaccacgacacccatcaccaccaccactacggtgaccccaaccccaacacccaccggcacacagaccccaaccacgacacccatcaccaccaccactacggtgaccccaaccccaacacccaccggcacacagaccccaaccacgacacccatcaccaccaccactacggtgaccccaaccccaacacccaccggcacacagaccccaaccacgacacccatcaccaccaccactacggtgaccccaaccccaacacccaccggcacacagaccccaaccacgacacccatcaccaccaccactacggtgaccccaaccccaacacccaccggcacacagaccccaaccacgacacccatcaccaccaccactacggtgaccccaaccccaacacccaccggcacacagaccccaaccacgacacccatcaccaccaccactacggtgaccccaaccccaacacccaccggcacacagaccccaaccacgacacccatcaccaccaccactacggtgaccccaaccccaacacccaccggcacacagaccccaaccacgacacccatcaccaccaccactacggtgaccccaaccccaacacccaccggcacacagaccccaaccacgacacccatcaccaccaccactacggtgaccccaaccccaacacccaccggcacacagaccccaaccacgacacccatcaccaccaccactacggtgaccccaaccccaacacccaccggcacacagaccccaaccacgacacccatcaccaccaccactacggtgaccccaaccccaacacccaccggcacacagaccccaaccacgacacccatcaccaccaccactacggtgaccccaaccccaacacccaccggcacacagaccccaaccacgacacccatcaccaccaccactacggtgaccccaaccccaacacccaccggcacacagaccccaaccacgacacccatcaccaccaccactacggtgaccccaaccccaacacccaccggcacacagaccccaaccacgacacccatcaccaccaccactacggtgaccccaaccccaacacccaccggcacacagaccccaaccacgacacccatcaccaccaccactacggtgaccccaaccccaacacccaccggcacacagaccccaaccacgacacccatcaccaccaccactacggtgaccccaaccccaacacccaccggcacacagaccccaaccacgacacccatcaccaccaccactacggtgaccccaaccccaacacccaccggcacacagaccccaaccacgacacccatcaccaccaccactacggtgaccccaaccccaacacccaccggcacacagaccccaaccacgacacccatcaccaccaccactacggtgaccccaaccccaacacccaccggcacacagaccccaaccacgacacccatcaccaccaccactacggtgaccccaaccccaacacccaccggcacacagaccccaaccacgacacccatcaccaccaccactacggtgaccccaaccccaacacccaccggcacacagaccccaaccacgacacccatcaccaccaccactacggtgaccccaaccccaacacccaccggcacacagaccccaaccacgacacccatcaccaccaccactacggtgaccccaaccccaacacccaccggcacacagaccccaaccacgacacccatcaccaccaccactacggtgaccccaaccccaacacccaccggcacacagaccccaaccacgacacccatcaccaccaccactacggtgaccccaaccccaacacccaccggcacacagaccccaaccacgacacccatcaccaccaccactacggtgaccccaaccccaacacccaccggcacacagaccccaaccacgacacccatcaccaccaccactacggtgaccccaaccccaacacccaccggcacacagaccccaaccacgacacccatcaccaccaccactacggtgaccccaaccccaacacccaccggcacacagaccccaaccacgacacccatcaccaccaccactacggtgaccccaaccccaacacccaccggcacacagaccccaaccacgacacccatcaccaccaccactacggtgaccccaaccccaacacccaccggcacacagaccccaaccacgacacccatcaccaccaccactacggtgaccccaaccccaacacccaccggcacacagaccccaaccacgacacccatcaccaccaccactacggtgaccccaaccccaacacccaccggcacacagaccccaaccacgacacccatcaccaccaccactacggtgaccccaaccccaacacccaccggcacacagaccccaaccacgacacccatcaccaccaccactacggtgaccccaaccccaacacccaccggcacacagaccccaaccacgacacccatcaccaccaccactacggtgaccccaaccccaacacccaccggcacacagaccccaaccacgacacccatcaccaccaccactacggtgaccccaaccccaacacccaccggcacacagaccccaaccacgacacccatcaccaccaccactacggtgaccccaaccccaacacccaccggcacacagaccccaaccacgacacccatcaccaccaccactacggtgaccccaaccccaacacccaccggcacacagaccccaaccacgacacccatcaccaccaccactacggtgaccccaaccccaacacccaccggcacacagaccccaaccacgacacccatcaccaccaccactacggtgaccccaaccccaacacccaccggcacacagaccccaaccacgacacccatcaccaccaccactacggtgaccccaaccccaacacccaccggcacacagaccccaaccacgacacccatcaccaccaccactacggtgaccccaaccccaacacccaccggcacacagaccccaaccacgacacccatcaccaccaccactacggtgaccccaaccccaacacccaccggcacacagaccccaaccacgacacccatcaccaccaccactacggtgaccccaaccccaacacccaccggcacacagaccccaaccacgacacccatcaccaccaccactacggtgaccccaaccccaacacccaccggcacacagaccccaaccacgacacccatcaccaccaccactacggtgaccccaaccccaacacccaccggcacacagaccccaaccacgacacccatcaccaccaccactacggtgaccccaaccccaacacccaccggcacacagaccccaaccacgacacccatcaccaccaccactacggtgaccccaaccccaacacccaccggcacacagaccccaaccacgacacccatcaccaccaccactacggtgaccccaaccccaacacccaccggcacacagaccccaaccacgacacccatcaccaccaccactacggtgaccccaaccccaacacccaccggcacacagaccccaaccacgacacccatcaccaccaccactacggtgaccccaaccccaacacccaccggcacacagaccccaaccacgacacccatcaccaccaccactacggtgaccccaaccccaacacccaccggcacacagaccccaaccacgacacccatcaccaccaccactacggtgaccccaaccccaacacccaccggcacacagaccccaaccacgacacccatcaccaccaccactacggtgaccccaaccccaacacccaccggcacacagaccccaaccacgacacccatcaccaccaccactacggtgaccccaaccccaacacccaccggcacacagaccccaaccacgacacccatcaccaccaccactacggtgaccccaaccccaacacccaccggcacacagaccccaaccacgacacccatcaccaccaccactacggtgaccccaaccccaacacccaccggcacacagaccccaaccacgacacccatcaccaccaccactacggtgaccccaaccccaacacccaccggcacacagaccccaaccacgacacccatcaccaccaccactacggtgaccccaaccccaacacccaccggcacacagaccccaaccacgacacccatcaccaccaccactacggtgaccccaaccccaacacccaccggcacacagaccccaaccacgacacccatcaccaccaccactacggtgaccccaaccccaacacccaccggcacacagaccccaaccacgacacccatcaccaccaccactacggtgaccccaaccccaacacccaccggcacacagaccccaaccacgacacccatcaccaccaccactacggtgaccccaaccccaacacccaccggcacacagaccccaaccacgacacccatcaccaccaccactacggtgaccccaaccccaacacccaccggcacacagaccccaaccacgacacccatcaccaccaccactacggtgaccccaaccccaacacccaccggcacacagaccccaaccacgacacccatcaccaccaccactacggtgaccccaaccccaacacccaccggcacacagaccccaaccacgacacccatcaccaccaccactacggtgaccccaaccccaacacccaccggcacacagaccccaaccacgacacccatcaccaccaccactacggtgaccccaaccccaacacccaccggcacacagaccccaaccacgacacccatcaccaccaccactacggtgaccccaaccccaacacccaccggcacacagaccccaaccacgacacccatcaccaccaccactacggtgaccccaaccccaacacccaccggcacacagaccccaaccacgacacccatcaccaccaccactacggtgaccccaaccccaacacccaccggcacacagaccccaaccacgacacccatcaccaccaccactacggtgaccccaaccccaacacccaccggcacacagaccccaaccacgacacccatcaccaccaccactacggtgaccccaaccccaacacccaccggcacacagaccccaaccacgacacccatcaccaccaccactacggtgaccccaaccccaacacccaccggcacacagaccccaaccacgacacccatcaccaccaccactacggtgaccccaaccccaacacccaccggcacacagaccccaaccacgacacccatcaccaccaccactacggtgaccccaaccccaacacccaccggcacacagaccccaaccacgacacccatcaccaccaccactacggtgaccccaaccccaacacccaccggcacacagaccccaaccacgacacccatcaccaccaccactacggtgaccccaaccccaacacccaccggcacacagaccccaaccacgacacccatcaccaccaccactacggtgaccccaaccccaacacccaccggcacacagaccccaaccacgacacccatcaccaccaccactacggtgaccccaaccccaacacccaccggcacacagaccccaaccacgacacccatcaccaccaccactacggtgaccccaaccccaacacccaccggcacacagaccccaaccacgacacccatcaccaccaccactacggtgaccccaaccccaacacccaccggcacacagaccccaaccacgacacccatcaccaccaccactacggtgaccccaaccccaacacccaccggcacacagaccccaaccacgacacccatcaccaccaccactacggtgaccccaaccccaacacccaccggcacacagaccccaaccacgacacccatcaccaccaccactacggtgaccccaaccccaacacccaccggcacacagaccccaaccacgacacccatcaccaccaccactacggtgaccccaaccccaacacccaccggcacacagaccgggccccccacccacacaagcacagcaccgattgctgagttgaccacatccaatcctccgcctgagtcctcaacccctcagacctctcggtccacctcttcccctctcacggagtcaaccacccttctgagtaccctaccacctgccattgagatgaccagcacggccccaccctccacacccacggcacccacgaccacgagcggaggccacacactgtctccaccgcccagcaccaccacgtcccctccaggcacccccactcgcggtaccacgaccgggtcatcttcagcccccacccccagcactgtgcagacgaccaccaccagtgcctggaccccaacgccgaccccactctccacacccagcatcatcaggaccacaggcctgaggccctacccttcctctgtgcttatctgctgtgtcctgaacgacacctactacgcaccaggtgaggaggtgtacaacggcacatacggagacacctgttatttcgtcaactgctcactgagctgtacgttggagttctataactggtcctgcccatccacgccctccccaacacccacgccctccaagtcgacgcccacgccttccaagccatcgtccacgccctccaagccgacgcccggcaccaagccccccgagtgcccagactttgatcctcccagacaggagaacgagacttggtggctgtgcgactgcttcatggccacgtgcaagtacaacaacacggtggagatcgtgaaggtggagtgtgagccgccgcccatgcccacctgctccaacggcctccaacccgtgcgcgtcgaggaccccgacggctgctgctggcactgggagtgcgactgctactgcacgggctggggcgacccgcactatgtcaccttcgacggactctactacagctaccagggcaactgcacctacgtgctggtggaggagatcagcccctccgtggacaacttcggagtttacatcgacaactaccactgcgatcccaacgacaaggtgtcctgtccccgcaccctcatcgtgcgccacgagacccaggaggtgctgatcaagaccgtgcatatgatgcccatgcaggtgcaggtgcaggtgaacaggcaggcggtggcactgccctacaagaagtacgggctggaggtgtaccagtctggcatcaactacgtggtggacatccccgagctgggtgtcctcgtctcctacaatggcctgtccttctccgtcaggctgccctaccaccggtttggcaacaacaccaagggccagtgtggcacctgcaccaacaccacctccgacgactgcattctgcccagcggggagatcgtctccaactgtgaggctgcggctgaccagtggctggtgaacgacccctccaagccacactgcccccacagcagctccacgaccaagcgcccggccgtcactgtgcccgggggcggtaaaacgaccccacacaaggactgcaccccatctcccctctgccagctcatcaaggacagcctgtttgcccagtgccacgcactggtgcccccgcagcactactacgatgcctgcgtgttcgacagctgcttcatgccgggctcgagcctggagtgcgccagtctgcaggcctacgcagccctctgtgcccagcagaacatctgcctcgactggcggaaccacacgcatggggcctgcttggtggagtgcccatctcacagggagtaccaggcctgtggccctgcagaagagcccacgtgcaaatccagctcctcccagcagaacaacacagtcctggtggaaggctgcttctgtcctgagggcaccatgaactacgctcctggctttgatgtctgcgtgaagacctgcggctgtgtgggacctgacaatgtgcccagagagtttggggagcacttcgagttcgactgcaagaactgtgtctgcctggagggtggaagtggcatcatctgccaacccaagaggtgcagccagaagcccgttacccactgcgtggaagacggcacctacctcgccacggaggtcaaccctgccgacacctgctgcaacattaccgtctgcaagtgcaacaccagcctgtgcaaagagaagccctccgtgtgcccgctgggattcgaagtgaagagcaagatggtgcctggaaggtgctgtcccttctactggtgtgagtccaagggggtgtgtgttcacgggaatgctgagtaccagcccggttctccagtttattcctccaagtgccaggactgcgtgtgcacggacaaggtggacaacaacaccctgctcaacgtcatcgcctgcacccacgtgccctgcaacacctcctgcagccctggcttcgaactcatggaggcccccggggagtgctgtaagaagtgtgaacagacgcactgtatcatcaaacggcccgacaaccagcacgtcatcctgaagcccggggacttcaagagcgacccgaagaacaactgcacattcttcagctgcgtgaagatccacaaccagctcatctcgtccgtctccaacatcacctgccccaactttgatgccagcatttgcatcccgggctccatcacattcatgcccaatggatgctgcaagacctgcacccctcgcaatgagaccagggtgccctgctccaccgtccccgtcaccacggaggtttcgtacgccggctgcaccaagaccgtcctcatgaatcattgctccgggtcctgcgggacatttgtcatgtactcggccaaggcccaggccctggaccacagctgctcctgctgcaaagaggagaaaaccagccagcgtgaggtggtcctgagctgccccaatggcggctcgctgacacacacctacacccacatcgagagctgccagtgccaggacaccgtctgcgggctccccaccggcacctcccgccgggcccggcgctcccctaggcatctggggagcgggtgagcggggtgggcacagcccccttcactgccctcgacagctttacctcccccggaccctctgagcctcctaagctcggcttcctctcttcagatatttattgtctgagtctttgttcagtccttgctttccaataataaactcagggggacatgc

SEQ ID NO: 10430 - protein, 5179 aa, Homo sapiens
  ref <308>: DATABASE ACCESSION NUMBER: SWISS-Prot / Q02817
  ref <309>: DATABASE ENTRY DATE: 2002-06-15
MGLPLARLAAVCLALSLAGGSELQTEGRTRYHGRNVCSTWGNFHYKTFDGDVFRFPGLCDYNFASDCRGSYKEFAVHLKRGPGQAEAPAGVESILLTIKDDTIYLTRHLAVLNGAVVSTPHYSPGLLIEKSDAYTKVYSRAGLTLMWNREDALMLELDTKFRNHTCGLCGDYNGLQSYSEFLSDGVLFSPLEFGNMQKINQPDVVCEDPEEEVAPASCSEHRAECERLLTAEAFADCQDLVPLEPYLRACQQDRCRCPGGDTCVCSTVAEFSRQCSHAGGRPGNWRTATLCPKTCPGNLVYLESGSPCMDTCSHLEVSSLCEEHRMDGCFCPEGTVYDDIGDSGCVPVSQCHCRLHGHLYTPGQEITNDCEQCVCNAGRWVCKDLPCPGTCALEGGSHITTFDGKTYTFHGDCYYVLAKGDHNDSYALLGELAPCGSTDKQTCLKTVVLLADKKKNAVVFKSDGSVLLNQLQVNLPHVTASFSVFRPSSYHIMVSMAIGVRLQVQLAPVMQLFVTLDQASQGQVQGLCGNFNGLEGDDFKTASGLVEATGAGFANTWKAQSTCHDKLDWLDDPCSLNIESANYAEHWCSLLKKTETPFGRCHSAVDPAEYYKRCKYDTCNCQNNEDCLCAALSSYARACTAKGVMLWGWREHVCNKDVGSCPNSQVFLYNLTTCQQTCRSLSEADSHCLEGFAPVDGCGCPDHTFLDEKGRCVPLAKCSCYHRGLYLEAGDVVVRQEERCVCRDGRLHCRQIRLIGQSCTAPKIHMDCSNLTALATSKPRALSCQTLAAGYYHTECVSGCVCPDGLMDDGRGGCVVEKECPCVHNNDLYSSGAKIKVDCNTCTCKRGRWVCTQAVCHGTCSIYGSGHYITFDGKYYDFDGHCSYVAVQDYCGQNSSLGSFSIITENVPCGTTGVTCSKAIKIFMGRTELKLEDKHRVVIQRDEGHHVAYTTREVGQYLVVESSTGIIVIWDKRTTVFIKLAPSYKGTVCGLCGNFDHRSNNDFTTRDHMVVSSELDFGNSWKEAPTCPDVSTNPEPCSLNPHRRSWAEKQCSILKSSVFSICHSKVDPKPFYEACVHDSCSCDTGGDCECFCSAVASYAQECTKEGACVFWRTPDLCPIFCDYYNPPHECEWHYEPCGNRSFETCRTINGIHSNISVSYLEGCYPRCPKDRPIYEEDLKKCVTADKCGCYVEDTHYPPGASVPTEETCKSCVCTNSSQVVCRPEEGKILNQTQDGAFCYWEICGPNGTVEKHFNICSITTRPSTLTTFTTITLPTTPTSFTTTTTTTTPTSSTVLSTTPKLCCLWSDWINEDHPSSGSDDGDREPFDGVCGAPEDIECRSVKDPHLSLEQHGQKVQCDVSVGFICKNEDQFGNGPFGLCYDYKIRVNCCWPMDKCITTPSPPTTTPSPPPTTTTTLPPTTTPSPPTTTTTTPPPTTTPSPPITTTTTPLPTTTPSPPISTTTTPPPTTTPSPPTTTPSPPTTTPSPPTTTTTTPPPTTTPSPPMTTPITPPASTTTLPPTTTPSPPTTTTTTPPPTTTPSPPTTTPITPPTSTTTLPPTTTPSPPPTTTTTPPPTTTPSPPTTTTPSPPTITTTTPPPTTTPSPPTTTTTTPPPTTTPSPPTTTPITPPTSTTTLPPTTTPSPPPTTTTTPPPTTTPSPPTTTTPSPPITTTTTPPPTTTPSSPITTTPSPPTTTMTTPSPTTTPSSPITTTTTPSSTTTPSPPPTTMTTPSPTTTPSPPTTTMTTLPPTTTSSPLTTTPLPPSITPPTFSPFSTTTPTTPCVPLCNWTGWLDSGKPNFHKPGGDTELIGDVCGPGWAANISCRATMYPDVPIGQLGQTVVCDVSVGLICKNEDQKPGGVIPMAFCLNYEINVQCCECVTQPTTMTTTTTENPTPPTTTPITTTTTVTPTPTPTGTQTPTTTPITTTTTVTPTPTPTGTQTPTTTPITTTTTVTPTPTPTGTQTPTTTPITTTTTVTPTPTPTGTQTPTTTPITTTTTVTPTPTPTGTQTPTTTPITTTTTVTPTPTPTGTQTPTTTPITTTTTVTPTPTPTGTQTPTTTPITTTTTVTPTPTPTGTQTPTTTPITTTTTVTPTPTPTGTQTPTTTPITTTTTVTPTPTPTGTQTPTTTPITTTTTVTPTPTPTGTQTPTTTPITTTTTVTPTPTPTGTQTPTTTPITTTTTVTPTPTPTGTQTPTTTPITTTTTVTPTPTPTGTQTPTTTPITTTTTVTPTPTPTGTQTPTTTPITTTTTVTPTPTPTGTQTPTTTPITTTTTVTPTPTPTGTQTPTTTPITTTTTVTPTPTPTGTQTPTTTPITTTTTVTPTPTPTGTQTPTTTPITTTTTVTPTPTPTGTQTPTTTPITTTTTVTPTPTPTGTQTPTTTPITTTTTVTPTPTPTGTQTPTTTPITTTTTVTPTPTPTGTQTPTTTPITTTTTVTPTPTPTGTQTPTTTPITTTTTVTPTPTPTGTQTPTTTPITTTTTVTPTPTPTGTQTPTTTPITTTTTVTPTPTPTGTQTPTTTPITTTTTVTPTPTPTGTQTPTTTPITTTTTVTPTPTPTGTQTPTTTPITTTTTVTPTPTPTGTQTPTTTPITTTTTVTPTPTPTGTQTPTTTPITTTTTVTPTPTPTGTQTPTTTPITTTTTVTPTPTPTGTQTPTTTPITTTTTVTPTPTPTGTQTPTTTPITTTTTVTPTPTPTGTQTPTTTPITTTTTVTPTPTPTGTQTPTTTPITTTTTVTPTPTPTGTQTPTTTPITTTTTVTPTPTPTGTQTPTTTPITTTTTVTPTPTPTGTQTPTTTPITTTTTVTPTPTPTGTQTPTTTPITTTTTVTPTPTPTGTQTPTTTPITTTTTVTPTPTPTGTQTPTTTPITTTTTVTPTPTPTGTQTPTTTPITTTTTVTPTPTPTGTQTPTTTPITTTTTVTPTPTPTGTQTPTTTPITTTTTVTPTPTPTGTQTPTTTPITTTTTVTPTPTPTGTQTPTTTPITTTTTVTPTPTPTGTQTPTTTPITTTTTVTPTPTPTGTQTPTTTPITTTTTVTPTPTPTGTQTPTTTPITTTTTVTPTPTPTGTQTPTTTPITTTTTVTPTPTPTGTQTPTTTPITTTTTVTPTPTPTGTQTPTTTPITTTTTVTPTPTPTGTQTPTTTPITTTTTVTPTPTPTGTQTPTTTPITTTTTVTPTPTPTGTQTPTTTPITTTTTVTPTPTPTGTQTPTTTPITTTTTVTPTPTPTGTQTPTTTPITTTTTVTPTPTPTGTQTPTTTPITTTTTVTPTPTPTGTQTPTTTPITTTTTVTPTPTPTGTQTPTTTPITTTTTVTPTPTPTGTQTPTTTPITTTTTVTPTPTPTGTQTPTTTPITTTTTVTPTPTPTGTQTPTTTPITTTTTVTPTPTPTGTQTPTTTPITTTTTVTPTPTPTGTQTPTTTPITTTTTVTPTPTPTGTQTPTTTPITTTTTVTPTPTPTGTQTPTTTPITTTTTVTPTPTPTGTQTPTTTPITTTTTVTPTPTPTGTQTPTTTPITTTTTVTPTPTPTGTQTPTTTPITTTTTVTPTPTPTGTQTPTTTPITTTTTVTPTPTPTGTQTPTTTPITTTTTVTPTPTPTGTQTPTTTPITTTTTVTPTPTPTGTQTPTTTPITTTTTVTPTPTPTGTQTPTTTPITTTTTVTPTPTPTGTQTPTTTPITTTTTVTPTPTPTGTQTPTTTPITTTTTVTPTPTPTGTQTPTTTPITTTTTVTPTPTPTGTQTPTTTPITTTTTVTPTPTPTGTQTPTTTPITTTTTVTPTPTPTGTQTPTTTPITTTTTVTPTPTPTGTQTPTTTPITTTTTVTPTPTPTGTQTPTTTPITTTTTVTPTPTPTGTQTPTTTPITTTTTVTPTPTPTGTQTPTTTPITTTTTVTPTPTPTGTQTPTTTPITTTTTVTPTPTPTGTQTPTTTPITTTTTVTPTPTPTGTQTPTTTPITTTTTVTPTPTPTGTQTPTTTPITTTTTVTPTPTPTGTQTPTTTPITTTTTVTPTPTPTGTQTPTTTPITTTTTVTPTPTPTGTQTPTTTPITTTTTVTPTPTPTGTQTPTTTPITTTTTVTPTPTPTGTQTPTTTPITTTTTVTPTPTPTGTQTPTTTPITTTTTVTPTPTPTGTQTPTTTPITTTTTVTPTPTPTGTQTPTTTPITTTTTVTPTPTPTGTQTPTTTPITTTTTVTPTPTPTGTQTGPPTHTSTAPIAELTTSNPPPESSTPQTSRSTSSPLTESTTLLSTLPPAIEMTSTAPPSTPTAPTTTSGGHTLSPPPSTTTSPPGTPTRGTTTGSSSAPTPSTVQTTTTSAWTPTPTPLSTPSIIRTTGLRPYPSSVLICCVLNDTYYAPGEEVYNGTYGDTCYFVNCSLSCTLEFYNWSCPSTPSPTPTPSKSTPTPSKPSSTPSKPTPGTKPPECPDFDPPRQENETWWLCDCFMATCKYNNTVEIVKVECEPPPMPTCSNGLQPVRVEDPDGCCWHWECDCYCTGWGDPHYVTFDGLYYSYQGNCTYVLVEEISPSVDNFGVYIDNYHCDPNDKVSCPRTLIVRHETQEVLIKTVHMMPMQVQVQVNRQAVALPYKKYGLEVYQSGINYVVDIPELGVLVSYNGLSFSVRLPYHRFGNNTKGQCGTCTNTTSDDCILPSGEIVSNCEAAADQWLVNDPSKPHCPHSSSTTKRPAVTVPGGGKTTPHKDCTPSPLCQLIKDSLFAQCHALVPPQHYYDACVFDSCFMPGSSLECASLQAYAALCAQQNICLDWRNHTHGACLVECPSHREYQACGPAEEPTCKSSSSQQNNTVLVEGCFCPEGTMNYAPGFDVCVKTCGCVGPDNVPREFGEHFEFDCKNCVCLEGGSGIICQPKRCSQKPVTHCVEDGTYLATEVNPADTCCNITVCKCNTSLCKEKPSVCPLGFEVKSKMVPGRCCPFYWCESKGVCVHGNAEYQPGSPVYSSKCQDCVCTDKVDNNTLLNVIACTHVPCNTSCSPGFELMEAPGECCKKCEQTHCIIKRPDNQHVILKPGDFKSDPKNNCTFFSCVKIHNQLISSVSNITCPNFDASICIPGSITFMPNGCCKTCTPRNETRVPCSTVPVTTEVSYAGCTKTVLMNHCSGSCGTFVMYSAKAQALDHSCSCCKEEKTSQREVVLSCPNGGSLTHTYTHIESCQCQDTVCGLPTGTSRRARRSPRHLGSG

SEQ ID NO: 10431 - DNA, 4354 bp, Rattus norvegicus
  ref <308>: DATABASE ACCESSION NUMBER: EMBL / Z35654
  ref <309>: DATABASE ENTRY DATE: 1994-12-31
caggcttctgcgccaggctgagctgacagactgagggcatgctaccagctacacgatgccgccctgccttcaccacagatgttactgctgcggagggcgaaagctcccgcctcacaccccacacaccccagggagccttcacatgccttggagattttcacccaaaattgtgatgtcatcaggagccattttttaatgtggatgaacacgggacctcagatgcttggactaacgtgacgtgggggtcctgaggctcgctctgaaggttcgatcagctgcccgtgcaccaaaagaagaggctgggccttgcagtgcagtagaatgtcagcgtgttccaggaggaggggcttctgctgatctgtggatcgatggcaaggaacaaacaacacagttttgcaagatgctggcatcgggttcatcttggtcatagaccgaagacaggacaaatggacttctgtgaaggcgtcagtcctgcgaatagccgcatcattcccagccaacctgcagctcgtcctcgttctccgacccacgggcttcttccagaggactctctcggacatagccttcaagttcaacagagatgagtttaagatgaaagtaccggtcatgatgctaagctcagtgccagaactacatggctacattgacaagtcacagctgaccgaggaccttggggggaccctggactactgccactccaggtggctgtgccaccgcacagcgattgaaagcttcgccctgatggtgaagcagacagcccagatgctgcaggcctttgggaccgagctggccgagactgagctgcccaacgacgtccagtcaaccagcctggtgctcagcgcacacacagagaagaaggctaaagtgaaggaggatctgcagctggcgctgacggaggggaacagcatccttgagagcctcagggagccgctggctgagagcatagtccacagtgtgaaccaggaccagctggacaatcaggccactgtgaagaggctcctgacccagctgaatgagaccgaggctgcctttgacgagttctgggcaaagcatcagcagaagctggaacagtgcctacagctgcgacattttgaacaaggtttccgggaggtcaaaaccgccttggattccatgtcccagaagatagccgcgttcacagatgttggcaacagcctggcccatgtgcagcacctcctgaaggacttgaccacctttgaggagaagtccagcgtggccgtgacaagccagagccctgtcctggaggggcagcagctgattgagaaccggcactatgctgtagactctatccatccgaagtgtgaggaactccagcacctctgtgaccacttcgcctctgaggtcaccaggaggcgggaccttctcagcaagtccttggagctgcatagcctcctggagacgtccatgaagtggagcgacgagggcatcttcctgctggcctctcagcctgtggacaaatgccaatctcaggatggtgcggaggcagccctgcaggagatcgagaagtttctggagaccggtgcagaaaacaagattcaggagctcaataagatttacaaggaatatgaatgcatcctcaaccaggaccttctggaacacgtgcaaaaagtctttcagaagcaagagagcaccgaggagatgttccaccgcaggcaggctagcctgaagaaactggcagccaagcagacacggcctgtgcagcccgtggccccccgaccagaggcgctaaccaagtccccctccccctcgccaggctcctggcgaagctctgagaactccagctctgagggcaacgccctccgcagagggccctacaggagagccaagagcgaaatgagtgagccccggcagggccgcaccagctccacaggagaagaggaggagagcctggccatcctgcgcagacacgtgatgaatgaacttctggacacggagcgggcctacgtggaggagctgctctgtgtcttagagggctatgctgcagagatggacaaccccttgatggcacacctcatctcaacaggcctgcaaaacaagaagaacattctgtttggaaacatggaggaaatctatcacttccacaacagaatattcctgcgggagctggagagctgcatcgactgcccagagctggtggggagatgctttctggagaggatggaggagttccagatctatgagaagtactgtcagaacaagccacgctccgagagcctgtggagacagtgctctgactgtcccttcttccaggagtgccagaagaagctggaccacaagctgagcctcgactcctacctgctgaagcctgtgcagaggataaccaagtaccagctgctgctcaaggaaatgctgaagtacagcaagcactgtgaaggggccgaggacctgcaagaggcactgagctccatcctgggcatcctcaaggcagtgaacgactccatgcacctcatagccatcactggctatgatggaaaccttggggacctggggaagctgctgatgcaaggctccttcagcgtgtggacggaccacaagaagggccacaccaaggtgaaggagctagccaggttcaagcccatgcagcggcacctcttccttcacgagaaggccgtcctcttctgcaagaagagggaggagaatggggaggggtacgagaaggctccttcctacagctacaagcagtccttgaatatgactgctgttggcatcacagagaatgtgaagggtgacaccaagaagttcgagatctggtacaacgcaagggaggaggtttacatcattcaggcaccaactcccgagattaaagcagcgtgggtgaatgagattcggaaggtgctgaccagccaactgcaggcctgccgggaagccagccagcaccgagccctggagcagtcccacagccttcccttgcccacgccagccagcaccagtcccacaaaagggagcacaagaaatgtcaagaagctcgaagatcggaagacggacccgctctgcctggaaggctgcgtgagctcatcattaccaaagccccccgagaagggcaaaggctggagcaaaacatcccactcactggaggcccctgaggaggacggaggctggtccagtgctgaggagctcatcaattcatccgatgctgaggaagacggaggagtgggccctaggaagctggttccaggtatgttcgggacctgaccagcagcaaggagggatgggtgccagccagcagcctagccaccctcctgggcaaatccagctcagcccagtgtctgagcagctcaggtaagacccactgtgcgcgccagctgtgccctgagcctgccaagatcctcagcccagagcctgtttaaaagcagaggggtttctaggtatgcagagaaaagggccagagccgaagcctgtctccactggtttcccgcagactccagcccagggtcagccgtgctgagcaactcatccagctgcagcgagggctaccctactcccttctccgagctccaggggtagtggccaggcctctgtggcaggcgctcaaggccaccgtgcagtagaccagcatgcaaatctctaagttttttctttttgcttgggcttgcttagtttgggaggggatggtgctccaagatatctggaaacaggaggacctatcaaccatgggcttcagaggacactggggccttggaaccaggactctgctgcatatgcagaaggcaggagacaacagttcaccaccaaagcttcttcagagactccagggtggacagaggcagggctatgggtcaggagaccttgcagaaagatgggagacggcccttttccacacatgcacagccagcagcccctgctatacagcctctccacggtgtcctggcctctctggtgctttctacgggaacatcatcctgaggaagccacttctaaccgggagtaaagagtttgctaccaacagcctaagaaggggatcaagggactcttgttcttttataagtttttgactttttttttaaaaaaacaaacaaacagggattaatcccatggccatttttctgtggtactctggcctcaaatcctaaaccaagaatcactgtgtttacatgaaatgacaatttgatactgtatttgatataaaactattttttgttactggggtttacatcaaagcacgttgtttatacaactgactgatttctggggcactctcactgagacctggcagcacaggtgctggaaggcctggtaagccaggtcctgtcctcctggtaagcccaggggctgtcctcttagccaggggggctgtctcctgttagccaggaggggcgtgtcctcctggtaagacagg

SEQ ID NO: 10432 - protein, 937 aa, Rattus norvegicus
  ref <308>: DATABASE ACCESSION NUMBER: SWISS-Prot / Q63406
  ref <309>: DATABASE ENTRY DATE: 2002-06-15
QDAGIGFILVIDRRQDKWTSVKASVLRIAASFPANLQLVLVLRPTGFFQRTLSDIAFKFNRDEFKMKVPVMMLSSVPELHGYIDKSQLTEDLGGTLDYCHSRWLCHRTAIESFALMVKQTAQMLQAFGTELAETELPNDVQSTSLVLSAHTEKKAKVKEDLQLALTEGNSILESLREPLAESIVHSVNQDQLDNQATVKRLLTQLNETEAAFDEFWAKHQQKLEQCLQLRHFEQGFREVKTALDSMSQKIAAFTDVGNSLAHVQHLLKDLTTFEEKSSVAVTSQSPVLEGQQLIENRHYAVDSIHPKCEELQHLCDHFASEVTRRRDLLSKSLELHSLLETSMKWSDEGIFLLASQPVDKCQSQDGAEAALQEIEKFLETGAENKIQELNKIYKEYECILNQDLLEHVQKVFQKQESTEEMFHRRQASLKKLAAKQTRPVQPVAPRPEALTKSPSPSPGSWRSSENSSSEGNALRRGPYRRAKSEMSEPRQGRTSSTGEEEESLAILRRHVMNELLDTERAYVEELLCVLEGYAAEMDNPLMAHLISTGLQNKKNILFGNMEEIYHFHNRIFLRELESCIDCPELVGRCFLERMEEFQIYEKYCQNKPRSESLWRQCSDCPFFQECQKKLDHKLSLDSYLLKPVQRITKYQLLLKEMLKYSKHCEGAEDLQEALSSILGILKAVNDSMHLIAITGYDGNLGDLGKLLMQGSFSVWTDHKKGHTKVKELARFKPMQRHLFLHEKAVLFCKKREENGEGYEKAPSYSYKQSLNMTAVGITENVKGDTKKFEIWYNAREEVYIIQAPTPEIKAAWVNEIRKVLTSQLQACREASQHRALEQSHSLPLPTPASTSPTKGSTRNVKKLEDRKTDPLCLEGCVSSSLPKPPEKGKGWSKTSHSLEAPEEDGGWSSAEELINSSDAEEDGGVGPRKLVPGMFGT

SEQ ID NO: 10433 - DNA, 5391 bp, Homo sapiens
  ref <308>: DATABASE ACCESSION NUMBER: EMBL / AB002360
  ref <309>: DATABASE ENTRY DATE: 2001-10-10
cgcttccctcactgggtcctgcgtccttgggcaggcgatgcccctgcggggaggggctggtccatccccggccagccacggacccacgcatggacccagcgacccacggacctgcttacctgggcgcggcgcgggtggcatgcggccacacggaaggggcgcgctgggctgctgcggcctctgcagcttctacacctgccacggggcggccggagatgaaatcatgcaccaggacatcgtcccgctctgtgctgccgacatccaggaccagctaaagaagcgctttgcttacctgtccggtgggcgggggcaggacggaagcccggttatcaccttccctgactacccggccttcagcgagattccggacaaggagttccagaatgtcatgacctacctcaccagcatccccagcctgcaggacgctggcatcggattcatcctggtgatagaccggcgacgggacaaatggacctccgtgaaggcgtccgtcctgcgcatcgcagcatctttcccggcaaacctgcagctcgtcctcgtgcttcgcccgacgggttttttccaaaggactctctccgacatcgctttcaaattcaatagagatgactttaagatgaaggtgccggtcataatgctgagctccgtaccagacttacacggttacatcgataagtcgcagctgaccgaggacctgggtgggaccctggactactgccactcccggtggctgtgccagcgcacggccatcgaaagtttcgccctcatggtgaagcagacggctcagatgctgcagtccttcgggaccgagctggctgaaacagagctgcccaatgacgtccagtcgacaagctcagtgctgtgtgcgcacacagagaagaaggacaaggcgaaggaggatttgaggctggcactgaaagaggggcacagtgtcctggagagcctcagggagctgcaggctgagggctcagagcccagtgtgaaccaggaccagcttgacaaccaggccaccgtgcagaggctcctggcccagctgaacgaaaccgaggctgccttcgatgagttctgggcaaagcatcagcagaaactggagcagtgtctgcagctccggcactttgagcagggcttccgggaggtcaaagccatcttggacgcagcgtcccagaagatagcaaccttcacagacatcggcaacagcctggcgcatgtggagcacctgctgagggacctggccagcttcgaggagaaatcaggcgtggccgtggagagggcccgggccctgtctctggacggcgagcagctcattgggaacaagcactacgcggtagactccatccgcccaaagtgccaggagctccggcacctctgtgaccagttctctgcggagatcgcaaggaggagggggctgctcagcaagtccctggagctgcaccgccgcctggagacgtccatgaagtggtgtgatgaagggatttacctgctggcctcacaacctgtggacaagtgccagtcccaggacggcgcggaggctgccctccaggaaatcgagaagtttttggagaccggtgcggaaaataagatccaggagctcaacgcgatttacaaggaatacgaatccatcctcaaccaagatctcatggagcacgtgcgaaaggtcttccagaagcaggcaagcatggaggaggtgttccaccgcaggcaggccagcctgaagaagctggcggccaggcagacgcggcccgtgcagccggtggcccccagacccgaggcactggcaaagtcgccctgcccctccccaggcattcggcgaggctctgagaactccagctccgagggcggtgcgctccggagagggccctaccggagggccaagagtgagatgagtgagagccggcagggccgcggctcagcgggggaggaggaggaaagcctggccatcctgcgcaggcacgtgatgagcgagctcctggacacagaacgggcctacgtggaggagctgctgtgcgtcctggagggctacgccgcggagatggataacccactgatggctcacctcctgtcaacaggccttcacaacaagaaggatgttttgtttggaaacatggaggaaatctatcacttccacaacaggatattcctcagggagctggaaaactacactgactgcccagaactggttggaagatgctttctggagaggatggaagatttccagatctatgagaagtactgtcagaacaagccccgctctgagagcctgtggagacagtgctccgactgcccgtttttccaggaatgccagagaaagctggaccacaagctgagcctggactcctacctgctgaagccagtgcagaggatcaccaagtaccagctgctgctcaaggaaatgctgaaatacagcaggaactgcgagggggctgaggacctgcaggaggcgctgagctccatcctgggcatcctgaaggccgtgaacgactccatgcacctcatcgctatcaccggctatgacgggaatctcggcgacctgggcaagctgctgatgcagggctcattcagcgtctggaccgaccacaagaggggccacaccaaggtgaaggagctggccaggttcaagcccatgcagcggcacctgttcctgcacgagaaggcagtgctcttctgcaagaagagggaggagaatggggaggggtatgagaaagctccctcctacagctacaagcagtccttaaacatggctgccgttggcattacggagaacgtgaagggagatgctaagaagttcgagatctggtacaacgcgcgcgaggaggtctacatcgtccaggcgccaactcctgagattaaagccgcgtgggtgaatgaaattcggaaagtgctgaccagccagctgcaggcttgtagagaagccagccagcaccgggcgctggagcagtcacagagcctgcccctgccggccccgaccagcaccagtccctcaagaggaaactcaaggaacatcaagaagctggaagaaaggaaaacagaccccctaagcctggagggatacgtcagctcagcgccactgacaaagccccccgaaaagggcaaaggttggagcaaaacgtcccactcactggaggcacctgaggacgacgggggctggtcaagtgcagaggagcagattaactcgtccgacgcagaggaggacggcgggttgggccccaagaagctggttccaggtaaatacacggtcgtggcggaccacgagaagggaggccccgatgcgctgcgcgtgaggagcggggacgtggtggagctggtgcaggagggcgacgagggcctctggtaagaccccgcgctcagccccggactgccccgcacgtggctgccgctgaccctcgccccttgcaggtacgtcagggacccgaccactggcaaggagggctgggtgccggccagcagcctgtccgtccggctcggcccgtccggctcggcccagtgcctgagcagctcaggtaaggcccacgtgccccgagcccacccgtgacgctgccaagggcccgggcgaggaagctgccccgtgtgtgcccggcagagccgacgccgaagcccgtccccgcctgatctccccgcagagtcgagcccggggtcggccgtgctgagcaactcgtccagctgcagcgagggcggccaggcccccttctccgacctgcaggggtagcgcggcctcggcgccggagacccgcgcgctgtctggggctgcggtggcgtggggagggcgcggcccccggacgccccgaggaaggggcacctcaccgccccgacccagagcgcctggccgtgcgggctgcagaggacccctccggggcagaggcaggttccacggaagaccccggcccgctggggcttccccggagactccagagcccacagaggaggggccgcagggaacagccccgggcggcaggcgccgggcagcggcatctcgtcctggctccaccgtgctgcttctgcctccggacggtgctttcaggggacgcgcggaccgtggtggagctgcttccggagaagtggaggatcctctggccaacggcctgaggagagcggggcacggggtctctttagcttttacaagttttaggattttttcaagcagggatcaatcccgtggccattttttgtggtactttggcctcaattcttcaccaggaatcactgtgtttacatgaaatgacaatttgatactgtatttgatagaaaactatttttttgttaccggggtttacatagaagcacgttgtttataccactaagtgactttggcggggctctcccatggaaacggatggcactccctgaagctccctggtcacaggtggatgaaaacgtgtccgtgggtgacatcaggtggtgtctccaccaccaaaagcagttagaagccaaggagattcctttatctacctagggttcattttcaaaagaaaatttaaactataatttaaacaattaacgttcttttctacaaaaaaaaatgcagggacttgatttttttaaagagcttcactgaattaggatatttttattgcttttaaagaaaatacaaagttgcagtttctgcagggtgtggcgtggaccagtgctgccgaccatagctcagagagccctgcccctgcctcactgcactgcagcctcctcggaggccgcacctccactccactccccacgcgccccctgcctcccacccaggtccacctgccacctggtgaccaccttgagtacagaagtgaaagtggggagagtattttattcaagtcacagcagaactggaaaaaaactcttctgttttaccaacttcttgtgtttcagaaacatattctgttcaaaacttttgaagccctttcggtgtctagtctgcagatgtttttgtatgtgtgcacctctgaccatgtgtgtacatatgtgtcttgctggaaaggacatattcgctgtccccgtgctgctgggagggccgcctcacagcctcacggttcccagccccagcacagtggaggcaggcgtggctgcattcccctcacgctaccctcccagcggcttgtagccgtcactggccagacctccagggtgcggaatcaaataggaagcatgcagagactcggcagcttttcctctgatgtgtaagttatttggaacgcgtgctgtgtcccgcgatgtccctgatgtactgtgcaggcgcggtgcctccgtctcgtcgcacagctgcgcgcccttgtgtgaccctccccataaaggcactttacagcttcatgtttcatccactgtcacttttttttaactgctgatgtaaatggaattttaaaagcagagttctttattgtatggatgacgtttgaataaatatcagcaactcctgcc

SEQ ID NO: 10434 - protein, 1108 aa, Homo sapiens
  ref <308>: DATABASE ACCESSION NUMBER: SWISS-Prot / O15068
  ref <309>: DATABASE ENTRY DATE: 2002-06-15
ASLTGSCVLGQAMPLRGGAGPSPASHGPTHGPSDPRTCLPGRGAGGMRPHGRGALGCCGLCSFYTCHGAAGDEIMHQDIVPLCAADIQDQLKKRFAYLSGGRGQDGSPVITFPDYPAFSEIPDKEFQNVMTYLTSIPSLQDAGIGFILVIDRRRDKWTSVKASVLRIAASFPANLQLVLVLRPTGFFQRTLSDIAFKFNRDDFKMKVPVIMLSSVPDLHGYIDKSQLTEDLGGTLDYCHSRWLCQRTAIESFALMVKQTAQMLQSFGTELAETELPNDVQSTSSVLCAHTEKKDKAKEDLRLALKEGHSVLESLRELQAEGSEPSVNQDQLDNQATVQRLLAQLNETEAAFDEFWAKHQQKLEQCLQLRHFEQGFREVKAILDAASQKIATFTDIGNSLAHVEHLLRDLASFEEKSGVAVERARALSLDGEQLIGNKHYAVDSIRPKCQELRHLCDQFSAEIARRRGLLSKSLELHRRLETSMKWCDEGIYLLASQPVDKCQSQDGAEAALQEIEKFLETGAENKIQELNAIYKEYESILNQDLMEHVRKVFQKQASMEEVFHRRQASLKKLAARQTRPVQPVAPRPEALAKSPCPSPGIRRGSENSSSEGGALRRGPYRRAKSEMSESRQGRGSAGEEEESLAILRRHVMSELLDTERAYVEELLCVLEGYAAEMDNPLMAHLLSTGLHNKKDVLFGNMEEIYHFHNRIFLRELENYTDCPELVGRCFLERMEDFQIYEKYCQNKPRSESLWRQCSDCPFFQECQRKLDHKLSLDSYLLKPVQRITKYQLLLKEMLKYSRNCEGAEDLQEALSSILGILKAVNDSMHLIAITGYDGNLGDLGKLLMQGSFSVWTDHKRGHTKVKELARFKPMQRHLFLHEKAVLFCKKREENGEGYEKAPSYSYKQSLNMAAVGITENVKGDAKKFEIWYNAREEVYIVQAPTPEIKAAWVNEIRKVLTSQLQACREASQHRALEQSQSLPLPAPTSTSPSRGNSRNIKKLEERKTDPLSLEGYVSSAPLTKPPEKGKGWSKTSHSLEAPEDDGGWSSAEEQINSSDAEEDGGLGPKKLVPGKYTVVADHEKGGPDALRVRSGDVVELVQEGDEGLW

SEQ ID NO: 10435 - DNA, 4354 bp, Rattus norvegicus; identical to SEQ ID NO: 10431
  ref <308>: DATABASE ACCESSION NUMBER: EMBL / Z35654
  ref <309>: DATABASE ENTRY DATE: 1994-12-31

SEQ ID NO: 10436 - protein, 937 aa, Rattus norvegicus; identical to SEQ ID NO: 10432
  ref <308>: DATABASE ACCESSION NUMBER: SWISS-Prot / Q63406
  ref <309>: DATABASE ENTRY DATE: 2002-06-15

SEQ ID NO: 10437 - DNA, 5391 bp, Homo sapiens; identical to SEQ ID NO: 10433
  ref <308>: DATABASE ACCESSION NUMBER: EMBL / AB002360
  ref <309>: DATABASE ENTRY DATE: 2001-10-10

SEQ ID NO: 10438 - protein, 1108 aa, Homo sapiens; identical to SEQ ID NO: 10434
  ref <308>: DATABASE ACCESSION NUMBER: SWISS-Prot / O15068
  ref <309>: DATABASE ENTRY DATE: 2002-06-15

SEQ ID NO: 10439 - DNA, 2990 bp, Rattus norvegicus
  ref <308>: DATABASE ACCESSION NUMBER: EMBL / Z36276
  ref <309>: DATABASE ENTRY DATE: 1994-10-17
cgttgctgtcgatcgctggaagctggagttacaggttcctgagcaacatgggaaatggttcagtgaaacccaagcattcgaagcacccagacggccagtcagggaacctcagcaatgaagccctgcggagcaaagtggcagagctggagcgcgaggtgaagaggaaggatgcagaacttcaggagcgcgagtaccacctgaaggagcttcgggagcagctagctaagcagaccgtggccattgcggagctcaccgaggagctgcagagcaagtgcatccagctgaacaagctgcaggatgttatccacgtgcagggaggaagcccactgcaggcctctcccgacaaagtgcctctggatgttcaccgcaagacctcaggcttggtctccctccacagcaggaggggggcgaaggctggagtgtctgcagagcccacaagccggacctatgacctcaacaagccccctgagttctcctttgagaaagcgagggtcaggaaggattccagtgagaaaaaacttatcacagacgccctgaataagaaccagtttctgaagagactggatccgcagcagatcaaagacatggtggaatgcatgtacgggagaaactatcaacagggcagttacatcgttaagcaaggggaacctggaaaccacatctttgtgctggccgagggtagactggaggtgttccaaggagagaaattgctgtcgtccatcccaatgtggaccacgtttggggagctggctattttgtataattgtacgcggactgcctctgtgaaagctattaccaatgttaaaacttgggctctcgatagagaggttttccagaacattatgaggagaacagcgcaagccagggatgaggaatacagaaacttcctcagaagtgtctccttgttgaagaatttacctgaagacaaactaaccaagattattgactgcttggaagtggaatactatgacaaaggagattatatcatcagagaaggagaggaagggagcacctttttcatcttggcaaaaggaaaggtgaaagtcacacagagcacagagggccatgatcagccacagttgatcaaaacactgcagaaaggagagtactttggagaaaaggctctgatcagtgatgatgtcagatcggccaatataatcgcggaagaaaatgatgtcgcatgcctcgtgatcgaccgagaaacattcaaccaaactgtcgggacatttgatgaactccaaaaataccttgaggggtatgtggccaccctgaaccgtgacgatgaaaagagacacgcaaagcgctccatgtctagctggaagttgtccaaagccctttctctggagatgattcagctgaaagagaaggtggccagattctcctcaacctccccattccagaaccttgagattatcgcaacactgggcgttggtgggttcggaagagtggagcttgttaaagttaaaaatgagaacatcgcttttgccatgaagtgtataaggaagaagcacattgttgacactaaacagcaggaacatgtctactccgagaagaggatcctggaggagctgtgttctcccttcatcgtgaaattgtatcgtactttcaaggacaataaatacgtatacatgcttctggaggcctgcttaggtggggagctctggagtatattaagggacagaggcagcttcgatgaacccacctccaaattctgtgtggcctgcgtgacagaagcattcgattatctacaccgactaggcattatctacagagacctgaagccagagaacttaattctggatgccgatggctaccttaagttggttgactttggattcgctaagaagattggctctgggcagaaaacgtggacattctgtgggactccagagtatgtggcccccgaggtcattcttaacaaaggacatgacttcagtgtggatttctggtccctggggattctggtctatgagcttctaacgggcaaccctcccttttctgggatagaccaaatgatgacctacaatttgattctcaaagggatcgagaaaatggattttcctagaaagataacaaggcgacccgaggatttgatccggaggctttgcaggcaaaacccaacagaaaggctggggaacctgaagaatgggatcaacgacattaagaaacacaggtggttaaacggtttcaattgggaggggttgaaagcacggagccttccctcacctttacgaagagagctcagtggccccatagatcacagctactttgacaagtatcctcctgaaaagggggttcctccggatgaaatgtcaggctgggataaggacttctgacaggagagaaaccgacgccaccgtggaagaggaccgtgaggatcggtgacacgatgctgattatccctctcttcaaagcattgttagatctcccggaagacaatggcagaaaagaaaaccctgatagacagggaaggagagtggccggatgtggttctgaatgagaatgtgtcctttagatgctgtgaattattcctgtattccattctgttcttgtctaaagatgtcaaaggttgttcctttccatttccatggtccgatccattttcgttggcatagcacagttttctctcaaatcggtttctccctccaaatcaaactctcctgcctagaatcctaataatattaatatggcttttgttctcgagcacctaagttatccagatagaaggaagactacagaacaacgttagaagaatcactccagggctcagcagacaccagggacttcctcctccgattgtggtttccagacatcttgggaagtcaatagaagaccatgaattttattttctttcaacttacagatacactaatatatttttcgatgttattgaagcaaaaggaaacatttggatattaatgagtagtgccagttactaaagaaggccagtcaatcaaatcagataatcatatcagttttcgacagcaacg

SEQ ID NO: 10440 - protein, 762 aa, Rattus norvegicus
  ref <308>: DATABASE ACCESSION NUMBER: SWISS-Prot / Q64595
  ref <309>: DATABASE ENTRY DATE: 2000-05-30
MGNGSVKPKHSKHPDGQSGNLSNEALRSKVAELEREVKRKDAELQEREYHLKELREQLAKQTVAIAELTEELQSKCIQLNKLQDVIHVQGGSPLQASPDKVPLDVHRKTSGLVSLHSRRGAKAGVSAEPTSRTYDLNKPPEFSFEKARVRKDSSEKKLITDALNKNQFLKRLDPQQIKDMVECMYGRNYQQGSYIVKQGEPGNHIFVLAEGRLEVFQGEKLLSSIPMWTTFGELAILYNCTRTASVKAITNVKTWALDREVFQNIMRRTAQARDEEYRNFLRSVSLLKNLPEDKLTKIIDCLEVEYYDKGDYIIREGEEGSTFFILAKGKVKVTQSTEGHDQPQLIKTLQKGEYFGEKALISDDVRSANIIAEENDVACLVIDRETFNQTVGTFDELQKYLEGYVATLNRDDEKRHAKRSMSSWKLSKALSLEMIQLKEKVARFSSTSPFQNLEIIATLGVGGFGRVELVKVKNENIAFAMKCIRKKHIVDTKQQEHVYSEKRILEELCSPFIVKLYRTFKDNKYVYMLLEACLGGELWSILRDRGSFDEPTSKFCVACVTEAFDYLHRLGIIYRDLKPENLILDADGYLKLVDFGFAKKIGSGQKTWTFCGTPEYVAPEVILNKGHDFSVDFWSLGILVYELLTGNPPFSGIDQMMTYNLILKGIEKMDFPRKITRRPEDLIRRLCRQNPTERLGNLKNGINDIKKHRWLNGFNWEGLKARSLPSPLRRELSGPIDHSYFDKYPPEKGVPPDEMSGWDKDF

SEQ ID NO: 10441 - DNA, 3328 bp, Homo sapiens
  ref <308>: DATABASE ACCESSION NUMBER: EMBL / X94612
  ref <309>: DATABASE ENTRY DATE: 1996-05-15
ggtccctgagcaaaatgggaaatggttcagtgaaacctaaacattctaagcacccagatggacactctgggaacctcaccactgatgctctgcggaacaaggtgacagagctggagagagagttgaggaggaaggatgctgagatccaggagcgggagtaccatttgaaggagctgcgggagcagctgtcgaagcagactgtggccattgctgaactcacagaggagctccagaacaagtgcatccagctgaacaagctgcaggatgtggtgcatatgcagggaggaagcccgcttcaggcctctccagataaagtgcctcttgaggtccaccggaagacctctggattggtctctctccatagcaggaggggagcaaaggctggcgtgtctgctgagccaacaacccggacctatgacctgaacaaaccccctgaattttcctttgagaaagcaagagtcagaaaagactccagtgagaagaagctcattacagatgcccttaataaaaatcagtttctgaaaagactggatcctcagcagatcaaagacatggtggaatgcatgtatgggagaaactatcagcaagggagttacattattaagcaaggagaaccaggaaaccatatctttgtgctggcagagggtcgactagaggtgttccaaggggagaaattgctgtcctccatccctatgtggaccacatttggggagcttgccattttatacaattgtacaaggactgcctctgtgaaagctattaccaatgttaaaacatgggcactagatcgagaggtattccagaatataatgaggaggacagcccaagctagagatgaacaatacagaaacttcctcagaagtgtatccttgctgaagaatttacctgaagataaattaaccaagatcattgactgcttggaagtggaatactatgacaaaggagattacatcattagagagggcgaggaaggaagtacctttttcattttggcaaaaggaaaggtaaaagtaacacagagcacagaaggccatgatcaaccacagctgataaaaacactgcagaaaggagaatactttggagaaaaagctcttatcagtgatgatgtcaggtcagctaacattattgctgaagaaaatgatgttgcatgcctggttatagatcgagaaacattcaaccaaactgtcggtacatttgaagagctgcaaaaataccttgaaggatatgtggcaaacctgaaccgtgatgatgaaaaaagacatgcgaagcggtccatgtctaactggaagctgtccaaagcactctctctggaaatgattcagctgaaggagaaggtggccagattttcctcatcatccccattccagaaccttgagattattgcaacactgggcgttggtgggttcggaagagttgagcttgttaaagtaaaaaatgagaatgttgcttttgctatgaagtgtataaggaagaagcacatagttgacaccaagcagcaggagcatgtctactcagagaagaggatcctagaggagctgtgctctccattcattgtgaaattatatcgtactttcaaggacaataagtatgtatacatgcttctggaggcctgcttaggtggggagctctggagtatattaagggacagaggcagctttgatgaacccacctccaaattctgcgttgcttgtgtgacagaagcatttgattacctgcatcgactaggtattatctacagagacttgaaaccagaaaacttaattctagatgctgagggttaccttaaattggttgactttggatttgcgaagaaaatagggtctggacagaaaacatggacattctgtgggactccagaatatgtagctcctgaagtcattctcaacaagggacatgacttcagtgtggatttctggtcactgggaattctagtgtatgagctcctaacgggcaacccacccttttctggggttgaccaaatgatgacctacaatttgattctcaaaggaattgaaaaaatggattttcccaggaagataacacgacgacctgaggatttgattcggaggctttgcaggcaaaatccaacagaaaggctgggaaatctgaagaatggaataaatgacattaagaaacacaggtggttaaatggttttaattgggagggactgaaagcacggagccttccatcacctttgcaaagagagctcaagggacccatagatcacagctactttgacaaatatcctcctgaaaagggaatgcctccagatgagctatcaggctgggataaagacttctgacagaagaaaagttgattactgcctgtactctacagaagaggacctcaaggatcaataatccaacacattattttcttttcagagtattataatatctttggaagaccattagggaaaagaaattcctgcacaatgggaagaggagaatggtgtggatatggttctgagttatagtgtcttatttagatgctgtgaattattgatgtattacattatttgcttttctcaactgctagaggctaccccattttcctttccacaatcagagccatttttgttaaagtggcagttttttctgcaatctattgttccattccaatcatatccttctcgtttgagtactactaacgtttaaaaagggtcttgcccttgaataactaagtcatacaaatagaaggaaaaacaatggtgaattttggagagctccccagctctcagcaacttcatataagcatggtggtatcttaaaatggtggtttgcagaaaccatggtagccaacagaacctcctgactttcacctgcttttaacctgaaaatatattaatacgcctctgacatgagtccagggagaggcaagattgagcaatagtcagtggcaccatttcctaaagtaactgaatcaatcaatccagtcaggtaattattttctattggggaacttagaaaaaaaagtaaagcaagaaatattttctctcctttatgatcagtgataccttagagacttttcgaaagtccttgttaaagatagttacaatgtgtggttaaatgatgctaaaatattttcacaaccagagtagaaaacgtgctggaacaaaattgcgaaggcttttgcctcccagtaaatagaaaggaaaatatattctagtaggtaagactgctgactctttgaaaatctgaggtattttgaaaaattctgtgatagttgctattaataaaccaaaattgtatagaatcatcgttaatttttaatataaatcccattgacaaatgttgatgcactgtagtcactgctgagttaatagcg

SEQ ID NO: 10442 - protein, 762 aa, Homo sapiens
  ref <308>: DATABASE ACCESSION NUMBER: SWISS-Prot / Q13237
  ref <309>: DATABASE ENTRY DATE: 2000-05-30
MGNGSVKPKHSKHPDGHSGNLTTDALRNKVTELERELRRKDAEIQEREYHLKELREQLSKQTVAIAELTEELQNKCIQLNKLQDVVHMQGGSPLQASPDKVPLEVHRKTSGLVSLHSRRGAKAGVSAEPTTRTYDLNKPPEFSFEKARVRKDSSEKKLITDALNKNQFLKRLDPQQIKDMVECMYGRNYQQGSYIIKQGEPGNHIFVLAEGRLEVFQGEKLLSSIPMWTTFGELAILYNCTRTASVKAITNVKTWALDREVFQNIMRRTAQARDEQYRNFLRSVSLLKNLPEDKLTKIIDCLEVEYYDKGDYIIREGEEGSTFFILAKGKVKVTQSTEGHDQPQLIKTLQKGEYFGEKALISDDVRSANIIAEENDVACLVIDRETFNQTVGTFEELQKYLEGYVANLNRDDEKRHAKRSMSNWKLSKALSLEMIQLKEKVARFSSSSPFQNLEIIATLGVGGFGRVELVKVKNENVAFAMKCIRKKHIVDTKQQEHVYSEKRILEELCSPFIVKLYRTFKDNKYVYMLLEACLGGELWSILRDRGSFDEPTSKFCVACVTEAFDYLHRLGIIYRDLKPENLILDAEGYLKLVDFGFAKKIGSGQKTWTFCGTPEYVAPEVILNKGHDFSVDFWSLGILVYELLTGNPPFSGVDQMMTYNLILKGIEKMDFPRKITRRPEDLIRRLCRQNPTERLGNLKNGINDIKKHRWLNGFNWEGLKARSLPSPLQRELKGPIDHSYFDKYPPEKGMPPDELSGWDKDF

SEQ ID NO: 10443 - DNA, 2244 bp, Rattus norvegicus
  ref <308>: DATABASE ACCESSION NUMBER: EMBL / Z36944
  ref <309>: DATABASE ENTRY DATE: 1996-02-29
atggacttccttgatgagcccttccctgatgtggggacctatgaagacttccacaccatagactggctgagggaaaagtcccgggacactgacagacatagaaagataaccagcaaaagtaaagagtctatttgggagttcatcaagagtctgctggacgcatggtcaggatgggtggtgatgctacttattggtctgctagcaggtaccctggctggagttatcgatctcgctgttgactggatgacagacctcaaggagggcgtctgtctgtctgcattctggtacagccatgagcaatgctgctggacctccaatgagaccacttttgaggacagggacaagtgtcccctgtggcagaagtggtcagagcttcttctgagccagtcagagggtgctagcgcttacattctgaattacttaatgtacattctatgggcattgctgtttgcatttctggctgtctccctggtacgtgtgtttgcaccatatgcctgtggctctggcatacctgagataaagactattttgagtggctttatcatcaggggctacttggggaaatggactcttctaatcaagactgtcactctcgtgctggttgtatcctctggcctgagtcttgggaaagaggggccactggtgcatgtggcatgttgctgtggcaacttctttagcagccttttctccaagtatagcaagaatgaaggcaagaggcgtgaggtgctttccgctgcagctgctgctggtgtctctgtggcctttggtgctcccataggaggtgtactcttcagtctagaggaggtcagttactactttcccttgaaaaccttgtggaggtcattttttgcagccctggtggctgccttcacactgcgctccatcaacccctttggaaatagccgcctggttctcttttatgtggagtatcatacaccttggtacatggctgaactcttccctttcatcctgcttggagtctttgggggtttgtggggaaccgtcttcacacgctgcaacattgcctggtgcaggaggcgtaaaaccaccaggctggggaagtatccagtgttggaggtcattgtggtgacagccatcactgccatcattgcttatcccaatccctacactcgccagagcaccagtgagctcatatctgagctattcaatgattgtggggctcttgagtcttctcagctctgtgactacatcaatgaccccaacatgactcggcctgtggatgacattccggaccggccagctggggttggagtttacacagccatgtggcagctggccttggcactgatcttcaaaatagtcattactatatttacctttggcatgaagattccctcaggtctcttcatccccagtatggctgtaggagccatggcaggccggatggtgggaattggtgtggagcagctggcctaccatcatcatgactggatcatcttcaggaactggtgcaggcctggagcggactgtgtcacaccagggctttatgcgatggtgggagctgcagcctgtctaggtggagtgactaggatgacagtgtctctggtagtcatcatgtttgaactgactggaggtctggaatatattgtacccctgatggcagcggctgttaccagcaagtgggtggctgatgcctttgggaaagaagggatttatgaagcccacatccatctgaatgggtacccatttcttgatgtgaaggatgagttcactcaccgtaccctagccactgatgtgatgcggccccgcaggggagaaccacctttgtcagtactaacccaggacagcatgactgtggaggatgtggagactctcataaaagagacagactacaatgggtttcctgtggtggtctcgagagattcggagcgcctcataggctttgcccagaggcgggagctaatcttggctataaaaaatgccagacagaggcaagagggcatcgtgagcaattccatcatgtacttcacagaggagccccctgagctgcctgccaacagcccacatccactgaagctgaggcgcattctgaacctgagcccttttactgtcacagaccacacccccatggagacagtggtggacattttccggaaactggggctccgacaatgcctggtgacacggagtgggaggcttcttgggatcatcacaaaaaaagacgttctgagacacatggcgcagatggcaaaccaggaccctgaatccatcatttttaattag

SEQ ID NO: 10444 - protein, 747 aa, Rattus norvegicus
  ref <308>: DATABASE ACCESSION NUMBER: SWISS-Prot / P51794
  ref <309>: DATABASE ENTRY DATE: 2002-06-15
MDFLDEPFPDVGTYEDFHTIDWLREKSRDTDRHRKITSKSKESIWEFIKSLLDAWSGWVVMLLIGLLAGTLAGVIDLAVDWMTDLKEGVCLSAFWYSHEQCCWTSNETTFEDRDKCPLWQKWSELLLSQSEGASAYILNYLMYILWALLFAFLAVSLVRVFAPYACGSGIPEIKTILSGFIIRGYLGKWTLLIKTVTLVLVVSSGLSLGKEGPLVHVACCCGNFFSSLFSKYSKNEGKRREVLSAAAAAGVSVAFGAPIGGVLFSLEEVSYYFPLKTLWRSFFAALVAAFTLRSINPFGNSRLVLFYVEYHTPWYMAELFPFILLGVFGGLWGTVFTRCNIAWCRRRKTTRLGKYPVLEVIVVTAITAIIAYPNPYTRQSTSELISELFNDCGALESSQLCDYINDPNMTRPVDDIPDRPAGVGVYTAMWQLALALIFKIVITIFTFGMKIPSGLFIPSMAVGAMAGRMVGIGVEQLAYHHHDWIIFRNWCRPGADCVTPGLYAMVGAAACLGGVTRMTVSLVVIMFELTGGLEYIVPLMAAAVTSKWVADAFGKEGIYEAHIHLNGYPFLDVKDEFTHRTLATDVMRPRRGEPPLSVLTQDSMTVEDVETLIKETDYNGFPVVVSRDSERLIGFAQRRELILAIKNARQRQEGIVSNSIMYFTEEPPELPANSPHPLKLRRILNLSPFTVTDHTPMETVVDIFRKLGLRQCLVTRSGRLLGIITKKDVLRHMAQMANQDPESIIFN

SEQ ID NO: 10445 - DNA, 3214 bp, Homo sapiens
  ref <308>: DATABASE ACCESSION NUMBER: EMBL / X77197
  ref <309>: DATABASE ENTRY DATE: 1995-05-31
ccgagaggcaaatgagcttgtcagtttctgcctccattagaccctcaacccaaaggagcaggagatttcggtagcgttttaactttatctcagaatctgaaagcggaaggccaggcaagctgcacacatcaagcgaaacgcctgaggggcggccagcgcgagggtttctggccatcgaccctcacctcccgggacttccagggtcttccccccaccccgcgcacacctccctgcctcgccccgagggcgtcacgtggcagcgtggggcccgcctcctggtgatgtcacggcgctcgcagccgtcgcgctgaagaaaggatgctcgaggatgctgtccaggtgggcggccgcgggcgcgatgcggcactgcaggtgtaattagcatggtcaatgcgggagcgatgagtggctctggaaacctgatggatttcctcgatgagccgttccctgatgtggggacgtatgaggacttccacaccatcgactggctaagggaaaagtcacgggacaccgacagacacaggaagatcaccagcaagagcaaggagtccatatgggagttcatcaagagcctgctggatgcctggtcgggatgggtggtgatgctgctcatcggcctgctggcgggcaccttggctggggtcatcgatctcgccgtggactggatgacggacctgaaggagggggtctgcctgtctgccttctggtatagccatgagcagtgttgctggacttctaacgagaccacttttgaggacagagacaagtgtcccctgtggcagaaatggtcggagctgctggtgaatcagtcagagggtgccagtgcttacattctgaattacttaatgtacatcctatgggcgctgctgtttgcatttttggctgtctccctggtgcgtgtatttgcaccatatcgctgtggctctggcataccagagataaagaccattttgagcggctttatcatcaggggctacttggggaagtggaccctgctaatcaagacagtcacgctggtgctggtagtgtcctccggtctgagccttgggaaggaagggccgctagtgcacgtggcttgttgctgtggcaacttcttcagcagccttttctccaagtacagcaagaatgagggcaagaggcgggaggtgctttcagctgcagcggctgctggagtctctgttgcctttggtgcaccaattggaggcgtgcttttcagtctagaagaggtcagttactactttcccctgaagaccttgtggaggtcatttttcgcagccctggtggcggcctttacgctgagatccatcaatccctttgggaatagccgtctcgttctcttttatgtggaataccacacgccctggtacatggctgaactcttccccttcatcctgcttggggtcttcgggggcttgtggggaaccctcttcatccgctgcaacatcgcctggtgcaggaggcgcaagaccaccaggctggggaagtacccggtgctggaggtcattgtggtgactgccatcactgccatcattgcctaccccaatccctacacacgccagagcaccagcgagctcatttctgagctgttcaatgactgtggagcccttgagtcttcccagctctgtgactacatcaatgaccccaacatgactcggcctgtggatgacattccagaccggccggctggtgtcggtgtttacacggccatgtggcagctggccctggcactgatcttcaaaatcgtcgttaccatatttacctttggcatgaagatcccgtcgggcctcttcatccccagcatggctgtgggcgcgatagcgggcaggatggtgggaattggcgtggagcagctggcctaccatcaccatgactggtactacttcaggaactggtgcagacccggtgcagactgtgtcacgccagggctgtacgcaatggtgggagctgcggcctgcctcggtggagttaccaggatgacggtgtcattggtggtcatcatgtttgaattaaccgggggtctggagtacatcgtgcccctgatggcggcggctgtgaccagcaagtgggtagctgatgcatttgggaaagaaggcatctacgaggcccacatccacttaaatgggtaccctttccttgacgtgaaggacgagtttactcaccgcacactggccaccgacgtcatgcggccccggcggggagagccgccactgtcggtgctcacccaggacagcatgactgtcgaggacgtggagacgctcatcaaggagaccgactacaacggcttccccgtggtggtctccagagactccgagcgcctcattggatttgcccagaggagggaactgattctcgcaataaataacgccagacagaggcaggagggcattgtgagcaattccatcatgtacttcacggaggaaccccccgagctgccggccaacagcccacatcccctgaagctgcggcgcatcctgaacctcagcccgtttacagtgacagaccacactccgatggaaacggtggtggatatcttccggaaactggggcttcggcagtgcctggtgacgcggagcgggagacttcttggcatcatcacaaaaaaggatgttctgagacatatggcccagatggcaaaccaggaccccgaatccatcatgtttaattagcaacaaggtggcaattattttcagaaaaacactgactgtgtcatttaaaaagaaataaatgatatgttattatcccaatgaaagatcatgcattggggacagcagaaacaaaagcttttttggaaaggcggggaagaaggatgaaacctttaaaaacaaaaacaaaaacatcaatgagtaggcattttatagctttaaccccgtatgagtttcaagctgtgtttcctaatgagtttgctactgctgtgggggcatgtgggtgggtaaatgatgtaaatgatgtgatctgtacaagtatgtggagcatgaatgctgactcaagaaacttttactccttctgctcaaggctgatgtttgtaacttatgaacacacgtgaagtgttgagtccaaaagacaaaggggcatcggcatgtcagcgtccttatttattggttcttgaagttttgctgctatgttactgaatcatactaaagacatttgcgcttactttgttgaaaaagaaaaagaaattaaatttgaacacagtgaaagctgcaaaaaaaaaaaa

SEQ ID NO: 10446 - protein, 760 aa, Homo sapiens
  ref <308>: DATABASE ACCESSION NUMBER: SWISS-Prot / P51793
  ref <309>: DATABASE ENTRY DATE: 2002-06-15
MVNAGAMSGSGNLMDFLDEPFPDVGTYEDFHTIDWLREKSRDTDRHRKITSKSKESIWEFIKSLLDAWSGWVVMLLIGLLAGTLAGVIDLAVDWMTDLKEGVCLSAFWYSHEQCCWTSNETTFEDRDKCPLWQKWSELLVNQSEGASAYILNYLMYILWALLFAFLAVSLVRVFAPYACGSGIPEIKTILSGFIIRGYLGKWTLLIKTVTLVLVVSSGLSLGKEGPLVHVACCCGNFFSSLFSKYSKNEGKRREVLSAAAAAGVSVAFGAPIGGVLFSLEEVSYYFPLKTLWRSFFAALVAAFTLRSINPFGNSRLVLFYVEYHTPWYMAELFPFILLGVFGGLWGTLFIRCNIAWCRRRKTTRLGKYPVLEVIVVTAITAIIAYPNPYTRQSTSELISELFNDCGALESSQLCDYINDPNMTRPVDDIPDRPAGVGVYTAMWQLALALIFKIVVTIFTFGMKIPSGLFIPSMAVGAIAGRMVGIGVEQLAYHHHDWIIFRNWCRPGADCVTPGLYAMVGAAACLGGVTRMTVSLVVIMFELTGGLEYIVPLMAAAVTSKWVADAFGKEGIYEAHIHLNGYPFLDVKDEFTHRTLATDVMRPRRGEPPLSVLTQDSMTVEDVETLIKETDYNGFPVVVSRDSERLIGFAQRRELILAIKNARQRQEGIVSNSIMYFTEEPPELPANSPHPLKLRRILNLSPFTVTDHTPMETVVDIFRKLGLRQCLVTRSGRLLGIITKKDVLRHMAQMANQDPESIMFN

SEQ ID NO: 10447 - DNA, 628 bp, Rattus norvegicus
  ref <308>: DATABASE ACCESSION NUMBER: EMBL / Z36980
  ref <309>: DATABASE ENTRY DATE: 1996-03-04
tgaattcctggaacctcaactggctcccactgctctctcggtgcagttaccgtttggcgatccctctcctgctaacatgccgttcgttgagttggaaacaaacttgccggctagccgcatacccgcagggctggagaaccggttgtgtgcggccacagccaccatcctggacaaacccgaagaccgcgtgagcgtgacgatacgaccgggcatgaccttgttgatgaacaaatccacagagccctgcgcccacctcctgatctcttccatcggtgttgtgggcaccgcggagcagaaccgcagccacagctccagcttcttcaagttcctcaccgaggagctgtccctggaccaggacaggatcattatccgattcttccccttggagccctggcagatcggaaagaaaggaactgttatgacgtttctgtgatggagacaaggaacgcagggcgtttgcttgagcctgtccagagcccttccagagaggcctcctggcagatacgataccagatccctcttttgcataagtgtctgtgatctcactgacctgttttcctctcccccagcctcgtgaacgagagagcaataaagaagagagcataatcccaaaaaaaaaaaaaaaaaa

SEQ ID NO: 10448 - protein, 117 aa, Rattus norvegicus
  ref <308>: DATABASE ACCESSION NUMBER: SWISS-Prot / P80254
  ref <309>: DATABASE ENTRY DATE: 2000-05-30
PFVELETNLPASRIPAGLENRLCAATATILDKPEDRVSVTIRPGMTLLMNKSTEPCAHLLISSIGVVGTAEQNRSHSSSFFKFLTEELSLDQDRIIIRFFPLEPWQIGKKGTVMTFL

SEQ ID NO: 10449 - DNA, 666 bp, Homo sapiens
  ref <308>: DATABASE ACCESSION NUMBER: Refseq / NM_001355
  ref <309>: DATABASE ENTRY DATE: 2002-11-05
gatcccggtgccagggaccctgcccagttccaggcgtcgcctaacccagaaacgactgggcgccgcgtcctggaaaggccccagcgcacggacatctgaggagctgtttccgttcctctgcccgccatgccgttcctggagctggacacgaatttgcccgccaaccgagtgcccgcggggctggagaaacgactctgcgccgccgctgcctccatcctgggcaaacctgcggaccgcgtgaacgtgacggtacggccgggcctggccatggcgctgagcgggtccaccgagccctgcgcgcagctgtccatctcctccatcggcgtagtgggcaccgcggaggacaaccgcagccacagcgcccacttctttgagtttctcaccaaggagctagccctgggccaggaccggatacttatccgctttttccccttggagtcctggcagattggcaagatagggacggtcatgacttttttatgattgggcacggagggatccagggcatctgtgaactggctgcttcttccagagagatctcttggcagagtgagggcctggagataaccagctttggattatcccgcatgcaacattcctgtgatcacataatcctcttcttcatcctcatatgaaataaatgaagagagcttcctcattcaaaaa

SEQ ID NO: 10450 - protein, 117 aa, Homo sapiens
  ref <308>: DATABASE ACCESSION NUMBER: SWISS-Prot / P30046
  ref <309>: DATABASE ENTRY DATE: 2002-06-15
PFLELDTNLPANRVPAGLEKRLCAAAASILGKPADRVNVTVRPGLAMALSGSTEPCAQLSISSIGVVGTAEDNRSHSAHFFEFLTKELALGQDRILIRFFPLESWQIGKIGTVMTFL

SEQ ID NO: 10451 - DNA, 628 bp, Rattus norvegicus; identical to SEQ ID NO: 10447
  ref <308>: DATABASE ACCESSION NUMBER: EMBL / Z36980
  ref <309>: DATABASE ENTRY DATE: 1996-03-04

SEQ ID NO: 10452 - protein, 117 aa, Rattus norvegicus; identical to SEQ ID NO: 10448
  ref <308>: DATABASE ACCESSION NUMBER: SWISS-Prot / P80254
  ref <309>: DATABASE ENTRY DATE: 2000-05-30

SEQ ID NO: 10453 - DNA, 666 bp, Homo sapiens; identical to SEQ ID NO: 10449
  ref <308>: DATABASE ACCESSION NUMBER: Refseq / NM_001355
  ref <309>: DATABASE ENTRY DATE: 2002-11-05

SEQ ID NO: 10454 - protein, 117 aa, Homo sapiens; identical to SEQ ID NO: 10450
  ref <308>: DATABASE ACCESSION NUMBER: SWISS-Prot / P30046
  ref <309>: DATABASE ENTRY DATE: 2002-06-15

SEQ ID NO: 10455 - DNA, 586 bp, Rattus norvegicus
  ref <308>: DATABASE ACCESSION NUMBER: EMBL / Z46614
  ref <309>: DATABASE ENTRY DATE: 1994-11-08
cagagcctgcagccagccacgcgccagcatgtctgggggtaaatacgtagactccgagggacatctctacactgttcccatccgggaacagggcaacatctacaagcccaacaacaaggccatggcagacgaggtgaatgagaagcaagtgtacgacgcgcacaccaaggagattgatctggtcaaccgcgaccccaagcatctcaacgacgacgtggtcaagattgactttgaagatgtgattgcggaaccagaagggacacacagtttcgacggcatctggaaggccagcttcaccaccttcactgtgacaaaatattggttttaccgcttgctgtctaccatcttcggcatccctatggcgctcatctggggcatctactttggcatcctctctttcctgcacatctgggcagttgtaccgtgcatcaagagcttcctgattgagattcagtgcatcagccgtgtctattccatctacgtccacaacttctgtgatccactctttggaggggattgggaagatattcagcaatattccgatcagcacgcaggaagagatatagtgacatttcagggatggagg

SEQ ID NO: 10456 - protein, 178 aa, Rattus norvegicus
  ref <308>: DATABASE ACCESSION NUMBER: SWISS-Prot / CAA86587
  ref <309>: DATABASE ENTRY DATE: 2002-06-15
MSGGKYVDSEGHLYTVPIREQGNIYKPNNKAMADEVNEKQVYDAHTKEIDLVNRDPKHLNDDVVKIDFEDVIAEPEGTHSFDGIWKASFTTFTVTKYWFYRLLSTIFGIPMALIWGIYFGILSFLHIWAVVPCIKSFLIEIQCISRVYSIYVHNFCDPLFEGIGKIFSNIPISTQEEI

SEQ ID NO: 10457 - DNA, 2947 bp, Rattus norvegicus
  ref <308>: DATABASE ACCESSION NUMBER: EMBL / Z46882
  ref <309>: DATABASE ENTRY DATE: 1996-01-23
gaggattgcatctgtctcttatagttttgaaatctcctaatagcaagaccagctaagggattgtacctttttcctacaaatataaatatatatatattttaaaccaagtctttttttccggctctctttgctttaaagctgtcctcttgaaattacttccccccgccccccggagagatgtcttatcaggggaagaaaaatattccacgcatcacgagcgatcgtcttctgatcaaaggtggcaagattgtgaatgatgaccagtccttctatgcagacatatacatggaagatgggttgatcaagcaaataggagaaaacctgattgtgccaggaggggtgaagaccatcgaagcccactccagaatggtgatccctggaggaattgacgtgcacactcgcttccagatgccagaccagggaatgacatcagctgatgacttcttccagggaaccaaggcagccctggccggaggaaccaccatgatcatcgaccatgttgttcctgagcccgggacaagcctattggcagcctttgatcagtggagggagtgggcggacagcaagtcctgctgtgactattcgctgcacgtggacatcacggagtggcacaagggcatccaggaggagatggaagctctggtgaaggaccacggggtaaactccttcctcgtgtacatggctttcaaagatcggttccagctgacggattcccagatctatgaagtactgagcgtgatccgggatattggtgccatagctcaagtccatgcagagaatggtgacatcattgcagaggaacagcagaggatcctggatctgggcatcacaggccccgagggacacgtgctgagccggccagaggaggtcgaggctgaagctgtgaaccggtccatcaccattgccaatcagaccaactgcccgctgtatgtcaccaaggtgatgagcaagagtgctgctgaagtcatcgcccaggcacggaagaagggaactgtggtgtatggtgagcccatcactgccagcctggggactgatggctctcattattggagcaagaactgggccaaggccgctgcctttgtcacctctccacccttgagccccgacccaaccactccagactttctcaactcgttgctgtcctgtggagacctccaggtcactggcagtgcccactgtaccttcaacactgcccagaaggctgtggggaaggataacttcaccttgattccagagggcaccaatggcactgaggagcggatgtctgtcatttgggataaagctgtggtcactgggaagatggacgagaaccagtttgtggctgtgactagcaccaacgcagccaaagtcttcaatctttacccacggaaaggtcgtatctccgtgggatctgacgcagacctggtgatctgggaccctgacagtgtgaagaccatctctgccaagacgcacaacagtgctcttgagtacaacatctttgaaggcatggagtgtcggggctccccactggtggtcatcagccagggcaagattgtcctggaggacggcacgttgcatgtcacggaaggctcaggacgctacattccccggaagcccttccctgactttgtgtacaaacgcatcaaggcaaggagcaggctggctgagctgaggggggtccctcgtggcctgtatgatggacccgtatgcgaggtgtctgtgacgcccaagacggtcactccggcctcatcagctaagacatcccctgccaagcagcaggcgccacctgttcggaacctgcaccagtctggtttcagcttgtctggtgctcagattgacgacaacattccccgccgcaccacccagcgcattgtggcgccccctggtggccgtgccaacatcaccagcctgggctaaagctcctaggcctgcaggccacgtggggatgggggatgggacacctgaggacattctgagacttccttccttccaatttttttttcctttttttgagagagcctgtgatagttgctgtgggcagccagttcctggggcttcctcttgggccccctgcactcggtctcccctggagtttctgaattcgctcacccaagtccctacacagtcatgaacaccacacccaagcccagccacccaccccacactgagctgcatccaacatgcagacatgcgccaccatgcagatcccagcaagggtgcccttatcacatccttggctgtgcagtcagcaccttcctgtcacggggaagatttagtgaattaccctgagctgccttcttttcttttgaaaaatttttaaaaatggttttctttgtgggactggggagggatgggggggtgggagttttttttttttaatactaaattgaaagtctgattcaatattaatccttgggtcttgaactggacatcctaatgatcaattacttaaccattaagctgattccgaggctggcaggctaccgccgcccctctggaaaggttccatgtgtctgtatcacccatcccttactcttctggtcagctgttgagaagagactggttttttctttggcctagattttgcaacagattagaccttttgaaggttctctaccatttttctgtgtctccggtctgttctggctttttcttctgcactcttggagagatttagatgttggtctcctggtttgtgtttcttcgagacaatgtgcttttttccctggctttttgtttgttctcaaagccaggcatctgaatttggcctcagacacagcctgagcggaccctagttttgacccccactccatagttttgtgctagcctggtgtctgtttaagattggtgctagctgattcccgtcactaggaggtggctgagcttgaggcttgccagacacagggatggtcctgattaagtcaccaatatgtcacatgtgggcccagataggtcacttgtggtggaa

SEQ ID NO: 10458 - protein, 572 aa, Rattus norvegicus
  ref <308>: DATABASE ACCESSION NUMBER: SWISS-Prot / CAA86981
  ref <309>: DATABASE ENTRY DATE: 2001-10-16
MSYQGKKNIPRITSDRLLIKGGKIVNDDQSFYADIYMEDGLIKQIGENLIVPGGVKTIEAHSRMVIPGGIDVHTRFQMPDQGMTSADDFFQGTKAALAGGTTMIIDHVVPEPGTSLLAAFDQWREWADSKSCCDYSLHVDITEWHKGIQEEMEALVKDHGVNSFLVYMAFKDRFQLTDSQIYEVLSVIRDIGAIAQVHAENGDIIAEEQQRILDLGITGPEGHVLSRPEEVEAEAVNRSITIANQTNCPLYVTKVMSKSAAEVIAQARKKGTVVYGEPITASLGTDGSHYWSKNWAKAAAFVTSPPLSPDPTTPDFLNSLLSCGDLQVTGSAHCTFNTAQKAVGKDNFTLIPEGTNGTEERMSVIWDKAVVTGKMDENQFVAVTSTNAAKVFNLYPRKGRISVGSDADLVIWDPDSVKTISAKTHNSALEYNIFEGMECRGSPLVVISQGKIVLEDGTLHVTEGSGRYIPRKPFPDFVYKRIKARSRLAELRGVPRGLYDGPVCEVSVTPKTVTPASSAKTSPAKQQAPPVRNLHQSGFSLSGAQIDDNIPRRTTQRIVAPPGGRANITSLG

SEQ ID NO: 10459 - DNA, 4459 bp, Homo sapiens
  ref <308>: DATABASE ACCESSION NUMBER: Refseq / NM_001386
  ref <309>: DATABASE ENTRY DATE: 2002-04-04
gtttctctctctccttctctctctctctctctctctcttttttttccgccctagctggggctgtgttggaggagaggaagaaagagagacagaggattgcattcatccgttacgttcttgaaatttcctaatagcaagaccagcgaagcggttgcacccttttcaatcttgcaaaggaaaaaaacaaaacaaaacaaaaaaaacccaagtccccttcccggcagtttttgccttaaagctgccctcttgaaattaattttttcccaggagagagatgtcttatcaggggaagaaaaatattccacgcatcacgagcgatcgtcttctgatcaaaggaggtaaaattgttaatgatgaccagtcgttctatgcagacatatacatggaagatgggttgatcaagcaaataggagaaaatctgattgtgccaggaggagtgaagaccatcgaggcccactcccggatggtgatccccggaggaattgacgtccacactcgtttccagatgcctgatcagggaatgacgtctgctgatgatttcttccaaggaaccaaggcggccctggctgggggaaccactatgatcattgaccacgttgttcctgagcctgggacaagcctgctcgctgcctttgaccagtggagggaatgggccgacagcaagtcctgctgtgactactctctgcatgtggacatcagcgagtggcataagggcatccaggaggagatggaagcgcttgtgaaggatcacggggtaaattccttcctcgtgtacatggctttcaaagatcgcttccagctaacggattgccagatttatgaagtactgagtgtgatccgggatattggcgccatagcccaagtccacgcagaaaatggcgacatcattgcagaggagcagcagaggatcctggatctgggcatcacgggccccgagggacatgtgctgagccgacctgaggaggtcgaggccgaagccgtgaatcgtgccatcaccatcgccaaccagaccaactgcccgctgtatatcaccaaggtgatgagcaaaagctctgctgaggtcatcgcccaggcacggaagaagggaactgtggtgtatggcgagcccatcactgccagcttgggaacggacggctcccattactggagcaagaactgggccaaggctgctgcctttgtcacctccccacccttgagccctgatccaaccactccagactttctcaactccttgctgtcctgtggagacctccaggtcacgggcagtgcccattgcacgtttaacactgcccagaaggctgtaggaaaggacaacttcaccctgattccggagggcaccaatggcactgaggagcggatgtccgtcatctgggacaaggctgtggtcactgggaagatggatgagaaccagtttgtggctgtgaccagcaccaatgcagccaaagtcttcaacctttacccccggaaaggccgcattgctgtgggatccgatgccgacctggtcatctgggaccccgacagcgttaaaaccatctctgccaagacacacaacagctctctcgagtacaacatctttgaaggcatggagtgccgcggctccccactggtggtcatcagccaggggaagattgtcctggaggacggcaccctgcatgtcaccgaaggctctggacgctacattccccggaagcccttccctgattttgtttacaagcgtatcaaggcaaggagcaggctggctgagctgagaggggttcctcgtggcctgtatgacggacctgtgtgtgaagtgtctgtgacgcccaagacagtcactccagcctcctcggccaagacgtctcctgccaagcagcaggccccacctgtccggaacctgcaccagtctggattcagtttgtctggtgctcagattgatgacaacattccccgccgcaccacccagcgtatcgtggcgccccccggtggccgtgccaacatcaccagcctgggctagagctcctgggctgtgcgtccactggggactggggatgggacacctgaggacattctgagacttctttcttccttcctttttttttttttgtttttttttttaagagcctgtgatagttactgtggagcagccagttcatggggtcccccttggggccccacaccccgtctctcaccaagagttactgattttgctcatccacttccctacacatctatgggtatcacacccaagactacccaccaagctcatacagggaaccacacccaacacttagacatgcgaacaagcagcccccagcgagggtctccttcgccttcaacctcctagtgtctgttagcatcttccttttcatggggggagggaagataaagtgaattgcccagagctgcctttttcttttctttttaaaaattttaagaagttttccttgtggggctggggaggggccggggtcagggagagtctttttttttttttttttaaatactaaattggaacatttaattccatattaatacaaggggtttgaactggacatcctaatgatgcaattacgtcatcacccagctgattccgggtggttggcaaactcatcgtgtctgtcctgagaggctccacaatgcccacccgcatcgccattctgtagtcttcagggtcagctgttgataaaggggcaggcttgcgttattggcctagattttgctgcagattaaatcctttgaggattctcttctcttttaccatttttctgcgtgctctcactctctctttctctctctagctttttaattcatgaatattttcgtgtctgtctctctctctctctgtgtttcctccagcccttgtctcggagacggtgttttcctcccttgccccattatcttttcacctcccaggtctaccatttcatggtggtcgttgggtccgcctaaaggatttgagcgtttgccattgcaagcatagtgctgtgtcatcctggtccatgtaggactggtgctaaccacctgccatcatgaggatgtgtgctagagtgtgggaccctggccaagtgcaggaatgggccatgccgtctcacccacagtatcacacgtggaaccgcagacagggcccagaagctttagaggtatgaggctgcagaaccggagagattttcctctgtgcagtgctctctggctaaagtcacggtcaaacctaaacaccgagcctcattaacccaagtgaaccaaccaaagtcaccagttcagaagtgctaagctaataggagtctgacccgagggcctgctgcttcctggttaagtatcttttgagattctagaacacatgggagctttttattttcggggaaaaaccgtatttttttcttgtccaattatttctaaagacacactacatagaaagaggccctataaactcaaaaagtcattgggaaacttaaagtctattctactttgcaagaggagaaatgtgttttatgaacgatagatcacatcagaactcctgtggggaggaaaccttataaattaaacacatggcccccttagagaccacaggtgatgtctgtctccatccttccctctccttttctgtcacctttccccctagctggctcctttggacctacccctgtccttgctgacttgtgttgcattgtattccaaacgtgtttacaggttctcttaagcaatgttgtatttgcaggcttttctgaataccaaatctgctttttgtaaagcgtaaaaacatcacaaagtaggtcattccatcaccacccttgtctctctacacattttgcctttggggatctggttggggttttgggttttttgttgttgttgtttatttgttattttaaaggtaaattgcacttttaaaaaaataattggttgacttaatatatttgctttttttctcacctgcacttagaggaaatttgaacaagttggaaaaaaacaatttttgtttcaattctaagaaacacttgcagctctagtattcacttgagtcttcctgtttttcctgtaccgggtcatggtaatttttggttgttttggttgttttcttaaaaaacaagttaaaacctgacgatttctgcaggctgtgtaagcatgtttacctgttggcttgctttgtgtgtctgttaaatgaatgtcatatgtaaatgctaaaataaatcgacagtgtctcagaactgaataactgcagtgacttgatgctctaaaacagtgtaggatttaagaatagatggtttttaatcctggaaattgtgattgtgacccatgagtggaggaactttcagttctaaagctgataaagtgtgtagccagaagagtacttttttttttgtaaccactgtcttgatggcaaaataattatggtaaaaaacaagtctcgtgtttattattccttaagaactctgtgttatattaccatggaacgcctaataaagcaaaatgtggttgtttc

SEQ ID NO: 10460 - protein, 572 aa, Homo sapiens
  ref <308>: DATABASE ACCESSION NUMBER: SWISS-Prot / Q16555
  ref <309>: DATABASE ENTRY DATE: 2001-10-16
MSYQGKKNIPRITSDRLLIKGGKIVNDDQSFYADIYMEDGLIKQIGENLIVPGGVKTIEAHSRMVIPGGIDVHTRFQMPDQGMTSADDFFQGTKAALAGGTTMIIDHVVPEPGTSLLAAFDQWREWADSKSCCDYSLHVDISEWHKGIQEEMEALVKDHGVNSFLVYMAFKDRFQLTDCQIYEVLSVIRDIGAIAQVHAENGDIIAEEQQRILDLGITGPEGHVLSRPEEVEAEAVNRAITIANQTNCPLYITKVMSKSSAEVIAQARKKGTVVYGEPITASLGTDGSHYWSKNWAKAAAFVTSPPLSPDPTTPDFLNSLLSCGDLQVTGSAHCTFNTAQKAVGKDNFTLIPEGTNGTEERMSVIWDKAVVTGKMDENQFVAVTSTNAAKVFNLYPRKGRIAVGSDADLVIWDPDSVKTISAKTHNSSLEYNIFEGMECRGSPLVVISQGKIVLEDGTLHVTEGSGRYIPRKPFPDFVYKRIKARSRLAELRGVPRGLYDGPVCEVSVTPKTVTPASSAKTSPAKQQAPPVRNLHQSGFSLSGAQIDDNIPRRTTQRIVAPPGGRANITSLG

SEQ ID NO: 10461 - DNA, 2407 bp, Rattus norvegicus
  ref <308>: DATABASE ACCESSION NUMBER: EMBL / Z48444
  ref <309>: DATABASE ENTRY DATE: 1997-04-01
ggtcctgagctcctgaggaaaaagcgcacaactctgcctgagagaaatacttgtcagctctatatccagacagatcacctgttctttaaatcctatggaacacgagaagctgtgattgctcagatatccagtcatgttaaagcaattgatgcaatttaccagactacagacttctccggaatccgtaacatcagctttatggtgaaacgcataagaatcaatacaacatctgatgaaaaagatcctacaaatcctttcaggttcccaaatattggtgtggagaagttcctggagttgaattctgagcagaatcatgatgactactgcttggcctatgtcttcacggaccgggattttgatgatggtgttcttggtctggcatgggttggagcaccttcaggaagctctggaggaatatgtgagaaatccaagttgtattcagatggcaagaagaagtcattgaacacgggcatcattactgttcagaactatggctctcacgtgcctcccaaagtctctcatattacttttgctcatgaagttggacataactttggatctccacatgattctggaacagagtgcactccaggagagtctaagaacttaggccaaaaagaaaatggcaattacatcatgtatgcgagagcaacgtctggggacaaacttaacaacaacaaattttcactctgcagcattaggaacataagccaagtgcttgagaagaagaggaacaactgttttgttgaatctggccagcctatctgtggaaatgggatggtggagcaaggggaagagtgtgactgtggctacagtgaccaatgcaaagatgagtgctgcttcgatgcaaaccagccagaggggaagaaatgcaagctgaagcctgggaagcagtgcagtccaagtcaaggaccctgctgtacagcacagtgtgcattcaagtcaaagtctgagaaatgtcgggatgattctgactgtgcaaaggaagggatttgcaatggcttcacagccctttgcccagcatctgatcccaagcccaactttacagactgtaacaggcatacacaagtgtgcattaatgggcaatgtgcaggttctatctgtgagaagtatgacttggaggagtgcacctgtgccagctctgatggcaaagatgataaggaattatgtcatgtttgctgcatgaagaaaatggccccatcaacttgtgccagtacaggctctttgcagtggaacaagcagttcactggtcggactatcactctgcagccaggctctccatgtaatgacttcagaggctactgtgatgttttcatgcggtgcagattagtagatgctgatggccctctagctaggctgaaaaaagcaatttttagtccacaactctatgaaaacattgctgagtggattgtggctcactggtgggcagtactgcttatgggaattgccctgatcatgctaatggctggatttatcaagatttgcagtgttcacactccaagtagtaatccaaagttgcctcctcctaaaccacttccaggcactttaaagaggaggagaccgccacagcccattcagcagccccagcgtcagaggccccgggagagttatcaaatgggacacatgcgacgctgatgcagcttttgccttggttcttcctagtgcctacagtgggaaaacttcactccaaagagaaacctgttaagtcatcatctgcaaatgaaaccctcacagttaatagttgaagaaaaaatggcaagagatcatgtcctcagaccaggtggaattacctaaaatttaaagcctgaaaattccaatttttttgggggggtgggatggaaaaggaacccaattttcttatggacagatatttttaacctaatggcacaaagtcttagaatattattatgtgccctgtgttccctgttcttcgttgctgcattttcttcacttgcagacagacttggctctcgataaacttttatcacaaattgaaatatatttttttcaactgccaatctaggctgggaggctcgaccacctcaacattggatacatcacttgccaatgtacataccttgtaatatgcagacatgtatttcttacgtacactgtacttctctgtgcaatttgtaaacagaaattgcaatatggatgtttctttgtataataaatttttccgctcttaatgaaaaattactgtttaattgacatactcaggataacagagaatggtggtgtgcagtggtccaggattctgtaatgcttcatgcaggccattttgaaatgagaattgaaaaccctttttcttatggtggagttggttcttacatgcatccttttcctgttccatggcttctgtgagtaggagaggctgtgttgaagagctcagctggtggcttacccg

SEQ ID NO: 10462 - protein, 544 aa, Rattus norvegicus
  ref <308>: DATABASE ACCESSION NUMBER: SWISS-Prot / CAA88359
  ref <309>: DATABASE ENTRY DATE: 2003-02-01
GPELLRKKRTTLPERNTCQLYIQTDHLFFKSYGTREAVIAQISSHVKAIDAIYQTTDFSGIRNISFMVKRIRINTTSDEKDPTNPFRFPNIGVEKFLELNSEQNHDDYCLAYVFTDRDFDDGVLGLAWVGAPSGSSGGICEKSKLYSDGKKKSLNTGIITVQNYGSHVPPKVSHITFAHEVGHNFGSPHDSGTECTPGESKNLGQKENGNYIMYARATSGDKLNNNKFSLCSIRNISQVLEKKRNNCFVESGQPICGNGMVEQGEECDCGYSDQCKDECCFDANQPEGKKCKLKPGKQCSPSQGPCCTAQCAFKSKSEKCRDDSDCAKEGICNGFTALCPASDPKPNFTDCNRHTQVCINGQCAGSICEKYDLEECTCASSDGKDDKELCHVCCMKKMAPSTCASTGSLQWNKQFTGRTITLQPGSPCNDFRGYCDVFMRCRLVDADGPLARLKKAIFSPQLYENIAEWIVAHWWAVLLMGIALIMLMAGFIKICSVHTPSSNPKLPPPKPLPGTLKRRRPPQPIQQPQRQRPRESYQMGHMRR

SEQ ID NO: 10463 - DNA, 2333 bp, Homo sapiens
  ref <308>: DATABASE ACCESSION NUMBER: EMBL / AK023460
  ref <309>: DATABASE ENTRY DATE: 2002-08-06
gaaaatgcaaactgaaacctgggaaacagtgcagtccaagtcaaggtccttgttgtacagcacagtgtgcattcaagtcaaagtctgagaagtgtcgggatgattcagactgtgcaagggaaggaatatgtaatggcttcacagctctctgcccagcatctgaccctaaaccaaacttcacagactgtaataggcatacacaagtgtgcattaatggggtaagcatttaactatatgttttaaaatttaattttagaaaacttgtttttcagaagaattattgatgcttaaagctacatagttaaagtaattaatcttggtctctgtttaagtaatattccctcacaaaaccatgaatatattatgtggcattcaattagctactaatttgtctttcatctttccatgtacatgtggttgatattctctagagaaacatagttgtacaactcggcatgtgatttgtctataatatttaagttttataaaataatatttcagtagcctaaataaaagaactctttggtcatcttctctgaatatcaaaccttcaaagcttttgtggctgaatatcactttgctctacaggaaaaaaatttaatttttctttctttatagaagagccgtaataaccaacataaaatcgatcctcatctaatctcttgctctgcttttatttcatttttttaagttgccattgctttaaaagatttactatctttcttggatttactgtttttcaaattttttcaaatgtatttatgtaattcagttttgatactcatctctgtttgtttttcactttcatttccatttaaatattttgacattggaagctcatacttgcctgtctgttactataaaaaataggtttgactgtatagggattaaacaatttgtcttttatttttcttctagcaatgtgcaggttctatctgtgagaaatatggcttagaggagtgtacgtgtgccagttctgatggcaaagatgataaagaattatgccatgtatgctgtatgaagaaaagtaaggcttttaaaaacacaagagtataaaatttgcctcaaactattattttctcctaaattttaagtgtaaaactttgacctacagtttggccagataatttccagctaaatctgtcctcttgaggagattataaatgtaacgtagcattgtgtctctattattatggtctctacaatgttttaaaaatgataaactagacaaaacgttgccagctttacagcagtaatttacataaacactgttagactttaagtcatcgtggacactgagtcaagacttgctggttgcttgtttacattgtaacatttaatatgaattactgatggcgttacccagcctaactagagaaggtctgtataacatgttatggtaatgatttcagttttttttccctctttgtatttgcacaactggaaatctgatctgcaacttatatttgaatctgaccttcagcttatatttggcatttcttttccagtggacccatcaacttgtgccagtacagggtctgtgcagtggagtaggcacttcagtggtcgaaccatcaccctgcaacctggatccccttgcaacgattttagaggttactgtgatgttttcatgcggtgcagattagtagatgctgatggtcctctagctaggcttaaaaaagcaatttttagtccagagctctatgaaaacattgctgaatggattgtggctcattggtgggcagtattacttatgggaattgctctgatcatgctaatggctggatttattaagatatgcagtgttcatactccaagtagtaatccaaagttgcctcctcctaaaccacttccaggcactttaaagaggaggagacctccacagcccattcagcaaccccagcgtcagcggccccgagagagttatcaaatgggacacatgagacgctaactgcagcttttgccttggttcttcctagtgcctacaatgggaaaacttcactccaaagagaaacctattaagtcatcatctccaaactaaaccctcacaagtaacagttgaagaaaaaatggcaagagatcatatcctcagaccaggtggaattacttaaattttaaagcctgaaaattccaatttgggggtgggaggtggaaaaggaacccaattttcttatgaacagatatttttaacttaatggcacaaagtcttagaatattattatgtgccccgtgttccctgttcttcgttgctgcattttcttcacttgcaggcaaacttggctctcaataaacttttaccacaaattgaaataaatatatttttttcaactgcc

SEQ ID NO: 10464 - protein, 748 aa, Homo sapiens
  ref <308>: DATABASE ACCESSION NUMBER: Refseq / NP_001101
  ref <309>: DATABASE ENTRY DATE: 2002-11-05
MVLLRVLILLLSWAAGMGGQYGNPLNKYIRHYEGLSYNVDSLHQKHQRAKRAVSHEDQFLRLDFHAHGRHFNLRMKRDTSLFSDEFKVETSNKVLDYDTSHIYTGHIYGEEGSFSHGSVIDGRFEGFIQTRGGTFYVEPAERYIKDRTLPFHSVIYHEDDINYPHKYGPQGGCADHSVFERMRKYQMTGVEEVTQIPQEEHAANGPELLRKKRTTSAEKNTCQLYIQTDHLFFKYYGTREAVIAQISSHVKAIDTIYQTTDFSGIRNISFMVKRIRINTTADEKDPTNPFRFPNIGVEKFLELNSEQNHDDYCLAYVFTDRDFDDGVLGLAWVGAPSGSSGGICEKSKLYSDGKKKSLNTGIITVQNYGSHVPPKVSHITFAHEVGHNFGSPHDSGTECTPGESKNLGQKENGNYIMYARATSGDKLNNNKFSLCSIRNISQVLEKKRNNCFVESGQPICGNGMVEQGEECDCGYSDQCKDECCFDANQPEGRKCKLKPGKQCSPSQGPCCTAQCAFKSKSEKCRDDSDCAREGICNGFTALCPASDPKPNFTDCNRHTQVCINGQCAGSICEKYGLEECTCASSDGKDDKELCHVCCMKKMDPSTCASTGSVQWSRHFSGRTITLQPGSPCNDFRGYCDVFMRCRLVDADGPLARLKKAIFSPELYENIAEWIVAHWWAVLLMGIALIMLMAGFIKICSVHTPSSNPKLPPPKPLPGTLKRRRPPQPIQQPQRQRPRESYQMGHMRR

SEQ ID NO: 10465 - DNA, 1067 bp, Rattus norvegicus
  ref <308>: DATABASE ACCESSION NUMBER: EMBL / Z49761
  ref <309>: DATABASE ENTRY DATE: 1996-05-03
cgactcgctgagggtgttaaggtatggagcatgagcagaagtcaggagggctgctgaggctgctgcggcttctgtggctgctgcctcactcctgggcggtgcttgaagcttctccccaggcgtggtgggatgagtcgcagaaccacacattccgtcacactctgttctgccaggatgggtttcccaacatagggctctccgagacctacgacgaggacgcactcttctccttcgacttctcccagaacaccagagtgccccggctgcctgagtttgctgagtgggctcaggaacagggagatgcctctgccattgcgtttgacaaaggcttctgcgacatgttgatgcagaatgtgagcccgcggcttgaaggtcaaatcccagtgtccagaggtttgccttcggctgaggtgttcaccctgaagcccctggagtttggcaagcccaacacgctggtctgtttcatcagcaacctctttccaccgactttgacggtgacctggcagcatcatttcgtccccgtggagggagccagccccacgtccgtgtcagccatcgatgggctcaccttccaggccttctcttatttaaacttcacaccggagcccttcgacctttactcctgcactgtgacgcacgagattgaccgctacacggcaattgcctattgggtaccccagaacgccctgccttcagatctcctggagaatgtactgtgcggtgtggccttcggcctcggtgtgctgggcctcgtcgtgggcattgtcttcttcatccgctcccagagaccttgctcaggggactgattcttcccaaggagggcttggaacagcaccagccaggccggcagcgatgtccaggcatctcgcgcttaccagggtctttcctcagagccgaagtccccgggatcccttggggtgcatgccggcatgctaaggggttccgctgtccctggacttacatccagaaaagccggagtcaggagccccgggccccaccagaccactaccttataccttccctcatccaggaaataaagtttatttcttaaaaaaaaaaaaaaaaaa

SEQ ID NO: 10466 - protein, 260 aa, Rattus norvegicus
  ref <308>: DATABASE ACCESSION NUMBER: SWISS-Prot / CAA89831
  ref <309>: DATABASE ENTRY DATE: 2003-02-01
MEHEQKSGGLLRLLRLLWLLPHSWAVLEASPQAWWDESQNHTFRHTLFCQDGFPNIGLSETYDEDALFSFDFSQNTRVPRLPEFAEWAQEQGDASAIAFDKGFCDMLMQNVSPRLEGQIPVSRGLPSAEVFTLKPLEFGKPNTLVCFISNLFPPTLTVTWQHHFVPVEGASPTSVSAIDGLTFQAFSYLNFTPEPFDLYSCTVTHEIDRYTAIAYWVPQNALPSDLLENVLCGVAFGLGVLGLVVGIVFFIRSQRPCSGD

SEQ ID NO: 10467 - DNA, 1100 bp, Homo sapiens
  ref <308>: DATABASE ACCESSION NUMBER: Refseq / NM_006120
  ref <309>: DATABASE ENTRY DATE: 2002-02-19
ctaaagctgggttggtagctcctacctactgtgtggcaagaaggtatgggtcatgaacagaaccaaggagctgcgctgctacagatgttaccacttctgtggctgctaccccactcctgggccgtccctgaagctcctactccaatgtggccagatgacctgcaaaaccacacattcctgcacacagtgtactgccaggatgggagtcccagtgtgggactctctgaggcctacgacgaggaccagcttttcttcttcgacttttcccagaacactcgggtgcctcgcctgcccgaatttgctgactgggctcaggaacagggagatgctcctgccattttatttgacaaagagttctgcgagtggatgatccagcaaatagggccaaaacttgatgggaaaatcccggtgtccagagggtttcctatcgctgaagtgttcacgctgaagcccctggagtttggcaagcccaacactttggtctgttttgtcagtaatctcttcccacccatgctgacagtgaactggcagcatcattccgtccctgtggaaggatttgggcctacttttgtctcagctgtcgatggactcagcttccaggccttttcttacttaaacttcacaccagaaccttctgacattttctcctgcattgtgactcacgaaattgaccgctacacagcaattgcctattgggtaccccggaacgcactgccctcagatctgctggagaatgtgctgtgtggcgtggcctttggcctgggtgtgctgggcatcatcgtgggcattgttctcatcatctacttccggaagccttgctcaggtgactgattcttccagaccagagtttgatgccagcagcttcggccatccaaacagaggatgctcagatttctcacatcctgcccaggatctcctcttagggtagaagaagtctctgggacatccctggggtgtgtgtgtagatttcccacctggggactctgctgtccctgggcttgcatcccagggatcccagagtggcctgcctatcacaaccacatcccttccccccacaaggcaataaatctcatttctttaaaaaaaaaaaaaaaaaaaaa

SEQ ID NO: 10468 - protein, 261 aa, Homo sapiens
  ref <308>: DATABASE ACCESSION NUMBER: SWISS-Prot / P28067
  ref <309>: DATABASE ENTRY DATE: 2001-10-16
MGHEQNQGAALLQMLPLLWLLPHSWAVPEAPTPMWPDDLQNHTFLHTVYCQDGSPSVGLSEAYDEDQLFFFDFSQNTRVPRLPEFADWAQEQGDAPAILFDKEFCEWMIQQIGPKLDGKIPVSRGFPIAEVFTLKPLEFGKPNTLVCFVSNLFPPMLTVNWHDHSVPVEGFGPTFVSAVDGLSFQAFSYLNFTPEPSDIFSCIVTHEIDRYTAIAYWVPRNALPSDLLENVLCGVAFGLGVLGIIVGIVLIIYFRKPCSGD

SEQ ID NO: 10469 - DNA, 1828 bp, Rattus norvegicus
  ref <308>: DATABASE ACCESSION NUMBER: EMBL / Z50144
  ref <309>: DATABASE ENTRY DATE: 1996-02-29
gtggcactccgcagcactacccggagacagctaacagtgcagcccgagtgatctgggaagccgttctcagtgaccgacttttctagtcctgttccacgcgaccagcagagacatgaattactcaaggttcctcactgcaacgagcctggccagaaagacatcccctatcagagctacagtggagataatgagtagagcacccaaagacatcatctccctggctcctggatctccgaacccgaaagtgttcccctttaagtcagctgtcttcactgtggagaacggaagcaccatccggtttgaaggagagatgtttcaaagggccctccaatattcctcaagctatggaattccagaacttctgtcctggctaaaacagttgcaaataaaattgcataatcctccgactgtcaactactcacccaacgaaggacagatggacctctgcatcacatctggctgtcaagacggtctctgtaaggtgtttgaaatgctcatcaatcctggagacactgttctggtcaatgaaccactgtattcaggagccctttttgcaatgaaaccactgggctgcaattttattagtgtccccagtgatgactgtgggattattccagagggtctcaaaaaagtactttcccagtggaaaccagaagattccaaggatcccacaaaaaggactccaaaatttctgtatactattccgaatggcaacaaccctacaggcaactcgttgactggtgaccgcaagaaagaaatctatgagcttgcaagaaaatatgacttcctcataatagaagacgatccttactattttctccagttcaccaagccttgggaaccaacctttctctccatggatgttgatgggagagttatcagagctgactccctttcaaaagttatctcctcagggctgagagtggggtttataactggccccaagtccttgatacagaggattgttctccacacacaaatctcatcactgcatccctgtactttatcacagctcatgatatcggagcttctataccagtggggagaagagggtttcctggcccatgttgacagagctattgatttctacaagaaccagagggattttatattggcagctgcagacaagtggttacgtggtttggcagagtggcatgttcccaaagctggcatgtttctatggattaaagttaacggaatctctgatgcaaaaaaactaattgaagaaaaggctattgaaagagagatcttgttagttcctggaaatagtttcttcgtcgataattcagccccctcctccttcttcagagcatccttctctcaggttactccagcgcagatggacttagtcttccagagattggcccaactcataaaagacgtttcataaagaaatcaaactcagcattgaacttataattttaaaataaatttcctatactttgctgaagaaatggctgacaggatggatccagtttgtgaaatatctgtggcaatttcactgaacaactttgaagccccttaaaatccaccgcattgccaaaataactttctgatatacttttgccctttgattaattatgaactaacaaaacatcaaatttcattgttaaagacctctgtagctgcttaataatgtccaataaatttttttgagcctaacatagactaactaacatagtaaattgcaagggaattagttaaaatggcctataatatgcaggtttttttctactttaaggaaatttcatgagcatttactgcaaaaattgttgtaatttgacaattataaattactttgtaaccgaaaaaaaaaaaaaaaaaaaaa

SEQ ID NO: 10470 - protein, 425 aa, Rattus norvegicus
  ref <308>: DATABASE ACCESSION NUMBER: Refseq / NP_058889
  ref <309>: DATABASE ENTRY DATE: 2002-11-05
MNYSRFLTATSLARKTSPIRATVEIMSRAPKDIISLAPGSPNPKVFPFKSAVFTVENGSTIRFEGEMFQRALQYSSSYGIPELLSWLKQLQIKLHNPPTVNYSPNEGQMDLCITSGCQDGLCKVFEMLINPGDTVLVNEPLYSGALFAMKPLGCNFISVPSDDCGIIPEGLKKVLSQWKPEDSKDPTKRTPKFLYTIPNGNNPTGNSLTGDRKKEIYELARKYDFLIIEDDPYYFLQFTKPWEPTFLSMDVDGRVIRADSLSKVISSGLRVGFITGPKSLIQRIVLHTQISSLHPCTLSQLMISELLYQWGEEGFLAHVDRAIDFYKNQRDFILAAADKWLRGLAEWHVPKAGMFLWIKVNGISDAKKLIEEKAIEREILLVPGNSFFVDNSAPSSFFRASFSQVTPAQMDLVFQRLAQLIKDVS

SEQ ID NO: 10471 - DNA, 2231 bp, Homo sapiens
  ref <308>: DATABASE ACCESSION NUMBER: Refseq / NM_016228
  ref <309>: DATABASE ENTRY DATE: 2002-05-16
ctttcaaatattttttattgaaatgacaataaaataaaaaaagaacagtgatcactttaaccaaacttactttacaaatataaaaaatataaccaaaacttgggaattccaggccacggcgcggggcgggagggggcgcggcgaggcccgccggcggggcaaaaccggcctgggccctggcggccgcaggagcgcgtgcggcgtggactttgccgggctcgccacacagccccagacccgtttaggaccgggagaccgaacgcagcgtccagccggggagtttcggcggcgttctccgggcaccgcgcgcgggaagccagacgcagcggggggacacatctcgcggtggcgttgccagagtgaggagttagcaggcaggacttgacgaggctctttggtttttctagtcctcaaccactgaagaagaagcttgatgcttggctgtcagaagacatgaattacgcacggttcatcacggcagcgagcgcagccagaaacccttctcccatccggaccatgactgacatattgagcagaggaccaaaatcgatgatctccttggctggtggcttaccaaatccaaacatgtttccttttaagactgccgtaatcactgtagaaaatggaaagaccatccaatttggagaagagatgatgaagagagcacttcagtattctccgagtgctggaattccagagcttttgtcctggctaaaacagttacaaataaaattgcataatcctcctaccatccattacccacccagtcaaggacaaatggatctatgtgtcacatctggcagccaacaaggtctttgtaaggtgtttgaaatgatcattaatcctggagataatgtcctcctagatgaacctgcttattcaggaactcttcaaagtctgcacccactgggctgcaacattattaatgttgccagtgatgaaagtgggattgttccagattccctaagagacatactttccagatggaaaccagaagatgcaaagaatccccagaaaaacacccccaaatttctttatactgttccaaatggcaacaaccctactggaaactcattaaccagtgaacgcaaaaaggaaatctatgagcttgcaagaaaatatgatttcctcataatagaagatgatccttactattttctccagtttaacaagttcagggtaccaacatttctttccatggatgttgatggacgtgtcatcagagctgactctttttcaaaaatcatttcctctgggttgagaataggatttttaactggtccaaaacccttaatagagagagttattttacacatacaagtttcaacattgcaccccagcacttttaaccagctcatgatatcacagcttctacacgaatggggagaagaaggtttcatggctcatgtagacagggttattgatttctatagtaaccagaaggatgcaatactggcagctgcagacaagtggttaactggtttggcagaatggcatgttcctgctgctggaatgtttttatggattaaagttaaaggcattaatgatgtaaaagaactgattgaagaaaaggccgttaagatgggggtattaatgctccctggaaatgctttctacgtcgatagctcagctcctagcccttacttgagagcatccttctcttcagcttctccagaacagatggatgtggccttccaggtattagcacaacttataaaagaatctttatgaagaaattaaactaggttgggcatggtgcgtcacacctataatcccagcactttgggaggcagaggagggaggatcacttgaacccaggaattcaggctgcagtaagctacgatcacaccactgcactctggcctgcatgcactctggcctgcatggcagaacaagaccctgtctctaaaaaaagagaaagaaatcaaactaatcatgctgctcatggatttttccaataaatttcttgttttggcaggaagaaatgaacactggtattagacttaaagattaaatttcctcaaacatgtcctatctgtagtagttcaactagacaccttttaaagtgcctctaaattcatcagatggccaaactgtatttataatccacttaggcattttgaaaaactttcaacctgtaaaaagttacttttatcttggatttattatgaagaactttgtagttgctttgtaatttcccataaattgtctttgaaactaaaaaaaaaaaa

SEQ ID NO: 10472 - protein, 425 aa, Homo sapiens
  ref <308>: DATABASE ACCESSION NUMBER: Refseq / NP_057312
  ref <309>: DATABASE ENTRY DATE: 2002-05-16
MNYARFITAASAARNPSPIRTMTDILSRGPKSMISLAGGLPNPNMFPFKTAVITVENGKTIQFGEEMMKRALQYSPSAGIPELLSWLKQLQIKLHNPPTIHYPPSQGQMDLCVTSGSQQGLCKVFEMIINPGDNVLLDEPAYSGTLQSLHPLGCNIINVASDESGIVPDSLRDILSRWKPEDAKNPQKNTPKFLYTVPNGNNPTGNSLTSERKKEIYELARKYDFLIIEDDPYYFLQFNKFRVPTFLSMDVDGRVIRADSFSKIISSGLRIGFLTGPKPLIERVILHIQVSTLHPSTFNQLMISQLLHEWGEEGFMAHVDRVIDFYSNQKDAILAAADKWLTGLAEWHVPAAGMFLWIKVKGINDVKELIEEKAVKMGVLMLPGNAFYVDSSAPSPYLRASFSSASPEQMDVAFQVLAQLIKESL

SEQ ID NO: 10473 - DNA, 981 bp, Rattus norvegicus
  ref <308>: DATABASE ACCESSION NUMBER: EMBL / Z54212
  ref <309>: DATABASE ENTRY DATE: 1996-03-08
aaacctcctgaagagaggaccagaccagcagccagcgccaccactcagggcatctgcctctgtcactggatactccagaattctctactcaggagttacaaaaaagaagccaagatgttggtgctactggccggtctcttcgtggtccacatcgccactgccattatgctgtttgtctccaccattgccaacgtctggatggtggcggacggtatagactcgtccatagggctttggaagaactgcaccagtggcagctgtgacggctctctgagctacggcaatgatgatgctatcaaggcagtgcaagctttcatgatcctctccatcatcttctctataatctccctcgtggtcttcgtgttccagctcttcaccatggagaagggaaaccggttcttcctctcgggatccaccatgctggtgtgctggctgtgcattctgattggagtgtctatctacactcaccactacgcccacagcgaagggaactttttccccagcagccatcaaggctactgtttcatcctgacctggatttgcttctgcttcagcttcatcatcggcatactctatatggtcctgaggaagaaataagctcgtgggcatctggggtgggggtggggaagtagggaggaggaagcaactgaatccgggagggaagcagaagtcactgtgtagggataaccaagggaggggaggggggaagggagggggaaaggaagagtaggagaggcccaaacccaaaccatatctgggggggcgtggttctctactgccaaacgcccatccttggaagaaagttgttggctactatgctgatgcttccttgaggccaccagagagtcctcctctagccaccaaatatggccccatctatcctcaattaccgacacttggggcctcaccagctgccattccactggcgccactcttgagggtgactgctgggtcatacactgaggtcttgcaaacccattc

SEQ ID NO: 10474 - protein, 160 aa, Rattus norvegicus
  ref <308>: DATABASE ACCESSION NUMBER: SWISS-Prot / P54848
  ref <309>: DATABASE ENTRY DATE: 1996-10-01
MLVLLAGLFVVHIATAIMLFVSTIANVWMVADGIDSSIGLWKNCTSGSCDGSLSYGNDDAIKAVQAFMILSIIFSIISLVVFVFQLFTMEKGNRFFLSGSTMLVCWLCILIGVSIYTHHYAHSEGNFFPSSHQGYCFILTWICFCFSFIIGILYMVLRKK

SEQ ID NO: 10475 - DNA, 2786 bp, Homo sapiens
  ref <308>: DATABASE ACCESSION NUMBER: Refseq / NM_001423
  ref <309>: DATABASE ENTRY DATE: 2000-10-31
agcactctccagcctctcaccgcaaaattacacaccccagtacaccagcagaggaaacttataacctcgggaggcgggtccttcccctcagtgcggtcacatacttccagaagagcggaccagggctgctgccagcacctgccactcagagcgcctctgtcgctgggacccttcagaactctctttgctcacaagttaccaaaaaaaaaagagccaacatgttggtattgctggctggtatctttgtggtccacatcgctactgttattatgctatttgttagcaccattgccaatgtctggttggtttccaatacggtagatgcatcagtaggtctttggaaaaactgtaccaacattagctgcagtgacagcctgtcatatgccagtgaagatgccctcaagacagtgcaggccttcatgattctctctatcatcttctgtgtcattgccctcctggtcttcgtgttccagctcttcaccatggagaagggaaaccggttcttcctctcaggggccaccacactggtgtgctggctgtgcattcttgtgggggtgtccatctacactagtcattatgcgaatcgtgatggaacgcagtatcaccacggctattcctacatcctgggctggatctgcttctgcttcagcttcatcatcggcgttctctatctggtcctgagaaagaaataaggccggacgagttcatggggatctggggggtggggaggaggaagccgttgaatctgggagggaagtggaggttgctgtacaggaaaaaccgagataggggaggggggagggggaagcaaaggggggaggtcaaatcccaaaccattactgaggggattctctactgccaagcccctgccctggggagaaagtagttggctagtactttgatgctcccttgatggggtccagagagcctccctgcagccaccagacttggcctccagctgttcttagtgacacacactgtctggggccccatcagctgccacaacaccagccccacttctgggtcatgcactgaggtccacagacctactgcactgagttaaaatagcggtacaagttctggcaagagcagatactgtctttgtgctgaatacgctaagcctggaagccatcctgcccttctgacccaaagcaaaacatcacattccagtctgaagtgcctactggggggctttggcctgtgagccattgtccctctttggaacagatatttagctctgtggaattcagtgacaaaatgggaggaggaaagagagtttgtaaggtcatgctggtgggttagctaaaccaagaaggagaccttttcacaatggaaaacctgggggatggtcagagcccagtcgagacctcacacacggctgtccctcatggagacctcatgccatggtctttgctaggcctcttgctgaaagccaaggcagctcttctggagtttctctaaagtcactagtgaacaattcggtggtaaaagtaccacacaaactatgggatccaaggggcagtcttgcaacagtgccatgttagggttatgtttttaggattcccctcaatgcagtcagtgtttcttttaagtatacaacaggagagagatggacatggctcattgtagcacaatcctattactcttcctctaacatttttgaggaagttttgtctaattatcaatattgaggatcagggctcctaggctcagtggtagctctggcttagacaccacctggagtgatcacctcttggggaccctgcctatcccacttcacaggtgaggcatggcaattctggaagctgattaaaacacacataaaccaaaaccaaacaacaggcccttgggtgaaaggtgctatataattgtgaagtattaagcctaccgtatttcagccatgataagaacagagtgcctgcattcccaggaaaatacgaaaatcccatgagataaataaaaatataggtgatgggcagatcttttctttaaaataaaaaagcaaaaactcttgtggtacctagtcagatggtagacgagctgtctgctgccgcaggagcacctctatacaggacttagaagtagtatgttattcctggttaagcaggcattgctttgccctggagcagctattttaagccatctcagattctgtctaaaggggttttttgggaagacgttttctttatcgccctgagaagatctaccccagggagaatctgagacatcttgcctacttttctttattagctttctcctcatccatttcttttatacctttcctttttggggagttgttatgccatgatttttggtatttatgtaaaaggattattactaattctatttctctatgtttattctagttaaggaaatgttgagggcaagccaccaaattacctaggctgaggttagagagattggccagcaaaaactgtgggaagatgaactttgtcattatgatttcattatcacatgattatagaaggctgtcttagtgcaaaaaacatacttacatttcagacatatccaaagggaatactcacattttgttaagaagttgaactatgactggagtaaaccatgtattcccttatcttttactttttttctgtgacatttatgtctcatgtaatttgcattactctggtggattgttctagtactgtattgggcttcttcgttaatagattatttcatatactataattgtaaatattttgatacaaatgtttataactctagggatataaaaacagattctgattcccttcaaaaaaaaaaaa

SEQ ID NO: 10476 - protein, 157 aa, Homo sapiens
  ref <308>: DATABASE ACCESSION NUMBER: SWISS-Prot / P54849
  ref <309>: DATABASE ENTRY DATE: 1998-12-15
MLVLLAGIFVVHIATVIMLFVSTIANVWLVSNTVDASVGLWKNCTNISCSDSLSYASEDALKTVQAFMILSIIFCVIALLVFVFQLFTMEKGNRFFLSGATTLVCWLCILVGVSIYTSHYANRDGTQYHHGYSYILGWICFCFSFIIGVLYLVLRKK

SEQ ID NO: 10477 - DNA, 707 bp, Rattus norvegicus
  ref <308>: DATABASE ACCESSION NUMBER: EMBL / Z75029
  ref <309>: DATABASE ENTRY DATE: 1996-08-06
gctctgggtcggggcccaccatcgaggaggtggattagaggctctttctggcgctccaggtgtgatctaggagacagatgggtggccttgaggactttgggttattgtcgtttaggacattaactccttcgttcggtctgcaatcaagtcctaggtttaagcaaactgccttccatttactctgtggaatttcacgtgtgctttgcattcccagtaaattagtactgggagtgtgtctttgcaatagatataatttcctgccttcaagtcagcactgccccccccccgaagttatttctttgcaggacagtcagagctatattgatatagcaagaggtgtgttacaaaaacaccaggacactgttgagttcctttgtgtttggactctcccctgggcgacagtgttgaggcactgttaagtcaggagctcggggccaccggtggatcactgaaagctgagactctgttgcttctcccgtttgacactctgttgctttccttgcatggtggctcacctaaggctgagactcttgttctccttccctgtataatcttgcctggcgttgcacttgttccccagtgtgtgaactcggagatgagtttacaccaccactgttagttcacgttttttgtttttacataaccatcctgaactcaggtcaatttttagctggctatttgaaaataaacttcaaaagaacttgcca

SEQ ID NO: 10478 - protein, 641 aa, Rattus norvegicus; identical to SEQ ID NO: 2952
  ref <308>: DATABASE ACCESSION NUMBER: SWISS-Prot / Q07439
  ref <309>: DATABASE ENTRY DATE: 2001-10-16

SEQ ID NO: 10479 - DNA, 168 bp, Homo sapiens
  ref <308>: DATABASE ACCESSION NUMBER: EMBL / M24743
  ref <309>: DATABASE ENTRY DATE: 2000-03-04
cagtgttccgtttccagcccccaatctcagagcggagccgacagagagcagggaaccggcatggccaaagccgcggcgatcggcatcgacctgggcaccacctactcctgcgtgggggtgttccaacacggcaaggtggagatcatcgccaacgaccagggcaaccgc

SEQ ID NO: 10480 - DNA, 5721 bp, Rattus norvegicus
  ref <308>: DATABASE ACCESSION NUMBER: EMBL / Z78279
  ref <309>: DATABASE ENTRY DATE: 2002-02-18
atgttcagctttgtggacctccggctcctgctcctcttaggggccactgccctcctgacgcatggccaagaagacatccctgaagtcagctgcatacacaatggcctaagggtccctaatggtgagacgtggaaacctgatgtatgcttgatctgtatctgccacaatggcacggctgtgtgcgatggcgtgctatgcaaagaagacttggactgtcccaacccccaaaaacgggagggcgagtgctgtcctttctgcccagaagaatatgtatcaccagacgcagaagtcataggagtcgagggacccaagggagaccctggcccccaaggcccaaggggacctgttggcccccctggacaagatggcatccctggacagcctggacttcctggtcctcctggtccccccggcccccccggaccccttggtcttggaggaaactttgcttcccagatgtcctatggctatgatgagaaatcagctggagtttccgtgcctggccccatgggtccttctggtcctcgtggtctccctggcccccctggtgcacctggtcctcaaggtttccaaggcccccctggtgaacctggcgagcctggcggttcaggtccaatgggtcccccaggtccccctggccctcctggcaagaacggagatgatggggaagctggtaagcctggccgccctggtgagcgtggacctcctggacctcagggtgctcgtggattgcctggaacagctggcctccccggaatgaagggacacagaggtttcagtggtttggatggtgccaaaggagatactggtcctgctggtcctaagggagagcctggcagtcctggtgaaaatggaactcccggccagatgggtccccgaggtctgcctggtgagagaggtcgccctggaccccctggcactgctggtgctcgtggtaacgatggtgctgtcggtgcagctgggccccccggtcccaccggccctactggccctcctggcttccctggtgcagctggtgctaagggtgaagctggtccccagggagcccgaggctctgaaggtccccagggtgtgcgtggtgagcccggaccccctggccctgctggtgctgctggtcctgctggaaaccctggtgctgatggacaacctggtgctaaaggtgccaatggtgctcctggtattgctggtgctcctggcttccctggtgcccgaggcccctctggacctcagggccccagcggcgctcctggtcccaagggaaccagtggtgaacctggtgcccctggcaacaaaggagacactggtgccaaaggagaacccggccctgctggagttcaaggtccccctggccctgctggagaagaaggaaaacgaggagcccgtggtgagcctggacctagcggcctgcccggacctcctggcgagcgcggtggacctggtagccgtggtttccctggtgctgatggtgttgctggccccaagggtccttctggtgaacgtggttctcctggccctgctggtcccaaaggttctcctggtgaagctggtcgccctggtgaagctggtctccctggtgccaagggtctcactggcagtcctggcagccctggtcctgatggcaaaaccggcccccctggtcccgctggtcaagatggtcgccctggacccgcaggtcctcctggagcccgtggacaggctggtgtgatgggattccctggacctaagggtactgctggagaacctggaaaggctggagagcgaggtgtccccggaccccctggcgctgttggtcccgctggcaaagatggcgaagctggagctcaaggagcccccggccctgctggtcctgctggtgagagaggtgaacaaggtcccgctggctcccctggattccagggtcttcctggtcccgctggtcctcctggtgaagcaggcaagcctggtgaacagggtgttcctggagaccttggtgcccctggaccctctggcgcaagaggcgagagaggtttccctggtgaacgtggtgtacaaggtcccccaggtcctgctggtccccgaggaaacaatggtgcccccggcaacgatggtgccaagggtgatactggtgcccccggagctcctggtagccagggtgcccccggtcttcagggaatgcctggtgaacgtggtgcagctggtcttccaggtcctaagggtgacagaggtgatgctggtcccaaaggtgctgatggttctcctggcaaagatggcgtccgtggtctgactggtcccattggtcctcctggccctgctggtgcccctggtgacaagggtgaagctggtcccagtggtcctgctggccccaccggagcccgtggtgcccccggagaccgtggtgaggctggtccccctggtcctgctggcttcgctggcccccctggtgctgatggccaacctggtgcgaaaggtgaacctggtgatactggtgtgaaaggtgacgctggtcctcctggccctgctggtcccgctggaccccctggccccattggtaacgttggtgctcctggacccaaaggttctcgtggtgctgctggtccccctggtgctactggtttccctggtgctgctggtcgtgttggtccccctggtccctctggaaatgctggaccccctggccctcccggtcccgttggcaaagaagggggcaaaggtccccgtggtgagactggtcccgctggacgtcctggtgaagttggtcccccaggtccccctggccctgctggtgagaaaggatctcctggtgctgatggacctgctggctctcctggtacccctggacctcagggtattgctggacagcgtggtgtggtcggtcttcccggtcagagaggaaaaagaggcttccctggtcttcctggaccctctggtgaacccggcaaacaaggtccttctggagcaagtggtgaacgtggtccccctggccctatgggcccccctggattggctggcccccctggtgaatctggtcgtgagggatcccctggtgctgaaggctcccctggaagagatggtgctcctggtgccaagggtgaccgtggtgagactggccctgctggcccccctggtgctcctggtgctcctggtgctcccggccctgttggtcctgctggcaagaatggcgaccgtggtgagactggtcctgctggtcctgctggtcccattggccctgctggtgcccgtggtcctgctggaccccaaggcccccgtggtgacaagggtgagacaggcgaacaaggtgacagaggcataaagggtcatcgtggcttctctggtctccagggtcctcctggctctcctggctctcctggtgaacaaggcccctctggagcttctggtcctgcaggtccccggggtccccctggctctgctggttctcctggcaaagatggactcaacggtctccctggccccattggtccccctggtcctcgaggtcgcactggcgatagtggtcctgctggtccccccggacctcctggaccccctggccctcccggtcctcccagcggtggttatgacttcagcttcctgcctcagccacctcaagagaagtctcaagatggtggccgttactaccgggccgatgatgccaacgtggtccgtgaccgtgaccttgaggtggacactaccctcaagagcctgagccagcagattgagaacatccgcagccctgagggcagccgcaagaaccccgcccgcacatgccgtgacctcaagatgtgccactctgactggaagagcggagagtactggatcgaccctaaccaaggctgcaacctggatgccatcaaggtctactgcaacatggagacaggtcagacctgtgtgttccccactcagccctctgtgcctcagaagaactggtacatcagcccaaaccccaaggagaaaaagcatgtctggtttggagagagcatgaccgatggattccagttcgagtatggaagcgaaggttccgatcctgccgatgtcgctatccagctgaccttcctgcgcctgatgtccaccgaggcctcccagaacatcacctatcactgcaagaacagcgtagcctacatggaccaacagactggcaacctcaagaagtccctgctcctccagggctccaacgagatcgagctcaggggcgaaggcaacagtcgattcacctacagcacgcttgtggatggctgcacgagtcacaccggaacttggggcaagacagtcatcgaatacaaaaccaccaagacctcccgcctgcccatcatcgatgtggctcccttggacattggtgccccagaccaggaattcggaatggacattggccctgcctgcttcgtgtaaactccctccatcccaatctggttccctcccacccagcccactttcccccaaccctggaaacagaccaacaacccaaactcaatttccccaaaagccaaaaattgggagacaatttcacatggactttggaaaacatttttttcctttgcattcatctctcaaacttagtttttatctttgaccaactgaacgtgaccaaaaaccaaaagtgcattcaaccttaccaaaaagaaaaaaaaataagaataaataaataactttttaaaaaaggaagcttggtcctcttgcttgaagacctatgtgggtataagtccctttctgcccactgggcttatgataccccaaatgctgccttttctgttcctttctccaccccctcttggggcctctcctccattgctccccaaatttaagtctcccccaaagacacaggaaataatgcattgtctgcccagccagcaaaggcaatgctgaatcgtcccaccagcccctcaacccccagcttacttccctacccagcaccttcaaatcctgccgggacattgggttctcggactattgaaggagcctaaccatctggcatctccatggcctctgcaacaaatccccacacacactttgtttttgagggcctgtgctgggggagccacctgcccctcgcaggggtttggagccaggcagggtcacagcagactggaaacatcggccacacatgtgcaggctgggtgggagagactgttctgttccttgtgtaattgtgttgctgaaagactacctcgttcttgtctttgtgtgtcaccggggcaactgtgtgggggcggggatgggggcagggtggcatcgcgcccagtttggtatcaaaggtgctacatctctgtgaaggggtggggtgggaaggaatttctggtgctatagaatctgagatgctcccctacaccagcaaatgttccttttgttcaaagtatttttttattctttttttttttttaatggatagggacttgtgtgaattttcttttcctgacggtgctatttaacaagggaggagagagtgccaactccagcctgctctctctctacccccctcttcactcttccagctcctgggcctatctgatgatctctctctcttctgaaaccctcccctcttgctgctgctccctaccctcagcttctctctctctctgtcctgcatcagggtttcagagcaccattttccaaagcacaaagcagtttttatccctggggtgggaggaagcaagagactctgtacctattttgtatgtgtataataatttgagatgtttttaattattttgattgctggcataaagcagggggaaatgatccagtccacag

SEQ ID NO: 10481 - protein, 1453 aa, Rattus norvegicus
  ref <308>: DATABASE ACCESSION NUMBER: SWISS-Prot / CAB01633
  ref <309>: DATABASE ENTRY DATE: 2002-10-01
MFSFVDLRLLLLLGATALLTHGQEDIPEVSCIHNGLRVPNGETWKPDVCLICICHNGTAVCDGVLCKEDLDCPNPQKREGECCPFCPEEYVSPDAEVIGVEGPKGDPGPQGPRGPVGPPGQDGIPGQPGLPGPPGPPGPPGPLGLGGNFASQMSYGYDEKSAGVSVPGPMGPSGPRGLPGPPGAPGPQGFQGPPGEPGEPGGSGPMGPPGPPGPPGKNGDDGEAGKPGRPGERGPPGPQGARGLPGTAGLPGMKGHRGFSGLDGAKGDTGPAGPKGEPGSPGENGTPGQMGPRGLPGERGRPGPPGTAGARGNDGAVGAAGPPGPTGPTGPPGFPGAAGAKGEAGPQGARGSEGPQGVRGEPGPPGPAGAAGPAGNPGADGQPGAKGANGAPGIAGAPGFPGARGPSGPQGPSGAPGPKGTSGEPGAPGNKGDTGAKGEPGPAGVQGPPGPAGEEGKRGARGEPGPSGLPGPPGERGGPGSRGFPGADGVAGPKGPSGERGSPGPAGPKGSPGEAGRPGEAGLPGAKGLTGSPGSPGPDGKTGPPGPAGQDGRPGPAGPPGARGQAGVMGFPGPKGTAGEPGKAGERGVPGPPGAVGPAGKDGEAGAQGAPGPAGPAGERGEQGPAGSPGFQGLPGPAGPPGEAGKPGEQGVPGDLGAPGPSGARGERGFPGERGVQGPPGPAGPRGNNGAPGNDGAKGDTGAPGAPGSQGAPGLQGMPGERGAAGLPGPKGDRGDAGPKGADGSPGKDGVRGLTGPIGPPGPAGAPGDKGEAGPSGPAGPTGARGAPGDRGEAGPPGPAGFAGPPGADGQPGAKGEPGDTGVKGDAGPPGPAGPAGPPGPIGNVGAPGPKGSRGAAGPPGATGFPGAAGRVGPPGPSGNAGPPGPPGPVGKEGGKGPRGETGPAGRPGEVGPPGPPGPAGEKGSPGADGPAGSPGTPGPQGIAGQRGVVGLPGQRGKRGFPGLPGPSGEPGKQGPSGASGERGPPGPMGPPGLAGPPGESGREGSPGAEGSPGRDGAPGAKGDRGETGPAGPPGAPGAPGAPGPVGPAGKNGDRGETGPAGPAGPIGPAGARGPAGPQGPRGDKGETGEQGDRGIKGHRGFSGLQGPPGSPGSPGEQGPSGASGPAGPRGPPGSAGSPGKDGLNGLPGPIGPPGPRGRTGDSGPAGPPGPPGPPGPPGPPSGGYDFSFLPQPPQEKSQDGGRYYRADDANVVRDRDLEVDTTLKSLSQQIENIRSPEGSRKNPARTCRDLKMCHSDWKSGEYWIDPNQGCNLDAIKVYCNMETGQTCVFPTQPSVPQKNWYISPNPKEKKHVWFGESMTDGFQFEYGSEGSDPADVAIQLTFLRLMSTEASQNITYHCKNSVAYMDQQTGNLKKSLLLQGSNEIELRGEGNSRFTYSTLVDGCTSHTGTWGKTVIEYKTTKTSRLPIIDVAPLDIGAPDQEFGMDIGPACFV

SEQ ID NO: 10482 - DNA, 189 bp, Homo sapiens
  ref <308>: DATABASE ACCESSION NUMBER: EMBL / Y15916
  ref <309>: DATABASE ENTRY DATE: 1998-07-02
agggcctaagggtgacagaggtgatgctggtcccaaaggtgctgatggctctcctggcaaagatggcgtccgtggtctgaccggccccattggtcctcctggccctgctggtgcccctggtgacaagggggaccccattcccgaggagctttatgagatgctgagtgaccactcgatccgctcctttga

SEQ ID NO: 10483 - protein, 1464 aa, Homo sapiens
  ref <308>: DATABASE ACCESSION NUMBER: SWISS-Prot / P02452
  ref <309>: DATABASE ENTRY DATE: 2002-06-15
MFSFVDLRLLLLLAATALLTHGQEEGQVEGQDEDIPPITCVQNGLRYHDRDVWKPEPCRICVCDNGKVLCDDVICDETKNCPGAEVPEGECCPVCPDGSESPTDQETTGVEGPKGDTGPRGPRGPAGPPGRDGIPGQPGLPGPPGPPGPPGPPGLGGNFAPQLSYGYDEKSTGGISVPGPMGPSGPRGLPGPPGAPGPQGFQGPPGEPGEPGASGPMGPRGPPGPPGKNGDDGEAGKPGRPGERGPPGPQGARGLPGTAGLPGMKGHRGFSGLDGAKGDAGPAGPKGEPGSPGENGAPGQMGPRGLPGERGRPGAPGPAGARGNDGATGAAGPPGPTGPAGPPGFPGAVGAKGEAGPQGPRGSEGPQGVRGEPGPPGPAGAAGPAGNPGADGQPGAKGANGAPGIAGAPGFPGARGPSGPQGPGGPPGPKGNSGEPGAPGSKGDTGAKGEPGPVGVQGPPGPAGEEGKRGARGEPGPTGLPGPPGERGGPGSRGFPGADGVAGPKGPAGERGSPGPAGPKGSPGEAGRPGEAGLPGAKGLTGSPGSPGPDGKTGPPGPAGQDGRPGPPGPPGARGQAGVMGFPGPKGAAGEPGKAGERGVPGPPGAVGPAGKDGEAGAQGPPGPAGPAGERGEQGPAGSPGFQGLPGPAGPPGEAGKPGEQGVPGDLGAPGPSGARGERGFPGERGVQGPPGPAGPRGANGAPGNDGAKGDAGAPGAPGSQGAPGLQGMPGERGAAGLPGPKGDRGDAGPKGADGSPGKDGVRGLTGPIGPPGPAGAPGDKGESGPSGPAGPTGARGAPGDRGEPGPPGPAGFAGPPGADGQPGAKGEPGDAGAKGDAGPPGPAGPAGPPGPIGNVGAPGAKGARGSAGPPGATGFPGAAGRVGPPGPSGNAGPPGPPGPAGKEGGKGPRGETGPAGRPGEVGPPGPPGPAGEKGSPGADGPAGAPGTPGPQGIAGQRGVVGLPGQRGERGFPGLPGPSGEPGKQGPSGASGERGPPGPMGPPGLAGPPGESGREGAPGAEGSPGRDGSPGAKGDRGETGPAGPPGAPGAPGAPGPVGPAGKSGDRGETGPAGPAGPVGPAGARGPAGPQGPRGDKGETGEQGDRGIKGHRGFSGLQGPPGPPGSPGEQGPSGASGPAGPRGPPGSAGAPGKDGLNGLPGPIGPPGPRGRTGDAGPVGPPGPPGPPGPPGPPSAGFDFSFLPQPPQEKAHDGGRYYRADDANVVRDRDLEVDTTLKSLSQQIENIRSPEGSRKNPARTCRDLKMCHSDWKSGEYWIDPNQGCNLDAIKVFCNMETGETCVYPTQPSVAQKNWYISKNPKDKRHVWFGESMTDGFQFEYGGQGSDPADVAIQLTFLRLMSTEASQNITYHCKNSVAYMDQQTGNLKKALLLKGSNEIEIRAEGNSRFTYSVTVDGCTSHTGAWGKTVIEYKTTKTSRLPIIDVAPLDVGAPDQEFGFDVGPVCFL

SEQ ID NO: 10484 - DNA, 5721 bp, Rattus norvegicus; identical to SEQ ID NO: 10480
  ref <308>: DATABASE ACCESSION NUMBER: EMBL / Z78279
  ref <309>: DATABASE ENTRY DATE: 2002-02-18

SEQ ID NO: 10485 - protein, 1453 aa, Rattus norvegicus; identical to SEQ ID NO: 10481
  ref <308>: DATABASE ACCESSION NUMBER: SWISS-Prot / CAB01633
  ref <309>: DATABASE ENTRY DATE: 2002-10-01

SEQ ID NO: 10486 - DNA, 189 bp, Homo sapiens; identical to SEQ ID NO: 10482
  ref <308>: DATABASE ACCESSION NUMBER: EMBL / Y15916
  ref <309>: DATABASE ENTRY DATE: 1998-07-02

SEQ ID NO: 10487 - protein, 1464 aa, Homo sapiens; identical to SEQ ID NO: 10483
  ref <308>: DATABASE ACCESSION NUMBER: SWISS-Prot / P02452
  ref <309>: DATABASE ENTRY DATE: 2002-06-15

SEQ ID NO: 10488 - DNA, 5721 bp, Rattus norvegicus; identical to SEQ ID NO: 10480
  ref <308>: DATABASE ACCESSION NUMBER: EMBL / Z78279
  ref <309>: DATABASE ENTRY DATE: 2002-02-18

SEQ ID NO: 10489 - protein, 1453 aa, Rattus norvegicus; identical to SEQ ID NO: 10481
  ref <308>: DATABASE ACCESSION NUMBER: SWISS-Prot / CAB01633
  ref <309>: DATABASE ENTRY DATE: 2002-10-01

SEQ ID NO: 10490 - DNA, 189 bp, Homo sapiens; identical to SEQ ID NO: 10482
  ref <308>: DATABASE ACCESSION NUMBER: EMBL / Y15916
  ref <309>: DATABASE ENTRY DATE: 1998-07-02

SEQ ID NO: 10491 - protein, 1464 aa, Homo sapiens; identical to SEQ ID NO: 10483
  ref <308>: DATABASE ACCESSION NUMBER: SWISS-Prot / P02452
  ref <309>: DATABASE ENTRY DATE: 2002-06-15

SEQ ID NO: 10492 - DNA, 1121 bp, Rattus norvegicus
  ref <308>: DATABASE ACCESSION NUMBER: EMBL / Z83757
  ref <309>: DATABASE ENTRY DATE: 1997-04-09
ggactccataccctttcctatctttaatggcaaaagaaatgactgggcacgaacgcctaaaccaaaactatgttttaaatctgtgttgggagagcgtgagagtgaatgtggattcaaaaataccttttctggaaacgtcgaaacattatcataacgtggaaaatcaagaatatgtaatcagatagatactcccattgtgaattttaaatattttaaagaatcgtctttaagactgtttagtggcagtgattgtctgtgctgtgggtcttaacttgtgatactaagtattaaatagctacgtttttcatgtatgtagatcatgcttttttgaaaaagcaaaacaatcaggtggcttttgcagttcaggaaattgaatgcagattttagcacagactgatttctttttcctttttaaatagctaggagctaaaactctaggggagaaggtaaaactagtttggatatgcaaaacatttattttgacataaaattgataaagatatttttaataatttacactgtaagcatgagtattttataatacactacagatatattgttagttcataacaatccatctacggatgtaacaactacaatgtgtagaggggttgatgctttggtcaatgaacctaaagaaaaatgaacaagttagatttttacaaagcccttttttataactcccaaaatttcttaaatctaaaaatgtctgcattattggaacaaacccattttaaatttgtaaatgaatattttttttaattttgaaaactttaattttttatacaaattaacgtatcatacaccaaacagtaacagaagtgattataataatggaagaaacagtttcttcaccaaatttccattcaagccacaaggctgtgtgtaagagaagtagaagtgatgtggtgtgactggctaggataaaggagatcttcaggagcacatgggtttagagagcccagggatcaggaaaaggaggctctcacatctgagcagtgctgtcctttcaaacacagcttggcttttatagtaacctaagaattaatgcatacaggaggagtttcacatgtgtgaaatccaatagcagatgggttaaagttaaacaagttatagcacag

SEQ ID NO: 10493 - protein, 638 aa, Rattus norvegicus
  ref <308>: DATABASE ACCESSION NUMBER: SWISS-Prot / P16310
  ref <309>: DATABASE ENTRY DATE: 1995-11-01
MDLWRVFLTLALAVSSDMFPGSGATPATLGKASPVLQRINPSLRESSSGKPRFTKCRSPELETFSCYWTEGDDHNLKVPGSIQLYYARRIAHEWTPEWKECPDYVSAGANSCYFNSSYTSIWIPYCIKLTTNGDLLDEKCFTVDEIVQPDPPIGLNWTLLNISLPGIRGDIQVSWQPPPSADVLKGWIILEYEIQYKEVNETKWKTMSPIWSTSVPLYSLRLDKEHEVRVRSRQRSFEKYSEFSEVLRVTFPQMDTLAACEEDFRFPWFLIIIFGIFGVAVMLFVVIFSKQQRIKMLILPPVPVPKIKGIDPDLLKEGKLEEVNTILGIHDNYKPDFYNDDSWVEFIELDIDDADEKTEESDTDRLLSDDQEKSAGILGAKDDDSGRTSCYDPDILDTDFHTSDMCDGTSEFAQPQKLKAEADLLCLDQKNLKNSPYDASLGSLHPSITLTMEDKPQPLLGSETESTHQLPSTPMSSPVSLANIDFYAQVSDITPAGGVVLSPGQKIKAGLAQGNTQLEVAAPCQENYSMNSAYFCESDAKKCIAAAPHMEATTCVKPSFNQEDIYITTESLTTTARMSETADTAPDAEPVPDYTTVHTVKSPRGLILNATALPLPDKKKFLSSCGYVSTDQLNKIMQ

SEQ ID NO: 10494 - DNA, 4414 bp, Homo sapiens
  ref <308>: DATABASE ACCESSION NUMBER: EMBL / X06562
  ref <309>: DATABASE ENTRY DATE: 1997-08-27
ccgcgctctctgatcagaggcgaagctcggaggtcctacaggtatggatctctggcagctgctgttgaccttggcactggcaggatcaagtgatgctttttctggaagtgaggccacagcagctatccttagcagagcaccctggagtctgcaaagtgttaatccaggcctaaagacaaattcttctaaggagcctaaattcaccaagtgccgttcacctgagcgagagactttttcatgccactggacagatgaggttcatcatggtacaaagaacctaggacccatacagctgttctataccagaaggaacactcaagaatggactcaagaatggaaagaatgccctgattatgtttctgctggggaaaacagctgttactttaattcatcgtttacctccatctggataccttattgtatcaagctaactagcaatggtggtacagtggatgaaaagtgtttctctgttgatgaaatagtgcaaccagatccacccattgccctcaactggactttactgaacgtcagtttaactgggattcatgcagatatccaagtgagatgggaagcaccacgcaatgcagatattcagaaaggatggatggttctggagtatgaacttcaatacaaagaagtaaatgaaactaaatggaaaatgatggaccctatattgacaacatcagttccagtgtactcattgaaagtggataaggaatatgaagtgcgtgtgagatccaaacaacgaaactctggaaattatggcgagttcagtgaggtgctctatgtaacacttcctcagatgagccaatttacatgtgaagaagatttctactttccatggctcttaattattatctttggaatatttgggctaacagtgatgctatttgtattcttattttctaaacagcaaaggattaaaatgctgattctgcccccagttccagttccaaagattaaaggaatcgatccagatctcctcaaggaaggaaaattagaggaggtgaacacaatcttagccattcatgatagctataaacccgaattccacagtgatgactcttgggttgaatttattgagctagatattgatgagccagatgaaaagactgaggaatcagacacagacagacttctaagcagtgaccatgagaaatcacatagtaacctaggggtgaaggatggcgactctggacgtaccagctgttgtgaacctgacattctggagactgatttcaatgccaatgacatacatgagggtacctcagaggttgctcagccacagaggttaaaaggggaagcagatctcttatgccttgaccagaagaatcaaaataactcaccttatcatgatgcttgccctgctactcagcagcccagtgttatccaagcagagaaaaacaaaccacaaccacttcctactgaaggagctgagtcaactcaccaagctgcccatattcagctaagcaatccaagttcactgtcaaacatcgacttttatgcccaggtgagcgacattacaccagcaggtagtgtggtcctttccccgggccaaaagaataaggcagggatgtcccaatgtgacatgcacccggaaatggtctcactctgccaagaaaacttccttatggacaatgcctacttctgtgaggcagatgccaaaaagtgcatccctgtggctcctcacatcaaggttgaatcacacatacagccaagcttaaaccaagaggacatttacatcaccacagaaagccttaccactgctgctgggaggcctgggacaggagaacatgttccaggttctgagatgcctgtcccagactatacctccattcatatagtacagtccccacagggcctcatactcaatgcgactgccttgcccttgcctgacaaagagtttctctcatcatgtggctatgtgagcacagaccaactgaacaaaatcatgccttagcctttctttggtttcccaagagctacgtatttaatagcaaagaattgactggggcaataacgtttaagccaaaacaatgtttaaaccttttttgggggagtgacaggatggggtatggattctaaaatgccttttcccaaaatgttgaaatatgatgttaaaaaaataagaagaatgcttaatcagatagatattcctattgtgcaatgtaaatattttaaagaattgtgtcagactgtttagtagcagtgattgtcttaatattgtgggtgttaatttttgatactaagcattgaatggctatgtttttaatgtatagtaaatcacgctttttgaaaaagcgaaaaaatcaggtggcttttgcggttcaggaaaattgaatgcaaaccatagcacaggctaattttttgttgtttcttaaataagaaacttttttatttaaaaaactaaaaactagaggtgagaaatttaaactataagcaagaaggcaaaaatagtttggatatgtaaaacatttactttgacataaagttgataaagattttttaataatttagacttcaagcatggctattttatattacactacacactgtgtactgcagttggtatgacccctctaaggagtgtagcaactacagtctaaagctggtttaatgttttggccaatgcacctaaagaaaaacaaactcgttttttacaaagcccttttatacctccccagactccttcaacaattctaaaatgattgtagtaatctgcattattggaatataattgttttatctgaatttttaaacaagtatttgttaatttagaaaactttaaagcgtttgcacagatcaacttaccaggcaccaaaagaagtaaaagcaaaaaagaaaacctttcttcaccaaatcttggttgatgccaaaaaaaaatacatgctaagagaagtagaaatcatagctggttcacactgaccaagatacttaagtgctgcaattgcacgcggagtgagttttttagtgcgtgcagatggtgagagataagatctatagcctctgcagcggaatctgttcacacccaacttggttttgctacataattatccaggaagggaataaggtacaagaagcattttgtaagttgaagcaaatcgaatgaaattaactgggtaatgaaacaaagagttcaagaaataagtttttgtttcacagcctataaccagacacatactcatttttcatgataatgaacagaacatagacagaagaaacaaggttttcagtccccacagataactgaaaattatttaaaccgctaaaagaaactttctttctcactaaatcttttataggatttatttaaaatagcaaaagaagaagtttcatcattttttacttcctctctgagtggactggcctcaaagcaagcattcagaagaaaaagaagcaacctcagtaatttagaaatcattttgcaatcccttaatatcctaaacatcattcatttttgttgttgttgttgttgttgagacagagtctcgctctgtcgccaggctagagtgcggtggcgcgatcttgactcactgcaatctccacctcccacaggttcaggcgattcccgtgcctcagcctcctgagtagctgggactacaggcacgcaccaccatgccaggctaatttttttgtattttagcagagacggggtttcaccatgttggccaggatggtctcgagtctcctgacctcgtgatccacccgactcggcctcccaaagtgctgggattacaggtgtaagccaccgtgcccagccctaaacatcattcttgagagcattgggatatctcctgaaaaggtttatgaaaaagaagaatctcatctcagtgaagaatacttctcattttttaaaaaagcttaaaactttgaagttagctttaacttaaatagtatttcccatttatcgcagaccttttttaggaagcaagcttaatggctgataattttaaattctctctcttgcaggaaggactatgaaaagctagaattgagtgtttaaagttcaacatgttatttgtaatagatgtttgatagattttctgctactttgctgctatggttttctccaagagctacataatttagtttcatataaagtatcatcagtgtagaacctaattcaattcaaagctgtgtgtttggaagactatcttactatttcacaacagcctgacaacatttctatagccaaaaatagctaaatacctcaatcagtctcagaatgtcattttggtactttggtggccacataagccattattcactagtatgactagttgtgtctggcagtttatatttaactctctttatgtctgtggattttttccttcaaagtttaataaatttattttcttggattcctgataatgtgcttctgttatcaaacaccaacataaaaatgatctaaacc

SEQ ID NO: 10495 - protein, 638 aa, Homo sapiens
  ref <308>: DATABASE ACCESSION NUMBER: SWISS-Prot / P10912
  ref <309>: DATABASE ENTRY DATE: 2002-06-15
MDLWQLLLTLALAGSSDAFSGSEATAAILSRAPWSLQSVNPGLKTNSSKEPKFTKCRSPERETFSCHWTDEVHHGTKNLGPIQLFYTRRNTQEWTQEWKECPDYVSAGENSCYFNSSFTSIWIPYCIKLTSNGGTVDEKCFSVDEIVQPDPPIALNWTLLNVSLTGIHADIQVRWEAPRNADIQKGWMVLEYELQYKEVNETKWKMMDPILTTSVPVYSLKVDKEYEVRVRSKQRNSGNYGEFSEVLYVTLPQMSQFTCEEDFYFPWLLIIIFGIFGLTVMLFVFLFSKQQRIKMLILPPVPVPKIKGIDPDLLKEGKLEEVNTILAIHDSYKPEFHSDDSWVEFIELDIDEPDEKTEESDTDRLLSSDHEKSHSNLGVKDGDSGRTSCCEPDILETDFNANDIHEGTSEVAQPQRLKGEADLLCLDQKNQNNSPYHDACPATQQPSVIQAEKNKPQPLPTEGAESTHQAAHIQLSNPSSLSNIDFYAQVSDITPAGSVVLSPGQKNKAGMSQCDMHPEMVSLCQENFLMDNAYFCEADAKKCIPVAPHIKVESHIQPSLNQEDIYITTESLTTAAGRPGTGEHVPGSEMPVPDYTSIHIVQSPQGLILNATALPLPDKEFLSSCGYVSTDQLNKIMP

SEQ ID NO: 10496 - DNA, 1121 bp, Rattus norvegicus; identical to SEQ ID NO: 10492
  ref <308>: DATABASE ACCESSION NUMBER: EMBL / Z83757
  ref <309>: DATABASE ENTRY DATE: 1997-04-09

SEQ ID NO: 10497 - protein, 638 aa, Rattus norvegicus; identical to SEQ ID NO: 10493
  ref <308>: DATABASE ACCESSION NUMBER: SWISS-Prot / P16310
  ref <309>: DATABASE ENTRY DATE: 1995-11-01

SEQ ID NO: 10498 - DNA, 4414 bp, Homo sapiens; identical to SEQ ID NO: 10494
  ref <308>: DATABASE ACCESSION NUMBER: EMBL / X06562
  ref <309>: DATABASE ENTRY DATE: 1997-08-27

SEQ ID NO: 10499 - protein, 638 aa, Homo sapiens; identical to SEQ ID NO: 10495
  ref <308>: DATABASE ACCESSION NUMBER: SWISS-Prot / P10912
  ref <309>: DATABASE ENTRY DATE: 2002-06-15

SEQ ID NO: 10500 - DNA, 3889 bp, Rattus norvegicus
  ref <308>: DATABASE ACCESSION NUMBER: EMBL / Z96106
  ref <309>: DATABASE ENTRY DATE: 1998-07-17
atgccggtgcggaggggccacgtcgcgccgcagaacaccttcctcgacaccatcatccgcaagtttgagggccagagccgcaagttcatcatcgctaacgctcgtgtagagaactgcgccgtcatctactgcaacgacggcttctgcgaactgtgcggctactctcgggccgaggtgatgcagcggccctgcacctgcgatttcctgcatgggccgcgcacgcagcgccgtgccgccgcgcagatcgcgcaggccctgctgggcgcggaggagcgcaaagtggagatcgccttctaccggaaagatgggagctgcttcctgtgtttggtggatgtggtgcccgtgaagaatgaggatggggctgtcatcatgtttatcctcaactttgaagtggtgatggagaaggacatggtagggtcgccagctcatgacaccaatcacagggggccctctaccagctggctagcttctggccgggccaagaccttccgcctgaagctgcctgccttgttggcactgactgccagggaatcgcccatgcggacaggaagcacgggcagtcctggagcccccggggcagtggtggtggatgtggacctgacgccggcagcacccagcagtgagtccctggccttggatgaggtttctgccatggacaaccatgtggctggacttgggcctgcagaagagaggcgagcactggtgggcccagcgtctgcttcaccggtagccagcatcccaggccctcacccgtcccctcgagctcagagccttaaccctgacgcctctggttccagctgcagtctggcccgaacacgctcacgggagagctgcgctagtgtgcgccgggcgtcttccgcagatgacatcgaggcaatgcgggctggggcgctgcccctcccgccccgacatgctagtacaggggccatgcaccccctgcgcagtggcctgcttaactccacctcagactctgacctcgtgcgctaccgaaccattagcaagataccccaaatcaccctcaactttgtggacctcaaaggcgaccctttcctggcttcacccaccagtgaccgggaaatcatagcacccaagataaaagagcggacccacaatgtcaccgagaaggtcacccaggtcctgtccttgggagccgatgtgcttcctgaatataagctgcaggccccaagaatacaccgctggaccatcctacactacagccccttcaaggcagtgtgggactggctcattctgctgctggtcatctacacagccgtcttcacaccgtactcggctgccttcctgctgaaggagactgaagatgggtcccaagcccctgactgcggctatgcctgccagcctctggctgtagtggacctcctcgtggacatcatgttcattgtggacatccttatcaatttccgcaccacctacgttaacgccaatgaagaggtggtcagccatcctggccgcatcgctgtgcactacttcaagggctggttcctcatcgacatggtggctgccatccccttcgacctgctcatctttggctctggctctgaggagctcatcggactgctgaaaactgccaggctgctgcggctggtgcgagtggctcggaagctggaccgctactcggagtatggggcagcagtgctcttcctgctcatgtgcaccttcgcgctcattgcacactggttggcctgcatctggtacgccatcggcaacatggaacagcctcacatggactcacacattggctggctgcacaacttgggcgaccagatcggcaagccctacaacagcagcggcctgggaggcccctccatcaaggacaagtacgtcacagcgctctacttcaccttcagcagcctcaccagcgtgggctttggcaatgtctctcccaacaccaactcagaaaagatcttctccatctgtgtcatgctcattggctccctcatgtatgccagcatcttcggcaacgtgtccgccatcatccagcggctgtactcgggcacggcccgctaccacacacagatgctccgggtgcgggagtttatccgcttccatcagattcccaacccgctacgccagcgcctcgaggagtacttccagcacgcttggtcctacaccaacggcatcgacatgaatgcggtgctgaagggtttccccgagtgcctgcaggctgacatctgcctacatctaaaccgctcactgctgcagcactgcaaaccattccgaggggccactaaaggctgcctgagggccctggccatgaaattcaagaccacacatgcgccaccaggggacacgctggtgcacgctggggacctgcttactgccctctacttcatctccaggggctccatcgagatcctgcggggtgatgtcgtggtggccatcttggggaagaacgacatctttggagagcctctgaacctgtatgcacgtcctgggaagtccaatggggatgtgagggccctcacttactgtgacctgcacaagatccatcgagacgatctgctggaggtgttggacatgtaccccgagttctcagaccacttttggtctagcctggagatcaccttcaaccttcgagataccaacatgattcctggctcccccagcagtgcggaactagagagcggcttcaacaggcagcgaaagcgcaaactgtccttccgcaggcgtactgacaaggacacagagcagccaggggaggtgtcagccctggggcaaggccctgcccgagttgggccagggccgagttgccggggacagccgggagggccatggggggagagcccatccagtggcccttccagcccagagagcagtgaggatgagggcccaggtcgcagctccagccccctccgcctggtgcccttctccagccccaggcctcccggagactccccaggtggggagcctttgacagaggatggagagaaaagcagtgacacttgtaatcccctgtcaggtgccttctctggggtgtccaatattttcagcttctggggggacagtcgggggcgccagtaccaggagctgcctcgatgccctgccccggcccctagcctcctcaacatccccttgtctagccctggccggcgttcccggggtgacgtggagagcaggctggatgcactccagagacagctgaacaggctggaaacccggctaagtgcagacatggccactgtcctacagctgctacagaggcaaatgaccctggtccctcctgcctacagtgctgtgaccacccctgggcctggccccacttccacgtcccctttgttgcctgtcggccccgtccccactctcaccctggactcgctttctcaggtttcccagttcgtggcgtttgaggagcttcctgcaggagccccagagctcccccaagatggccccactcgacgcctctccctgccgggccagctgggggccctcacctcccagcccctgcacagacatggctcagatccaggcagttagtgacgctgcccggtgtggacacgtggctcaccctggggtcaggggattacctgaccgctctccttggagaccctggtttgaaggggagaacagtgcaggagcacctcctcccccgcccttgggaccagcatctcctcctgcaataccctgggccccactgggaggggcaggggcagagctgggcagtggacagggggtctgtggtccccccactgccctgggggcattagctggtctaactgcccggaggcacccggccctgggccttaggcacctcaaggacttttctgctatttactgctcttattgttaaggataataattaaggatcatatgaataattaatgaagatgctgatgactatgaataataaataattatcctgaggaaaaaaaaa

SEQ ID NO: 10501 - protein, 1163 aa, Rattus norvegicus
  ref <308>: DATABASE ACCESSION NUMBER: SWISS-Prot / CAB09536
  ref <309>: DATABASE ENTRY DATE: 2002-06-15
MPVRRGHVAPQNTFLDTIIRKFEGQSRKFIIANARVENCAVIYCNDGFCELCGYSRAEVMQRPCTCDFLHGPRTQRRAAAQIAQALLGAEERKVEIAFYRKDGSCFLCLVDVVPVKNEDGAVIMFILNFEVVMEKDMVGSPAHDTNHRGPSTSWLASGRAKTFRLKLPALLALTARESPMRTGSTGSPGAPGAVVVDVDLTPAAPSSESLALDEVSAMDNHVAGLGPAEERRALVGPASASPVASIPGPHPSPRAQSLNPDASGSSCSLARTRSRESCASVRRASSADDIEAMRAGALPLPPRHASTGAMHPLRSGLLNSTSDSDLVRYRTISKIPQITLNFVDLKGDPFLASPTSDREIIAPKIKERTHNVTEKVTQVLSLGADVLPEYKLQAPRIHRWTILHYSPFKAVWDWLILLLVIYTAVFTPYSAAFLLKETEDGSQAPDCGYACQPLAVVDLLVDIMFIVDILINFRTTYVNANEEVVSHPGRIAVHYFKGWFLIDMVAAIPFDLLIFGSGSEELIGLLKTARLLRLVRVARKLDRYSEYGAAVLFLLMCTFALIAHWLACIWYAIGNMEQPHMDSHIGWLHNLGDQIGKPYNSSGLGGPSIKDKYVTALYFTFSSLTSVGFGNVSPNTNSEKIFSICVMLIGSLMYASIFGNVSAIIQRLYSGTARYHTQMLRVREFIRFHQIPNPLRQRLEEYFQHAWSYTNGIDMNAVLKGFPECLQADICLHLNRSLLQHCKPFRGATKGCLRALAMKFKTTHAPPGDTLVHAGDLLTALYFISRGSIEILRGDVVVAILGKNDIFGEPLNLYARPGKSNGDVRALTYCDLHKIHRDDLLEVLDMYPEFSDHFWSSLEITFNLRDTNMIPGSPSSAELESGFNRQRKRKLSFRRRTDKDTEQPGEVSALGQGPARVGPGPSCRGQPGGPWGESPSSGPSSPESSEDEGPGRSSSPLRLVPFSSPRPPGDSPGGEPLTEDGEKSSDTCNPLSGAFSGVSNIFSFWGDSRGRQYQELPRCPAPAPSLLNIPLSSPGRRSRGDVESRLDALQRQLNRLETRLSADMATVLQLLQRQMTLVPPAYSAVTTPGPGPTSTSPLLPVGPVPTLTLDSLSQVSQFVAFEELPAGAPELPQDGPTRRLSLPGQLGALTSQPLHRHGSDPGS

SEQ ID NO: 10502 - DNA, 2730 bp, Rattus norvegicus
  ref <308>: DATABASE ACCESSION NUMBER: EMBL / AB000280
  ref <309>: DATABASE ENTRY DATE: 1997-06-20
accgggtccttagggaaccagccatggagggcgagcgggcgccgctgttaggttcgcggcgtgcggcggcagcagctggggtgtttgcggggcgtcgtgcggcgtgcggggcggtactgttggccgaactgctggagcgcgcggccttctacggcgtcacggccaacctagtgttattcttgaatggcgcgccgttcaactgggagggcgcgcaggccagccaggcactgctgctcttcatgggcctcacctacctgggatccccgttcgggggatggctcgctgacgcgcgactcggccgggcgcgcgccatcctgctcagcctggcgctctacctgctgggcatgctggccttcccgctgctggccgcgccccgctcgcgctcttttctctgcggggatccgcacccggagctggtgcgcaactgctcggctcccttccctaacggaacggcggtctgtcccgatgctgccgcgcgccgctgtgctcccgccaccttcgcgggtctagtgctcgtgggactcggtgtggccacggtcaaggccaacatcacaccctttggagcggatcaggtcaaagatcgaggtccagaggccactcggagatttttcaattggttttactggagcattaatttgggagcaatcctgtcattaggaggtattgcctatattcagcagaatgtgagctttctcacaggctacctgattcctacagtctgcgtggccattgctttcctggtcttcctctgtggccagagtgtcttcatcaccaagcctcctgatggcagtgccttcactgacatgttcaggattctgacctacagctgctgctcccagagaggagggcagcggagaagtggtgaaggccttggagtctttcagcaatcttctaaacacagtctgtttgattcatgtaagatgtcgcgtggagggccgttcacagaggacaaagtggaagacgtgaaagccctggtcaagattgtgcccgtgttcttggctctgattccttactggacagtgtatttccaaatgcagaccacatatgttttacagagtcttcatttgaagattccagaaatctcaagtatcaccaccacccatcacacgctgcctgcagcttggctcaccatgtttgatgcggtgctcatcctcctgctcatcccactgaaggacaagctagtggacccggtgctgaggagacacggcctgctcccatcctccctgaagaggattgccgtggggatgttcttcgtcacatgctctgcctttgctgcaggaatcctggagagtaaaaggctggacctggtgaaggagaagaccatcaaccagaccattggtggtgtggtctaccatgctgctgacctgcccatctggtggcagatcccacagtatgtgctcattggcatcagtgagatatttgcaagtatagcaggtctggagtttgcgtactcggctgcccccaagtccatgcagagtgccatcatgggactcttcttcttcttctctggcattgggtccttcgtgggctcaggactgctggccctggtgtctctcaaggccatcgggtggatgagcagtcatacagactttgggaacatcaacagctgccacctgcattactacttcttcctgctggccgccatccagggagctacgctgctgctcttcctcattgtgtctgtgaagtacgaccgccagcgagccaggacagatggggggacagccagcacgaggacctgatgcagccagccagcatgctcacaggttctgcagactataaggcctcagggcttgctaactaccagggcactgccagcaagcaggttgaggctagatggttggtgtcccaacttctgaacttgcatgttgtctggactggcttctccctccctgtgcccagatgatggtggtgagtgccttactgtggcccgtctcatgtgcactgggcctaccaggagatgagaatgtggcttctctcactgaaggtctctgcccgttctgagccagccatgctttctcttttagaatcctgagcagcccctgtcctgctgctgggcatccttattccttacaaacactgttactttcatagcatctcctgtaagattagcaagcatttccatcaagcggtaggaggattctcttcagagatcaaagtgtggttgatggcgagagagccccatgagctgtttctgctccattgatggtctcttgtcacagatcttgctgatgccaaggcctttgtgggtcagtagtgtagactcatctgctcaaaaagtagttttgttggctaaggtgaagaagtgtttcttattacactaggctggcctcactaggctgacctcaaacttggtgctgcctcctgtctgcttctcaagtgctaagatctcagatgtccatcaccatggtcagcaggacttaggtcatgaactactgatctgctttaagcacatgcatcagtggtgagtgaggacaccatgttctcactgagaccagacagcagctggcaggagattggcatttacacctggcagatcttttctgagaacttgactttgtgtagcagtaagattggaggcaggtggtgagtggggaaaacacgggagctgttgggctggtcgcccacctttgtattgttactgacatatctggggttctgagtgtgtcaactaaaccattttatgtgttgctgtgtcttgtataatttgataaaagcttctcagacatg

SEQ ID NO: 10503 - protein, 573 aa, Rattus norvegicus
  misc_feature (1)..(573): Xaa=Unknown amino acid
MEGERAPLLGSRRAAAAAGVFAGRRAACGAVLLAELLERAAFYGVTANLVLFLNGAPFNWEGAQASQALLLFMGLTYLGSPFGGWLADARLGRARAILLSLALYLLGMLAFPLLAAPRSRSFLCGDPHPELVRNCSAPFPNGTAVCPDAAARRCAPATFAGLVLVGLGVATVKANITPFGADQVKDRGPEATRRFFNWFYWSINLGAILSLGGIAYIQQNVSFLTGYLIPTVCVAIAFLVFLCGQSVFITKPPDGSAFTDMFRILTYSCCSQRGGQRRSGEGLGVFQQSSKHSLFDSCKMSRGGPFTEDKVEDVKALVKIVPVFLALIPYWTVYFQMQTTYVLQSLHLKIPEISSITTTHHTLPAAWLTMFDAVLILLLIPLKDKLVDPVLRRHGLLPSSLKRIAVGMFFVTCSAFAAGILESKRLDLVKEKTINQTIGGVVYHAADLPIWWQIPQYVLIGISEIFASIAGLEFAYSAAPKSMQSAIMGLFFFFSGIGSFVGSGLLALVSLKAIGWMSSHTDFGNINSCHLHYYFFLLAAIQGATLLLFLIVSVKYDRQRARTDGGTASTRTX

SEQ ID NO: 10504 - DNA, 2685 bp, Homo sapiens; identical to SEQ ID NO: 7259
  ref <308>: DATABASE ACCESSION NUMBER: EMBL / S78203
  ref <309>: DATABASE ENTRY DATE: 2000-03-04

SEQ ID NO: 10505 - protein, 729 aa, Homo sapiens; identical to SEQ ID NO: 7260
  ref <308>: DATABASE ACCESSION NUMBER: SWISS-Prot / Q16348
  ref <309>: DATABASE ENTRY DATE: 2002-06-15

SEQ ID NO: 10506 - DNA, 1587 bp, Rattus norvegicus
  ref <308>: DATABASE ACCESSION NUMBER: EMBL / AB002406
  ref <309>: DATABASE ENTRY DATE: 1999-06-10
cgcaggttgtggctgcacacactcgtcaaaatgaagattgaggaggtgaagagcaccacgaagacgcaacgcattgcctcccacagccacgtgaaggggctggggctggatgagagcggcctggccaagcaggcggcttcggggctcgtgggccaggagaacgcgagagaggcatgtggtgtcatagtcgaattaatcaaaagcaagaaaatggctggaagagctgtcttgttggcagggcctcctggaactggcaagacagccttggccctggctattgctcaggaactgggcagtaaagtccctttctgcccgatggtgggtagtgaagtatactcaactgagatcaagaagacagaggtgctgatggagaacttccgaagggctattgggctgcggataaaggagactaaggaggtttatgaaggggaggtgacagagctcactccctgtgagacagagaaccccatgggtgggtatggcaaaactatcagccacgtgatcatagggctcaagactgccaaaggaaccaaacagctgaagctggaccccagtatttttgaaagtttgcagaaagaacgagtagaggctggagatgtgatttacattgaagcaaacagtggagctgtgaagaggcaaggcaggtgtgacacctatgccacagagtttgaccttgaggctgaagagtatgtccctttgccaaagggagatgtgcacaagaagaaggaaatcatacaggatgtgaccttgcacgacttggacgtggccaatgcgcggcctcagggtgggcaagatattctgtctatgatgggccagttgatgaagccaaaaaagacagagatcacagataaacttcgaggggagatcaacaaggtggtgaacaaatacattgaccagggcgttgcagagctggtccctggagtgctctttgttgacgaggtccacatgctggatatcgagtgctttacctacctgcaccgagccctggagtcctccatcgcccccattgtcatctttgcatccaaccgaggcaactgtgtcatcaggggcaccgaggacatcacttctccacacggcatcccgttggacctgctggaccgggtgatgatcatcaggaccatgctgtatacgccacaggagatgaagcagatcattaagatccgagcccagacggaaggcatcaacatcagtgaggaggccctaaaccacctcggggagattggcaccaagaccacgctgaggtattcagtgcagctgctgacccctgccaacctgctggccaagatcaacgggaaggacagcattgagaaggagcacgtggaggagatcagcgagctcttctatgacgccaagtcctccgccaagattctggccgaccagcaggacaagtacatgaagtaacgtagggtttggaggtgcacccagaggacagaccccacaccgaggacagggtcttgcgttgagcatgctttgcagtgttacagtttgtttgtaaattatcaaacctccaaggttgtttggaaggaaccctttcccacctagcttgtttttctaataaaactgaatcttattttgatgataaaaaaa

SEQ ID NO: 10507 - protein, 457 aa, Rattus norvegicus
  misc_feature (1)..(457): Xaa=Unknown amino acid
MKIEEVKSTTKTQRIASHSHVKGLGLDESGLAKQAASGLVGQENAREACGVIVELIKSKKMAGRAVLLAGPPGTGKTALALAIAQELGSKVPFCPMVGSEVYSTEIKKTEVLMENFRRAIGLRIKETKEVYEGEVTELTPCETENPMGGYGKTISHVIIGLKTAKGTKQLKLDPSIFESLQKERVEAGDVIYIEANSGAVKRQGRCDTYATEFDLEAEEYVPLPKGDVHKKKEIIQDVTLHDLDVANARPQGGQDILSMMGQLMKPKKTEITDKLRGEINKVVNKYIDQGVAELVPGVLFVDEVHMLDIECFTYLHRALESSIAPIVIFASNRGNCVIRGTEDITSPHGIPLDLLDRVMIIRTMLYTPQEMKQIIKIRAQTEGINISEEALNHLGEIGTKTTLRYSVQLLTPANLLAKINGKDSIEKEHVEEISELFYDAKSSAKILADQQDKYMKX

SEQ ID NO: 10508 - DNA, 1225 bp, Homo sapiens; identical to SEQ ID NO: 1254
  ref <308>: DATABASE ACCESSION NUMBER: EMBL / Y17829
  ref <309>: DATABASE ENTRY DATE: 1999-01-07

SEQ ID NO: 10509 - protein, 355 aa, Homo sapiens; identical to SEQ ID NO: 4469
  misc_feature (1)..(355): Xaa=Unknown amino acid

SEQ ID NO: 10510 - DNA, 3732 bp, Rattus norvegicus; identical to SEQ ID NO: 167
  ref <308>: DATABASE ACCESSION NUMBER: EMBL / AB009999
  ref <309>: DATABASE ENTRY DATE: 1998-06-12

SEQ ID NO: 10511 - protein, 461 aa, Rattus norvegicus; identical to SEQ ID NO: 168
  ref <308>: DATABASE ACCESSION NUMBER: SWISS-Prot / O35052
  ref <309>: DATABASE ENTRY DATE: 2002-06-15

SEQ ID NO: 10512 - DNA, 2356 bp, Homo sapiens; identical to SEQ ID NO: 169
  ref <308>: DATABASE ACCESSION NUMBER: EMBL / U65887
  ref <309>: DATABASE ENTRY DATE: 2000-03-04

SEQ ID NO: 10513 - protein, 461 aa, Homo sapiens; identical to SEQ ID NO: 170
  ref <308>: DATABASE ACCESSION NUMBER: SWISS-Prot / Q92903
  ref <309>: DATABASE ENTRY DATE: 2002-06-15

SEQ ID NO: 10514 - DNA, 1529 bp, Rattus norvegicus; identical to SEQ ID NO: 183
  ref <308>: DATABASE ACCESSION NUMBER: EMBL / AB010154
  ref <309>: DATABASE ENTRY DATE: 2001-03-29

SEQ ID NO: 10515 - protein, 417 aa, Rattus norvegicus; identical to SEQ ID NO: 184
  ref <308>: DATABASE ACCESSION NUMBER: SWISS-Prot / BAA36362
  ref <309>: DATABASE ENTRY DATE: 2003-02-01

SEQ ID NO: 10516 - DNA, 2271 bp, Homo sapiens; identical to SEQ ID NO: 185
  ref <308>: DATABASE ACCESSION NUMBER: EMBL / AF387637
  ref <309>: DATABASE ENTRY DATE: 2001-12-28

SEQ ID NO: 10517 - protein, 713 aa, Homo sapiens; identical to SEQ ID NO: 186
  ref <308>: DATABASE ACCESSION NUMBER: SWISS-Prot / P27448
  ref <309>: DATABASE ENTRY DATE: 2001-10-16

SEQ ID NO: 10518 - DNA, 1166 bp, Rattus norvegicus; identical to SEQ ID NO: 231
  ref <308>: DATABASE ACCESSION NUMBER: EMBL / AB013454
  ref <309>: DATABASE ENTRY DATE: 1998-11-16

SEQ ID NO: 10519 - protein, 184 aa, Rattus norvegicus [sequence omitted]

SEQ ID NO: 10520 - DNA, 770 bp, Homo sapiens; identical to SEQ ID NO: 233
  ref <308>: DATABASE ACCESSION NUMBER: EMBL / X53777
  ref <309>: DATABASE ENTRY DATE: 1993-09-12

SEQ ID NO: 10521 - protein, 184 aa, Homo sapiens [sequence omitted]

SEQ ID NO: 10522 - DNA, 2318 bp, Rattus norvegicus; identical to SEQ ID NO: 235
  ref <308>: DATABASE ACCESSION NUMBER: EMBL / AB013732
  ref <309>: DATABASE ENTRY DATE: 1998-05-15

SEQ ID NO: 10523 - protein, 493 aa, Rattus norvegicus; identical to SEQ ID NO: 236
  ref <308>: DATABASE ACCESSION NUMBER: SWISS-Prot / O70199
  ref <309>: DATABASE ENTRY DATE: 1998-12-15

SEQ ID NO: 10524 - DNA, 2355 bp, Homo sapiens; identical to SEQ ID NO: 237
  ref <308>: DATABASE ACCESSION NUMBER: EMBL / AJ007702
  ref <309>: DATABASE ENTRY DATE: 1999-02-24

SEQ ID NO: 10525 - protein, 494 aa, Homo sapiens; identical to SEQ ID NO: 238
  ref <308>: DATABASE ACCESSION NUMBER: SWISS-Prot / O60701
  ref <309>: DATABASE ENTRY DATE: 2002-06-15

SEQ ID NO: 10526 - DNA, 1269 bp, Rattus norvegicus; identical to SEQ ID NO: 245
  ref <308>: DATABASE ACCESSION NUMBER: Refseq / NM_022505
  ref <309>: DATABASE ENTRY DATE: 2002-11-05

SEQ ID NO: 10527 - protein, 422 aa, Rattus norvegicus; identical to SEQ ID NO: 246
  ref <308>: DATABASE ACCESSION NUMBER: Refseq / NP_071950
  ref <309>: DATABASE ENTRY DATE: 2002-11-05

SEQ ID NO: 10528 - DNA, 1254 bp, Homo sapiens; identical to SEQ ID NO: 247
  ref <308>: DATABASE ACCESSION NUMBER: EMBL / S82449
  ref <309>: DATABASE ENTRY DATE: 2000-08-11

SEQ ID NO: 10529 - protein, 416 aa, Homo sapiens; identical to SEQ ID NO: 248
  ref <308>: DATABASE ACCESSION NUMBER: SWISS-Prot / Q9UQ21
  ref <309>: DATABASE ENTRY DATE: 2002-06-15

SEQ ID NO: 10530 - DNA, 3000 bp, Rattus norvegicus
  ref <308>: DATABASE ACCESSION NUMBER: EMBL / AB016160
  ref <309>: DATABASE ENTRY DATE: 1999-01-22
agacacctccccgacgccctcccagaagccttccccagaagaagtgtcccccctgagctgcccccccaccccaaggaggccgcccccgcccctcctcgccatgggcccggggggaccctgtaccccagtggggtggccgctgcctcttctgctggtgatggcggctggggtggctccggtgtgggcctctcactcccctcatctcccgcggcctcacccgagggtccccccgcacccctcctcagaacggcgtgcagtatacatcggggcgctgtttcccatgagcgggggctggccggggggccaggcctgccagcccgcggtggagatggcgctggaggacgttaacagccgcagagacatcctgccggactacgagctcaagcttatccaccacgacagcaagtgtgacccagggcaagccaccaagtacttgtacgaactactctacaatgaccccatcaagatcattctcatgcctggctgtagttctgtctccacacttgtagctgaggctgcccggatgtggaaccttattgtgctctcatatggctccagttcaccagccttgtcaaaccgacagcggtttcccacgttcttccggacgcatccatccgccacactccacaatcccacccgggtgaaactcttcgaaaagtggggctggaagaagatcgctaccatccaacagaccaccgaggtcttcacctcaacgctggatgacctggaggagcgagtgaaagaggctgggatcgagatcactttccgacagagtttcttctcggatccagctgtgcctgttaaaaacctgaagcgtcaagatgctcgaatcatcgtgggacttttctatgagacggaagcccggaaagttttttgtgaggtctataaggaaaggctctttgggaagaagtacgtctggttcctcatcgggtggtatgctgacaactggttcaagacctatgacccgtcaatcaattgtacagtggaagaaatgaccgaggcggtggagggccacatcaccacggagattgtcatgctgaaccctgccaacacccgaagcatttccaacatgacgtcacaggaatttgtggagaaactaaccaagcggctgaaaagacaccccgaggagactggaggcttccaggaggcaccactggcctatgatgctatctgggccttggctttggccttgaacaagacgtctggaggaggtggtcgttccggcgtgcgcctggaggactttaactacaacaaccagaccattacagaccagatctaccgggccatgaactcctcctcctttgagggcgtttctggccatgtggtctttgatgccagcggctcccggatggcatggacacttatcgagcagctacagggcggcagctacaagaagatcggctactacgacagcaccaaggatgatctttcctggtccaaaacggacaagtggattggagggtctcccccagctgaccagaccttggtcatcaagacattccgtttcctgtctcagaaactctttatctccgtctcagttctctccagcctgggcattgttcttgctgttgtctgtctgtcctttaacatctacaactcccacgttcgttatatccagaactcccagcccaacctgaacaatctgactgctgtgggctgctcactggcactggctgctgtcttccctctcgggctggatggttaccacatagggagaagccagttcccgtttgtctgccaggcccgcctttggctcttgggcttgggctttagtctgggctatggctctatgttcaccaagatctggtgggtccacacagtcttcacgaagaaggaggagaagaaggagtggaggaagaccctagagccctggaaactctatgccactgtgggcctgctggtgggcatggatgtcctgactcttgccatctggcagattgtggaccccttgcaccgaaccattgagacttttgccaaggaggaaccaaaggaagacatcgatgtctccattctgccccagttggagcactgcagctccaagaagatgaatacgtggcttggagagctttggtcttttgctgtgagtagtgatgttcagcggagggccactgtaggcggtgactcacccatctgtgtctggccagctcctgagagcattttctatggttacaaggggctgctgctgctgctgggaatctttcttgcttacgaaaccaagagcgtgtccactgaaaagatcaatgaccacagggccgtgggcatggctatctacaatgtcgcggtcctgtgtctcatcactgctcctgtgaccatgatcctttccagtcagcaggacgcagcctttgcctttgcctctctggccatcgtgttctcttcctacatcactctggttgtgctctttgtgcccaagatgcgcaggctgatcacccgaggggaatggcagtctgaaacgcaggacaccatgaaaacaggatcatccaccaacaacaatgaggaagagaagtcccgactgttggagaaggaaaaccgagaactggaaaagatcatcgctgagaaagaggagcgcgtctctgaactgcgccatcagctccagtctcggcagcaactccgctcacggcgccaccccccaacacccccagatccctctggaggccttcccaggggaccctctgagccccctgaccggcttagctgtgatgggagtcgagtacatttgctttacaagtgagggggcatggagaaggatcaagccagtaggggagggaagggtctgggaagagggtgggggcctgggaggagggtaaggactcctatctccaacctggagagcacacgctccaatccccctcttataaatacatgtcgctctgtgcatctggggttatttgggtctccagtactctgggaaacagactgttttctttctcccctataattttatatctccacttcacaggttttgtttgaaccctgcttggagttattattcactcatggctc

SEQ ID NO: 10531 - protein, 991 aa, Rattus norvegicus; identical to SEQ ID NO: 258
  ref <308>: DATABASE ACCESSION NUMBER: SWISS-Prot / Q9Z0U4
  ref <309>: DATABASE ENTRY DATE: 2001-10-16

SEQ ID NO: 10532 - DNA, 4445 bp, Homo sapiens; identical to SEQ ID NO: 259
  ref <308>: DATABASE ACCESSION NUMBER: EMBL / AJ225028
  ref <309>: DATABASE ENTRY DATE: 1998-12-11

SEQ ID NO: 10533 - protein, 961 aa, Homo sapiens; identical to SEQ ID NO: 260
  ref <308>: DATABASE ACCESSION NUMBER: SWISS-Prot / Q9UBS5
  ref <309>: DATABASE ENTRY DATE: 2002-06-15

SEQ ID NO: 10534 - DNA, 528 bp, Rattus norvegicus; identical to SEQ ID NO: 369
  ref <308>: DATABASE ACCESSION NUMBER: EMBL / AF000942
  ref <309>: DATABASE ENTRY DATE: 2001-12-11

SEQ ID NO: 10535 - protein, 119 aa, Rattus norvegicus; identical to SEQ ID NO: 370
  ref <308>: DATABASE ACCESSION NUMBER: SWISS-Prot / P41138
  ref <309>: DATABASE ENTRY DATE: 2001-10-16

SEQ ID NO: 10536 - DNA, 982 bp, Homo sapiens; identical to SEQ ID NO: 371
  ref <308>: DATABASE ACCESSION NUMBER: EMBL / X66924
  ref <309>: DATABASE ENTRY DATE: 1993-11-18

SEQ ID NO: 10537 - protein, 119 aa, Homo sapiens; identical to SEQ ID NO: 372
  ref <308>: DATABASE ACCESSION NUMBER: SWISS-Prot / Q02535
  ref <309>: DATABASE ENTRY DATE: 2002-06-15

SEQ ID NO: 10538 - DNA, 2099 bp, Rattus norvegicus; identical to SEQ ID NO: 413
  ref <308>: DATABASE ACCESSION NUMBER: EMBL / AF004811
  ref <309>: DATABASE ENTRY DATE: 2001-05-01

SEQ ID NO: 10539 - protein, 160 aa, Rattus norvegicus; identical to SEQ ID NO: 414
  ref <308>: DATABASE ACCESSION NUMBER: SWISS-Prot / P31977
  ref <309>: DATABASE ENTRY DATE: 2001-10-16

SEQ ID NO: 10540 - DNA, 3879 bp, Homo sapiens; identical to SEQ ID NO: 415
  ref <308>: DATABASE ACCESSION NUMBER: EMBL / M69066
  ref <309>: DATABASE ENTRY DATE: 2000-03-04

SEQ ID NO: 10541 - protein, 576 aa, Homo sapiens; identical to SEQ ID NO: 416
  ref <308>: DATABASE ACCESSION NUMBER: SWISS-Prot / P26038
  ref <309>: DATABASE ENTRY DATE: 2002-06-15

SEQ ID NO: 10542 - DNA, 447 bp, Rattus norvegicus; identical to SEQ ID NO: 425
  ref <308>: DATABASE ACCESSION NUMBER: EMBL / AF007554
  ref <309>: DATABASE ENTRY DATE: 2000-08-23

SEQ ID NO: 10543 - DNA, 2238 bp, Homo sapiens; identical to SEQ ID NO: 426
  ref <308>: DATABASE ACCESSION NUMBER: EMBL / X52228
  ref <309>: DATABASE ENTRY DATE: 1995-08-14

SEQ ID NO: 10544 - protein, 1255 aa, Homo sapiens; identical to SEQ ID NO: 427
  ref <308>: DATABASE ACCESSION NUMBER: SWISS-Prot / Q16615
  ref <309>: DATABASE ENTRY DATE: 2002-06-15

SEQ ID NO: 10545 - DNA, 2742 bp, Rattus norvegicus; identical to SEQ ID NO: 428
  misc_feature (1)..(2742): n=a, c, g or t
  ref <308>: DATABASE ACCESSION NUMBER: EMBL / AF007583
  ref <309>: DATABASE ENTRY DATE: 2001-06-13

SEQ ID NO: 10546 - protein, 458 aa, Rattus norvegicus; identical to SEQ ID NO: 429
  ref <308>: DATABASE ACCESSION NUMBER: SWISS-Prot / O35167
  ref <309>: DATABASE ENTRY DATE: 2002-06-15

SEQ ID NO: 10547 - DNA, 2909 bp, Homo sapiens; identical to SEQ ID NO: 430
  ref <308>: DATABASE ACCESSION NUMBER: Refseq / NM_080539
  ref <309>: DATABASE ENTRY DATE: 2002-11-05

SEQ ID NO: 10548 - protein, 456 aa, Homo sapiens; identical to SEQ ID NO: 431
  ref <308>: DATABASE ACCESSION NUMBER: SWISS-Prot / Q9NP24
  ref <309>: DATABASE ENTRY DATE: 2001-10-16

SEQ ID NO: 10549 - DNA, 2225 bp, Rattus norvegicus; identical to SEQ ID NO: 546
  ref <308>: DATABASE ACCESSION NUMBER: EMBL / AF020618
  ref <309>: DATABASE ENTRY DATE: 1998-07-02

SEQ ID NO: 10550 - protein, 457 aa, Rattus norvegicus; identical to SEQ ID NO: 547
  ref <308>: DATABASE ACCESSION NUMBER: SWISS-Prot / AAC24980
  ref <309>: DATABASE ENTRY DATE: 2000-05-01

SEQ ID NO: 10551 - DNA, 2331 bp, Homo sapiens; identical to SEQ ID NO: 548
  ref <308>: DATABASE ACCESSION NUMBER: Refseq / XM_009097
  ref <309>: DATABASE ENTRY DATE: 2002-08-01

SEQ ID NO: 10552 - protein, 674 aa, Homo sapiens; identical to SEQ ID NO: 549
  ref <308>: DATABASE ACCESSION NUMBER: Refseq / XP_009097
  ref <309>: DATABASE ENTRY DATE: 2002-08-01

SEQ ID NO: 10553 - DNA, 1242 bp, Rattus norvegicus; identical to SEQ ID NO: 588
  ref <308>: DATABASE ACCESSION NUMBER: EMBL / AF026529
  ref <309>: DATABASE ENTRY DATE: 2000-03-03

SEQ ID NO: 10554 - protein, 189 aa, Rattus norvegicus [sequence omitted]

SEQ ID NO: 10555 - DNA, 694 bp, Homo sapiens; identical to SEQ ID NO: 590
  ref <308>: DATABASE ACCESSION NUMBER: EMBL / AJ303455
  ref <309>: DATABASE ENTRY DATE: 2001-01-16

SEQ ID NO: 10556 - protein, 189 aa, Homo sapiens; identical to SEQ ID NO: 591
  ref <308>: DATABASE ACCESSION NUMBER: SWISS-Prot / Q9H169
  ref <309>: DATABASE ENTRY DATE: 2002-06-15

SEQ ID NO: 10557 - DNA, 8797 bp, Rattus norvegicus
  misc_feature (1)..(8797): n=a, c, g or t
  ref <308>: DATABASE ACCESSION NUMBER: EMBL / AF028784
  ref <309>: DATABASE ENTRY DATE: 1999-06-12
agaagcagggcaagatggagcggagacgtatcacctctgcacgccgctcctatgcctcctccgagacgatggtcaggggccatggtcctaccagacacctgggtaccattccgcgcctctccctgtctcgaatgacgcctccactccctgccagggtagacttctccctggccggggcgctcaatgccggcttcaaagagactcgggccagcgagcgcgcggagatgatggagctcaatgaccgctttgctagctacatcgagaaggtccgcttcctggaacagcaaaacaaggcgctggcagctgagctgaaccagcttcgagccaaggagcccaccaaactggctgacgtttaccaggcagaacttcgggagctgcggctgcgtctggaccagcttactaccaacagtgcccggctggaggtggagagggacaatctcacacaggacctcggcaccctgaggcagaagtgagaaggggaataggaaaatggctagtgagcagagagactgaattgagagaggagcctggaagaagggtactgcctccccctaaggagagcctcttagctgctgtgtttcaaaagggagagctgtctttgttccctaatatgatgcagaatagccaggaagagactgaaaacttcagggatcagattcccagagagagctgagcattctgggtacttaccaccaagctgagggaggactgtgtgtgggtagccagggtacaagcaggcaggtgcttcagtcactgggcactatgaatggccagagaggtttgcgtccacaaggagggctcttggtctctgaaatataagaaatgcaagaaagagcaggcaggcctggatgccgggcccagatggctgtctacgacctgcttttgaccctgctcaagtcattttgattggttgtagctgtaaaggagaggtcatgatacaatctgtcctaaaagatggtaaccgaggtcaaactctggggcgtggtgctttgctgggtggtggatattcacgtgtccctctggtgcaggaggggcactggtgtcagtgacagtgggcgcacggtggtggatgcgcctctgggaacaagagcaggtggcaccaaccccgataaggcacctcagtaatgagttaaggaggaaggctcttatctgttcacgcgtcaccaggcctctgtgtaggaacctgccattgcttactcttcctgccactctaccgatcctgtgggatccgtttgtaacantcccctccctctggaggttcggatagggacccaagagtcctcaggaaaacctaaagcctgtactgtgttccctgtcccaggctccaagatgaaaccaacctgaggctggaggcggagaacaacctggctgtgtacagacaggtcagagagatgagaggaagggtggggagggaaggcggaggcccgccaccaaacaccgcagttgtctgcttccaagatccccacaaggagggggaagacaaagttggaaattttagtagctaggaccctggggtcaaagagattctctccctgctccaggaggcggatgaagccaccttggctcgtgtggatctggagaggaaggttgagtcgctggaggaggagatccagttcttgaggaagatccatgaggaggtgaggccagggagggggagggaggggccttacgagaaactgcaggtaatagacagagacgctcacagaggnaaacngagaaaccaaatttcaggaagaaaacaaaaacaagagaaagagtnaagacagagacttagggagatgtgtccagtatttactacccgtgnaaacacacgcaggccttccgccgccatgttctaagaagcacagaaccgagtctgagtttctccttcacatcagctctcagccttatcactacctcttccacaactgtagggaccttgaggcctagagagtgaaacacacccaaagtcacacagctagaacccctctagacctgtcacagtggtatgcatctcagcctgtgagtggtagacgcggaacgtttgaactgttcaaggccaatttcngcnacannagnaaactgaaaccagccacgcnccgcncgcgcacatctattctcttacctcagaacctngctgcaagacatattnattcatgcctggttcctgactatgcagtcctgagaggaaggcacctcaaattctacttccatgcccattagacgctttacttttactttttgacaggatatcactgtgtagctggcctggaacatgcacttcctccagtaacatctgcctcatttccgtgagccattgctataaatggcagacagaggcgtgagtctgggagagtgcagcctaggccgtagcttgagccttaataccccttcttttaccttattaggaagttcgagaactccaggagcagctggcccagcagcaggtccacgtggagatggatgtggccaagccagacctcacagcggctctgagagagattcgcactcagtacgaggcagtggccaccagtaacatgcaagaaacagaagagtggtatcggtccaaggtacctgtggggcagcttgcctcttccaggaagtcttcctgctccctcctgaagaataaaggaaggaaggaagctagggaagggtaacctatctaggtgtccagtcttgcccagagagaggagacttgcccagaaccacgcaagcattattaacttcccaaactactcttggttactgctattataagtaatatcagtaatagttaataatagctaaaggctcaccagtttgctcagtgtcacacagctcctaagtgacaaagggatagcgtttcctatcctaacccatatcatcagagagcctgctttttgatgcctctgccagcctatgccctgcattaccgaacatctactgtgtgtcacgttctttttttctttttttggagctggggaccgaacccagggccttgcacttgctaagcaagcgctctaccactgagctaagtcccaaccccgtgtgccacgttctttagtccagatgaggccagcgtttatacagactgtaggaggcagggacgatgggggatggactaggggtgggacttgtgctagacaggcagcctagagactcaggagaagagggaagggcatctcaggtggagaacaggggctgtgaggaggcctgagacagaaaagcacagagaccagaaatgtcgctgcccagggcgccaagcccagtgtgagttaatgagcctcacatgcagggacagtctgggaggatgaaggcctaagaagttcttgggctacagttgttcctcctaagggagccctgaggttcctggtttttcagtgatcatgtatatctcccagctcaggcagctctctgggctgtgccttgcgcactttccctcaatttttggtcctctctgggtttagtttgcagacctcacagacgttgcttcccgcaacgcagagctgctccgccaggccaagcacgaggctaatgactatcgccgccaactgcaggccttgacctgcgaccttgagtccttgcgcggcacggtgagcacggatcactggttggatggggcagcaagaggttgctggagggggacagggatggagggaccggggtggcataggcgaacacggaagagatcaggggttgcagcctcgaagtttctcaaaatctcccggccaagcgatcagttccatcccgcagaacgagtccttggagaggcaaatgcgcgaacaggaggagcgccacgcgcgggagtcggcgagttaccaggaggcactcgctcggctggaggaggagggccaaagcctcaaggaggagatggcccgccacctgcaggagtaccaggatctactcaacgttaagctagccctggacatcgagatcgccacctacaggaaattgctggagggcgaagaaaaccggtgagctctacctcagcccgagaattcctcttgttcctttacagtactccggagttagccttgtatccttcccacccagagtgttcagcctacgaacaatagatattcaagaaatgtctgaagaatagatgggtccaactactggtaattctcgggactgaggacttgagttattccccagattaagtggcttaccacaagcatggccaacaaaaatggaatttcccatggtctgaagggcttgttctgcctctatgaagttattgtgacttaaaaaaaaaattccatctccaaagcctccttcctggaagtattctgtgggggcagataacacagtcctgcagacacttccggctcctggagagtgttggctgctgggttgaaagttggtggtggaggctggagagatagttagggctttgggttccaacatccatcttatggcttgcaatggcttgtagtaacactccagttccaggggaacccacatctgccattgtatgtgtgtgtgtgtgtgtgtgtgtgtgtgtgtgtgtgtgtgtgtgtgtatgtatgcatgcatgtatgtatgtatgtatgtatgtatgtatcagtcattatgttgctgctttagtcccagcacttgagaggaagaggccagcagatctctgtgagtttgaggctaacctggtatatatattgaatcagcgccatatagagaggctttgtaagaaaaagttggcgaagagaaagagaggagaggagacagagaggagcagaaaggagagagagcaggagagagacagacagacagacagacacacacacgcatgcacacaggacagagagaaaatgtgtgtgtgtgtgtgaaagagagagagagtgtgtgtgtgtgtgtgtatgtgagtgtgtgtgtgtatgtgtgtgtgtgtgtgtgtgtgtgtgtgtgtgtgtgtgtgtcctggtaaagggctttgagattttcatgctggccctggaccagccctggcctggggatgtcctagggcagcctcctcatccctatccctccttttccagcatcaccattcctgtacagactttctccaacctccagatccgaggtcagtatagtggggccttgtgggaaagggtaatgaatcccctccctcctcccccaggcctgtgaactgctctcatggactgggaggcaaagagacccacgctctccttgagagcttcgtgaccctccacggagaccctagatggagtgcagaatcttagggcttatagctggtccctgcctccctctgccctgtgtccccatcccctggaaaacccaacaggtctcaactgatgccaggtctgcaagccatgaacaagctccgccttctaagtgttttgtgttcttgttttttttttttttttttctcctctctctcttaactgcttgtcactacagggggcaaaagcaccaaagaaggggaaggccacaaagtcacaagacatctcaaaaggctcacaatacaagttataccaatacaggctctcgccagattgtaaacggagtcctgccagcactccgttagacacgtgcacttcagttgtgtacttttcccggcttgccttcttcctcccaggcctcttctaagggactgtaccgtgtcctttgtccagaaccttcagtacccacgctaggtcctggctctgtgtaattaggttatactgatagagctagcctacgttaaaggttaggtcatgctaacagagctagcctatgctaacagagctagcctatgctcaaggtgaggtcatgctaacagagctagcctgtgttaaaggcagcatgtctctgggagctcaaaggagatgctctgacccctctgagcaaatgcctctgcctcaccacttttgtgtcgctaggtggtccccttggattgcagtgcctgtgggcaggctctgtgtttgattcatgtgtccccagagttctattgcttcattcagtgctgactcagcccagaggttccccctggatggctgctcttgtagtgaataaactctaggttccctgctcttcgttttacatattagtgagtggcgacacgtatattttcctctctaagggggttggatcaaattacgttttactggtatgtggcccttaaatgattcttagatatgggggaagattccatttaggaacattggccgtgcatattgcagggtgtaattgagctttagaaagttaaccatgctggccaggcaaaggtgccaaataccaggcagtcaaaggtcactagagccagataagtgacagggaaataagaatggggaaaggtccgtgcgtattaaccactaatctgcaccacgtggtatacgtcagtgagttgacactcgcatgtccaggagtagtcactatgagcccattttgtaagagaggaaactgaggctccttccttggtgcagcccttggctgtctctcagccaggtgccagaacagaaggcagagcgggctacaggacagcagcagggtgtgcccagcgctgggggacagatgggagtctccagtcacttcggaaaagtcatgcttttcgctgcctagctagttagccccgtccgtattcacgatcctgggtgcatgatggggaacttgggtgcagggcaggatgtctagtgtcccaagagcccacggagacctcctctcctcgtacctgcagaaaccagcctggacaccaaatctgtgtcagaaggccacctcaagaggaacatcgtggtaaagacggtggagatgcgggatggcgaggtgaggaaacgttccagtggccccggggagttcttgaggctgtactggagaaagcctggtactagctcactgaaggtccttattaactaccaggagagctctggtagaagggatgggccttgaatgtaattctccttttccagctctttcatgggtggcgtgctaagggcaacctgtatatggaggccaccatctttctggaacacttggtggagggaggctttcaaattttactcagaagaactttccataggggaattggaagaggggctagacatagaatggccgtcttcatttgttgggatgttagcagcaatggttgcccttacgtcatagtcctctacaagtggcatttcatatctcaatgtgtgatgcaatcaagccgatagtcctggaagacacatccagggcagtcaggggctcgcctcggggatgctcagcctagcaaactggatctgggattctggagcccctaactctgtgctgtgactcttccctctgcctgcaggtcattaaggagtcgaagcaggagcacaaggatgtgatgtgaggtgtgcccagctggcggcccttgccatacagtgtgagggcctaaagctccctcctcagatagtcttgtttgctaggcccaattcccatccacaccagtgctccccttccttctgtttttatgcccacggctcggtcagtgcggagtctcatggacggcacagaccaccctgcatctccaactaacaggatactcaccccaaaggggcaatcaggaggggaggacccccctccccccagctgggttagaactggaagaaagaggaaagacaggggcagggagacttaacaaatcccttccttcatccttgttgttatggaaaccgttgccagagctggaggtctctgggaactggactttgagttttcataggctgctggagcaagacaaacattcagacagaaaggaaaagttcccgaggcaaagaatctctagccagaggcctaggcatctggaagaaccctgacgatgtaggagtgggtagggcagacttgctacctggaatggccactaaggcagtcctgaagggcccccctccggagggatgaccctcgtgtatcggccccactgagcagccctgcaggttgatgccccacgagcctgtgaaaacttggttcttggcatgtggcaggctctatagcataagtggagagggaaggtgtactggagggtatagaggagggctctctggcccctaagtatggatgcggagaggggggagcccaggaaggctaccccgctcaggctgcaggggtgccatggcggaggaaccggtggagataacttggacaatggagttggaagttgtaggcaactagttacacttggctctgaatccttggaatcaaggaaatgacctgttctctcaaagacactgaaacaggagagagggacttccatccactgggcagggtacaggcgcgtctcagttgtgaaggtctattcctggttgctcagtccccaactgcgcatcaccctgggcttctcaacctggaagagtccacaaccatccttctgaggccctccatccccacaaccactagctgttgttctccaagccaagggccccattccctttcttatgcatgtacggagtatcgcctagactttaagcgtccatcctgtttgaaagtttgggaaactgacacacgttgtgttcaagcagcctggtgtggagtgccttcgtattagtgtaccctctcggaagctggttggtgggcaggtgaggaagaaatggagctgaaagtgtcccctcagttgtcctttcctccccctctaaggtccctcacttttcccaggacatcgtacactcccccccttgtcacctctgctaaccttcagagcagtactgtcacctttactcactgggcagaaataaagacagtgtcagaggcttccacagagkatctgatttgttcagaaggtggggtgaggacagacaagacccaaccttgctcgttatcaccaccgaatgtctagcgagcctaaacttccacaacaaaccctccacagcagcagctggcgttaaatccgcctccaacgacgaggtgccct

SEQ ID NO: 10558 - DNA, 3017 bp, Homo sapiens
  ref <308>: DATABASE ACCESSION NUMBER: EMBL / J04569
  ref <309>: DATABASE ENTRY DATE: 2000-03-04
ccgatggagaggagacgcatcacctccgctgctcgccgctcctacgtctcctcaggggagatgatggtggggggcctggctcctggccgccgtctgggtcctggcacccgcctctccctggctcgaatgccccctccactcccgacccgggtggatttctccctggctggggcactcaatgctggcttcaaggagacccgggccagtgagcgggcagagatgatggagctcaatgaccgctttgccagctacatcgagaaggttcgcttcctggaacagcaaaacaaggcgctggctgctgagctgaaccagctgcgggccaaggagcccaccaagctggcagacgtctaccaggctgagctgcgagagctgcggctgcggctcgatcaactcaccgccaacagcgcccggctggaggttgagagggacaatctggcacaggacctggccactgtgaggcagaagctccaggatgaaaccaacctgaggctggaagccgagaacaacctggctgcctatagacaggaagcagatgaagccaccctggcccgtctggatctggagaggaagattgagtcgctggaggaggagatccggttcttgaggaagatccacgaggaggaggttcgggaactccaggagcagctggcccgacagcaggtccatgtggagcttgacgtggccaagccagacctcaccgcagccctgaaagagatccgcacgcagtatgaggcaatggcgtccagcaacatgcatgaagccgaagagtggtaccgctccaagtttgcagacctgacagacgctgctgcccgcaacgcggagctgctccgccaggccaagcacgaagccaacgactaccggcgccagttgcagtccttgacctgcgacctggagtctctgcgcggcacgaacgagtccctggagaggcagatgcgcgagcaggaggagcggcacgtgcgggaggcggccagttatcaggaggcgctggcgcggctggaggaagaggggcagagcctcaaggacgagatggcccgccacttgcaggagtaccaggacctgctcaatgtcaagctggccctggacatcgagatcgccacctacaggaagctgctagagggcgaggagaaccggatcaccattcccgtgcagaccttctccaacctgcagattcgagaaaccagcctggacaccaagtctgtgtcagaaggccacctcaagaggaacatcgtggtgaagaccgtggagatgcgggatggagaggtcattaaggagtccaagcaggagcacaaggatgtgatgtgaggcaggacccacctggtggcctctgccccgtctcatgaggggcccgagcagaagcaggatagttgctccgcctctgctggcacatttccccagacctgagctccccaccaccccagctgctcccctccctcctctgtccctaggtcagcttgctgccctaggctccgtcagtatcaggcctgccagacggcacccacccagcacccagcaactccaactaacaagaaactcacccccaagggcagtctggaggggcatggccagcagcttgcgttagaatgaggaggaaggagagaaggggaggagggcggggggcacctactacatcgccctccacatccctgattcctgttgttatggaaactgttgccagagatggaggttctctcggagtatctgggaactgtgcctttgagtttcctcaggctgctggaggaaaactgagactcagacaggaaagggaaggccccacagacaaggtagccctggccagaggcttgttttgtcttttggtttttatgaggtgggatatccctatgctgcctaggctgaccttgaactcctgggctcaagcagtctacccacctcagcctcctgtgtagctgggattatagattggagccaccatgcccagctcagagggttgttctcctagactgaccctgatcagtctaagatgggtggggacgtcctgccacctggggcagtcacctgcccagatcccagaaggacctcctgagcgatgactcaagtgtctcagtccacctgagctgccatccagggatgccatctgtgggcacgctgtgggcaggtgggagcttgattctcagcacttgggggatctgttgtgtacgtggagagggatgaggtgctgggagggatagaggggggctgcctggcccccagctgtgggtacagagaggtcaagcccaggaggactgccccgtgcagactggaggggacgctggtagagatggaggaggaggcaattgggatggcactaggcatacaagtaggggttgtgggtgaccagttgcacttggcctctggattgtgggaattaaggaagtgactcatcctcttgaagatgctgaaacaggagagaaaggggatgtatccatgggggcagggcatgactttgtcccatttctaaaggcctcttccttgctgtgtcataccaggccgccccagcctctgagcccctgggactgctgcttcttaaccccagtaagccactgccacacgtctgaccctctccaccccatagtgaccggctgcttttccctaagccaagggcctcttgcggtcccttcttactcacacacaaaatgtacccagtattctaggtagtgccctattttacaattgtaaaactgaggcacgagcaaagtgaagacactggctcatattcctgcagcctggaggccgggtgctcagggctgacacgtccaccccagtgcacccactctgctttgactgagcagactggtgagcagactggtgggatctgtgcccagagatgggactgggagggcccacttcagggttctcctctcccctctaaggccgaagaagggtccttccctctccccaagacttggtgtcctttccctccacttcttcctgccacctgctgctgctgctgctgctaatcttcagggcactgctgctgcctttagtcgctgaggaaaaataaagacaaatgctgcgccctt

SEQ ID NO: 10559 - protein, 432 aa, Homo sapiens
  ref <308>: DATABASE ACCESSION NUMBER: SWISS-Prot / P14136
  ref <309>: DATABASE ENTRY DATE: 2001-10-16
MERRRITSAARRSYVSSGEMMVGGLAPGRRLGPGTRLSLARMPPPLPTRVDFSLAGALNAGFKETRASERAEMMELNDRFASYIEKVRFLEQQNKALAAELNQLRAKEPTKLADVYQAELRELRLRLDQLTANSARLEVERDNLAQDLATVRQKLQDETNLRLEAENNLAAYRQEADEATLARLDLERKIESLEEEIRFLRKIHEEEVRELQEQLARQQVHVELDVAKPDLTAALKEIRTQYEAMASSNMHEAEEWYRSKFADLTDAAARNAELLRQAKHEANDYRRQLQSLTCDLESLRGTNESLERQMREQEERHVREAASYQEALARLEEEGQSLKDEMARHLQEYQDLLNVKLALDIEIATYRKLLEGEENRITIPVQTFSNLQIRETSLDTKSVSEGHLKRNIVVKTVEMRDGEVIKESKQEHKDVM

SEQ ID NO: 10560 - DNA, 4969 bp, Rattus norvegicus; identical to SEQ ID NO: 604
  ref <308>: DATABASE ACCESSION NUMBER: EMBL / AF029240
  ref <309>: DATABASE ENTRY DATE: 1998-07-17

SEQ ID NO: 10561 - DNA, 1665 bp, Homo sapiens; identical to SEQ ID NO: 605
  ref <308>: DATABASE ACCESSION NUMBER: EMBL / M20022
  ref <309>: DATABASE ENTRY DATE: 2000-03-04

SEQ ID NO: 10562 - protein, 623 aa, Homo sapiens; identical to SEQ ID NO: 606
  ref <308>: DATABASE ACCESSION NUMBER: SWISS-Prot / P29401
  ref <309>: DATABASE ENTRY DATE: 2002-06-15

SEQ ID NO: 10563 - DNA, 403 bp, Rattus norvegicus
  ref <308>: DATABASE ACCESSION NUMBER: EMBL / AF034237
  ref <309>: DATABASE ENTRY DATE: 1998-04-03
agtgcacgttcattttatcatattttggtattggtaatttgataacatttcatggtggtaaaatatagctctattttgggactttttatagaactacatttattcgaaagcataggaatatgttcttgtgattatcaggatctcctaatatttatctcaattcttttgtaagcttatggaatatttaattatttaagcatattttactgtaatatgtcatatctgaagtgtcagtagttactttgaataccgtactatttgctgtattttttcctgtgtgtatacgtatccttccagaacaggagtgtacctcctaatgttcactgtcacactgctctatgtgtgtccggttggttgaacactgtactgacttgagaataaactgcttcggcaatccattgtc

SEQ ID NO: 10564 - DNA, 2896 bp, Rattus norvegicus; identical to SEQ ID NO: 722
  misc_feature (1)..(2896): n=a, c, g or t
  ref <308>: DATABASE ACCESSION NUMBER: EMBL / AF034899
  ref <309>: DATABASE ENTRY DATE: 1998-05-27

SEQ ID NO: 10565 - protein, 322 aa, Rattus norvegicus; identical to SEQ ID NO: 723
  misc_feature (1)..(322): Xaa=Unknown amino acid

SEQ ID NO: 10566 - DNA, 1990 bp, Homo sapiens; identical to SEQ ID NO: 724
  ref <308>: DATABASE ACCESSION NUMBER: EMBL / L35475
  ref <309>: DATABASE ENTRY DATE: 1999-07-02

SEQ ID NO: 10567 - protein, 316 aa, Homo sapiens; identical to SEQ ID NO: 725
  ref <308>: DATABASE ACCESSION NUMBER: SWISS-Prot / Q15062
  ref <309>: DATABASE ENTRY DATE: 2001-10-16

SEQ ID NO: 10568 - DNA, 1111 bp, Rattus norvegicus
  ref <308>: DATABASE ACCESSION NUMBER: EMBL / AF035156
  ref <309>: DATABASE ENTRY DATE: 2000-07-21
aagacagccacagaggaggtcatggaacagttcctcctttccgtggggctgcttgtgtgcctcgtttgcctggtgaagtgtgtgaggttctcccggtacctttttctgagcttctgcaaggctttaccagggtctttcctgagatcaatgggacaatgggcagtgatcaccggagcaggcgatggcatcgggaaagcctattcatttgagctggccagacatggactcaatgttgtacttatcagccggacactggaaaagctacaggtcatctcagaagagattgagaggaccactggaagccgtgtgaaggttgtacaagcagattttaccagagaagacatctatgaccatattgaagaacaacttaaaggcttagaaataggagttttagtcaacaatgttggaatgctccccaacctgctcccaagtcatttcctgagcacgtccggtgagagccagagtgtcatccactgcaacattacctccgtagtcaagatgacacagcttgttctcaaacacatggaatcaaggcggagaggcctcatcttgaatatttcttcgggagtaggggttcgtccctggcctctgtatagcctgtactcagcttccaaggcttttgtgtgcacattttccaaggctttgaatgtggaatacagagataaaggaatcattatccaggtgctgaccccttattctgtttcaaccccaatgactaagtacctaaataccagcagggtgaccaagaccgccgatgagtttgttaaagaatccttgaaatatgtcacgattggagctgaaacctgtggctgccttgctcatgaaatcttggcgataattctgaacctgattccttccagaatcttctacagcagcaccacccaaagatttctcctgaagcagttctcagattacctgaagagcaacatcagcaacagatagtggggaaagggagtgggggtgggtagagttagggttgggtgggagtagggtgagcgtgggctggagggagagttgaggagatcgagagctcttccttggtggtagtcgtcggccagagggcgacggtcctttacctcccgaaagggagcctgtcacgccccaggcagtg

SEQ ID NO: 10569 - protein, 306 aa, Rattus norvegicus
  ref <308>: DATABASE ACCESSION NUMBER: SWISS-Prot / O54939
  ref <309>: DATABASE ENTRY DATE: 2002-06-15
MEQFLLSVGLLVCLVCLVKCVRFSRYLFLSFCKALPGSFLRSMGQWAVITGAGDGIGKAYSFELARHGLNVVLISRTLEKLQVISEEIERTTGSRVKVVQADFTREDIYDHIEEQLKGLEIGVLVNNVGMLPNLLPSHFLSTSGESQSVIHCNITSVVKMTQLVLKHMESRRRGLILNISSGVGVRPWPLYSLYSASKAFVCTFSKALNVEYRDKGIIIQVLTPYSVSTPMTKYLNTSRVTKTADEFVKESLKYVTIGAETCGCLAHEILAIILNLIPSRIFYSSTTQRFLLKQFSDYLKSNISNR

SEQ ID NO: 10570 - DNA, 1134 bp, Homo sapiens
  ref <308>: DATABASE ACCESSION NUMBER: EMBL / U05659
  ref <309>: DATABASE ENTRY DATE: 1999-06-30
tacacagagagccacggccagggctgaaacagtctgttgagtgcagccatgggggacgtcctggaacagttcttcatcctcacagggctgctggtgtgcctggcctgcctggcgaagtgcgtgagattctccagatgtgttttactgaactactggaaagttttgccaaagtctttcttgcggtcaatgggacagtgggcagtgatcactggagcaggcgatggaattgggaaagcgtactcgttcgagctagcaaaacgtggactcaatgttgtccttattagccggacgctggaaaaactagaggccattgccacagagatcgagcggactacagggaggagtgtgaagattatacaagcagattttacaaaagatgacatctacgagcatattaaagaaaaacttgcaggcttagaaattggaattttagtcaacaatgtcggaatgcttccaaaccttctcccaagccatttcctgaacgcaccggatgaaatccagagcctcatccattgtaacatcacctccgtagtcaagatgacacagctaattctgaaacatatggaatcaaggcagaaaggtctcatcctgaacatttcttctgggatagccctgtttccttggcctctctactccatgtactcagcttccaaggcgtttgtgtgcgcattttccaaggccctgcaagaggaatataaagcaaaagaagtcatcatccaggtgctgaccccatatgctgtctcgactgcaatgacaaagtatctaaatacaaatgtgataaccaagactgctgatgagtttgtcaaagagtcattgaattatgtcacaattggaggtgaaacctgtggctgccttgcccatgaaatcttggcgggctttctgagcctgatcccggcctgggccttctacagcggtgccttccaaaggctgctcctgacacactatgtggcatacctgaagctcaacaccaaggtcaggtagccaggcggtgaggagtccagcacaaccttttcctcaccagtcccatgctggctgaagaggaccagaggagcagaccagcacttcaacctagtccgctgaagatggagggggctggggtcacagaggcatagaatacacattttttgccacttt

SEQ ID NO: 10571 - protein, 310 aa, Homo sapiens
  ref <308>: DATABASE ACCESSION NUMBER: SWISS-Prot / P37058
  ref <309>: DATABASE ENTRY DATE: 2002-06-15
MGDVLEQFFILTGLLVCLACLAKCVRFSRCVLLNYWKVLPKSFLRSMGQWAVITGAGDGIGKAYSFELAKRGLNVVLISRTLEKLEAIATEIERTTGRSVKIIQADFTKDDIYEHIKEKLAGLEIGILVNNVGMLPNLLPSHFLNAPDEIQSLIHCNITSVVKMTQLILKHMESRQKGLILNISSGIALFPWPLYSMYSASKAFVCAFSKALQEEYKAKEVIIQVLTPYAVSTAMTKYLNTNVITKTADEFVKESLNYVTIGGETCGCLAHEILAGFLSLIPAWAFYSGAFQRLLLTHYVAYLKLNTKVR

SEQ ID NO: 10572 - DNA, 1108 bp, Rattus norvegicus; identical to SEQ ID NO: 788
  ref <308>: DATABASE ACCESSION NUMBER: EMBL / AF039085
  ref <309>: DATABASE ENTRY DATE: 2000-10-28

SEQ ID NO: 10573 - protein, 234 aa, Rattus norvegicus; identical to SEQ ID NO: 789
  ref <308>: DATABASE ACCESSION NUMBER: SWISS-Prot / O54980
  ref <309>: DATABASE ENTRY DATE: 2000-05-30

SEQ ID NO: 10574 - DNA, 1491 bp, Homo sapiens; identical to SEQ ID NO: 790
  ref <308>: DATABASE ACCESSION NUMBER: EMBL / AJ002308
  ref <309>: DATABASE ENTRY DATE: 1998-03-03

SEQ ID NO: 10575 - protein, 224 aa, Homo sapiens; identical to SEQ ID NO: 791
  ref <308>: DATABASE ACCESSION NUMBER: SWISS-Prot / O43760
  ref <309>: DATABASE ENTRY DATE: 2001-10-16

SEQ ID NO: 10576 - DNA, 546 bp, Rattus norvegicus
  misc_feature (1)..(546): n=a, c, g or t
  ref <308>: DATABASE ACCESSION NUMBER: Refseq / NM_020082
  ref <309>: DATABASE ENTRY DATE: 2002-11-05
ggaattccgctaatagctagactggtnccagtcagacggaggaaacctggccagcttttgcactttctaggtgacgatggacatacagaggacccaatccttgcttctgctcttgttgctgaccctgctggggttagggcttgtacagccctcctatggccaagatagaatgtaccaacggttccttagacagcatgtggaccctgagggtacaggcggcagcgacaactactgcaacgtgatgatgcagagacggaggatgacttctacccagtgcaaacgcttcaacaccttcatccacgaagacatctggaacattcgcagcatctgtgatactgccaatatcccatgcaagaatggcaatatgaactgtcacgaaggcatagtgagggtcactgactgcagagagacagggagctctgtgccccacaactgtaggtacagggcgagagccagcactaggcgagttgtcattgcctgtgagggtaccccagaggtcccagtgcactttgacagatagatgacatctgtagctgctactgctgg

SEQ ID NO: 10577 - protein, 147 aa, Rattus norvegicus
  ref <308>: DATABASE ACCESSION NUMBER: SWISS-Prot / O55004
  ref <309>: DATABASE ENTRY DATE: 2002-06-15
MDIQRTQSLLLLLLLTLLGLGLVQPSYGQDRMYQRFLRQHVDPEGTGGSDNYCNVMMQRRRMTSTQCKRFNTFIHEDIWNIRSICDTANIPCKNGNMNCHEGIVRVTDCRETGSSVPHNCRYRARASTRRVVIACEGTPEVPVHFDR

SEQ ID NO: 10578 - DNA, 938 bp, Homo sapiens
  ref <308>: DATABASE ACCESSION NUMBER: EMBL / BI460032
  ref <309>: DATABASE ENTRY DATE: 2001-08-24
agcggagaacagctgacaccaccaactttaaagagcccaactgatgaactgatcagcatgagaatactgttttttcatctctctgtcccatgacttcactctgcattcttcaaccaattagtgatctcttatttccacctactccaaatccttaaaaacaacagcctcaaactctttgaggaaatggatttgaggtttccttccatcttttggttcagcagccctgcaattaaacctctttctctgctgcaacccagtgtcttggcatattgacatgctgtgcacatcaggcaaaagacctattaccattacatgaggacccctccggagggagataatggtgggggcatttctgggaggctctgctttagtcagggtgcacgtgttgccgcaggaatcgctggtacatgccatcctggccataggagggctggaccagccccagccccagcagggtcagcagcaaaagcagaagcaatgaatgggtcctctgcagagccatcagtatcttagaggtgcctagaaaagaaagcaaggggcaggagaaaataagagagaagttgctgtggccagtacaatgacacagggcagggactgactgcgtggctgccaggtttgtgtggacagagtataaaaagagagaacacagggtgaggtcaggccccgtctcctcatgatgctttcacagtatctgtcatcccggcctgtggtttggcatcatagtgctgggtcaggaagtgtgtgtacttggagttatcctgagcgcaaggtcggtgggggtcagacaccagaaccagcacgaagaaccacacaaaaacgcccgggccattaacaatctctttccaacaggtcctggcgagggccaaaggggtctattaagcataactttttcataacggacgtaacggtacagaacggacacccccgtggaagaaaac

SEQ ID NO: 10579 - protein, 147 aa, Homo sapiens
  ref <308>: DATABASE ACCESSION NUMBER: Refseq / NP_002928
  ref <309>: DATABASE ENTRY DATE: 2002-11-05
MALQRTHSLLLLLLLTLLGLGLVQPSYGQDGMYQRFLRQHVHPEETGGSDRYCNLMMQRRKMTLYHCKRFNTFIHEDIWNIRSICSTTNIQCKNGKMNCHEGVVKVTDCRDTGSSRAPNCRYRAIASTRRVVIACEGNPQVPVHFDG

SEQ ID NO: 10580 - DNA, 4474 bp, Rattus norvegicus
  ref <308>: DATABASE ACCESSION NUMBER: EMBL / AF121217
  ref <309>: DATABASE ENTRY DATE: 1999-07-01
atgctcagctttgtggatacgcggactctgttgctgcttgcagtaacgtcgtgcctagcaacatgccaatctttacaaatgggatctgtacggaagggccccactggagacagaggaccgcgtggacaaaggggcccagcaggtccccgaggcagagatggtgttgatggtcccgttggccctcctggtccccctggtgcccctggcccccctggtccccctggcccccctggtcttactgggaactttgctgctcagtattctgacaaaggagtttcagctggccccggaccaatgggcttaatgggacccagaggccctcctggtgctgtcggagcccctggccctcaaggtttccaaggacctgctggtgagcctggtgagcccggacaaacgggtcctgcaggttcccgtgggccagctggccctcctggcaaggccggtgaagatggtcaccctggaaaacctggaagacctggcgagagaggagtcgttgggccacaaggtgctcgtggtttccctgggactcctggacttcctggcttcaaaggcattcgaggacacaacggtctggatggattgaaaggacagcctggtgcccagggtgtgaagggtgaacccggtgcccctggagagaatggaaccccaggtcaagcaggagcccgagggcttcctggtgagagagggcgtgtcggagctcctggtccagctggtgcccgtggcagtgatggcagtgttggccccgtcggccctgctggtcccattgggtctgctggtcctcctggtttcccaggtgctcctggtcccaagggtgaacttgggcctgttggtaaccctggccctgctggtcctgctggtccccgtggtgaagcgggtcttccgggtctttctggccccgttggacctcctggcaaccctggagcaaatggcctcactggtgccaagggagccactggactccctggtgttgctggggctcctggtctccccggtccccgtggtattcctggccccgttggtgctgctggtgccactggtcccagaggacttgttggtgaacctggtcctgctggctccaaaggagagactggtaacaagggtgagcctggctctgctggagcccaaggtcctcctggtcccagcggtgaagaaggaaagagagggtcccctggagagcctggatctgctggtcctgcagggcctccagggctgagaggcagccctggttctcgaggtcttcctggagctgatggcagagctggtgtgatgggccctcctggcaatcgtggttcaactggccctgctggagtccgaggtcctaatggagatgccggtcgccctggagaacctggtctcatgggacccagaggtcttcccgggtctcctggaaatgttggcccagctggtaaagaaggccctgtgggtctccctggcatcgatggcagacctggcccaattggcccagctggaccaagaggtgaagctggcaacatcggattccctggacccaaaggcccctctggtgatcctggcaaacctggtgagaaaggccatcccggtctcgctggtgctcggggagctccaggtcccgacggcaacaatggtgctcagggccctcctggacctcagggtgttcaaggtggcaaaggtgaacagggccctgctggtcctccaggcttccagggtctcccgggtccctctggtaccgctggagaagttggcaagccgggagaaaggggtcttcccggtgaattcggtctccctggtcctgctggtccaagaggagaacgtggtcccccaggtgagagtggagctgctggtccttctggtcctattggaatccgaggtccctctggagccccagggcctgatgggaacaagggtgaagctggtgcagtcggtgctccaggctctgctggtgcctctggtcctggtgggcttccaggagagaggggtgctgctggcatacctggaggcaaaggagaaaagggtgaaactggtctcagaggtgaaatcggcaaccctggtagagatggtgctcgaggtgctcctggtgctataggtgcccctggtcccgctggagcctcaggtgaccggggcgaagctggtgctgctggtccttctggccctgctggtcctcgaggtagccctggtgaacgtggtgaggttggtcctgctggccccaatggatttgctggtcctgctggttctgctggccaacctggtgctaaaggagaaaagggaaccaaagggcctaagggagaaaatggcatcgttggtccaaccggacctgtcggagctgctggcccatctggtcctaatggcccacctggccctgctggaagtcgtggtgatggagggccccctggtatgactggcttccctggtgctgctggacggactggtccccccggacccagtggtattactggcccccctggtccccctggtgctgctggtaaagaaggtattcgtggtccccgtggtgaccaaggtccagttggccgaactggagaaataggtgcatctggtccccctggatttgctggcgagaagggtccttctggagaacctggtaccacaggaccccctggcactgcaggtcctcagggtcttcttggtgctcccggtattctgggtctccctggctctcgaggtgaacgtggccagccaggtattgctggtgctctgggtgaacctggtcctctgggcattgcaggccctcctggggcccgtggtccccctggtgctgtgggcagtcctggagttaatggtgcccctggtgaagccggtcgtgatggtaaccctggcagtgatggtcccccaggtcgtgatggtcaacccggacacaagggagagcgtggttaccctggcaacattggtcccactggtgctgcaggtgctcctggtcctcatggttctgtgggtcctgctgggaaacatggaaaccgtggtgagcctggtcctgctggttctgttggtcccgttggtgctgtcggtccaagaggtcctagtggccctcaaggtattcgaggtgacaagggagagcctggtgacaaaggggccagaggtcttcctggcttaaaaggacacaatggattacagggtcttcctggtcttgctgggctgcatggtgaccaaggagctcctggtcccgtgggtcctgctggtcccaggggtcctgctggtccttctggccccattggcaaagatggtagatctggacatcctggaccagtcggtcctgctggcgttcgtggctctcagggtagccaaggtcccgctggtccccctggtccccctgggcctcctgggcctcctggtgtcagcggaggaggctatgactttggtttcgaaggaggcttctacagggctgaccagcctcgctcacagccttcactcagacccaaggactatgaagttgatgcaactctgaaatctctcaataaccaaatcgagacccttctcactcctgaaggctctagaaagaaccctgcccgcacatgccgtgacttaagactcagccacccagagtggaagagcgattactactggattgaccctaaccaaggatgcactatggatgccatcaaagtgtactgcgatttctctactggtgaaacctgcatccaggcccaacctgtcaacaccccagccaagaatgcatacagccgtgcccaggccaacaagcatgtctggttaggagagaccatcaatggtggcagccagtttgaatacaacgcagaaggggtgtcctccaaggaaatggcaactcagctcgccttcatgcgcctgctagccaaccgtgcttctcagaacatcacctaccactgcaagaacagcattgcgtacctggacgaggagacaggccgcctgaataaggctgtcattctgcagggctccaacgacgtcgaacttgttgctgagggcaacagcagattcacctacactgtccttgtcgatggctgctccaaaaagacaaatgaatgggacaagacagtcattgaatacaaaacgaataagccatctcgcctgccattccttgacattgcacctctggacatcggtggtactaaccaagaattccgtgtggaggttggccctgtctgtttcaaataagtgaactcaacctaaattaaaaaacaaaaacccctgaaaaaaactttctctttgccatttcttcctttaaaaaaaaaaaaaaaactgaaagctgaatccttccgtgttttctatgcacctacatcttaaactgtgggcaaaagagaaggattggtcagagcagtgtgcaatatgatccagataagtcccctccctcaggccctccccaaaacgtttgcagtgttatttctgtgggtttttttttaaacactctgacacctgttgtggacattgtcaacctctgtaagaaaacccaaataaaattttaaaaataaaataaaaagaaacccatgaacatttgcaccaaaaaaaaaaa

SEQ ID NO: 10581 - protein, 1372 aa, Rattus norvegicus; identical to SEQ ID NO: 5579
  ref <308>: DATABASE ACCESSION NUMBER: SWISS-Prot / P02466
  ref <309>: DATABASE ENTRY DATE: 2001-10-16

SEQ ID NO: 10582 - DNA, 1719 bp, Homo sapiens; identical to SEQ ID NO: 5580
  ref <308>: DATABASE ACCESSION NUMBER: EMBL / D21235
  ref <309>: DATABASE ENTRY DATE: 2001-11-30

SEQ ID NO: 10583 - protein, 363 aa, Homo sapiens; identical to SEQ ID NO: 5581
  ref <308>: DATABASE ACCESSION NUMBER: SWISS-Prot / P54725
  ref <309>: DATABASE ENTRY DATE: 2002-06-15

SEQ ID NO: 10584 - DNA, 405 bp, Rattus norvegicus
  ref <308>: DATABASE ACCESSION NUMBER: EMBL / AF050659
  ref <309>: DATABASE ENTRY DATE: 1998-07-15
ccacaccttctaatagtgccactccctgggccaagcatcggcaaaccatcacagtcatgttggcacatctccctttatatgccttcataaagttgtgtgtgactcagtttccctgtgacttggagctagctataacctgatcagctatactttaacctgtaactttaattaaaagaaaaaggagatggaggctgcagaggttttgatgaaagtcatgcgagcgaatgattaaaggtggggaaaggtgggatgagtaagacctaaccgtgcagaattcttgatgcgctgccttgccagactaacgtctctgtgaagggaatccatctaagagcagttatgcttcctttctagggtctagcacaaatgtattactcctttaaagaaaagaaaaagaaaaaaaaaaaa

SEQ ID NO: 10585 - DNA, 694 bp, Rattus norvegicus
  ref <308>: DATABASE ACCESSION NUMBER: EMBL / AF050663
  ref <309>: DATABASE ENTRY DATE: 1998-07-15
ttaggaattttgtttccttctgggagttgcttttgtcacttttgactcacacctcactgtagtccttagtgagtgggctgtgatattttcactttaagaaaaatgatgattttttttaaatatgaagaactagatataagccccagcttgtgtgccgttcagtcacccagatccttaacttacctatggtacctaatctccacagttagagctaacaggttttcttagccagtctagacttactagagtccgttactttgtcccttccctatctatctgctgtatcccagtcttaagtcgaaaggtaatttaaaacatgttagggataagcacactttgaaagatgttttctcaccctgaattttaggacactgggtactaaatttggaatacactagctattgagaacaaaatttggggttcaagaaagggatgattgaggctgttatgatacgggagaaacagcatcttaaacactgtaaacagaactcttctgcctgctgtttgtaaaagctctctggtaagatcttttacaaagaccaattttcttttttaaatgtaatttacctacctaatatttaaatgtcctgagacatgtatgtaaacttccaaaacctgtttgtctgtgtatttagaaaatacacaagaatctatcaaacttaaaatataaacttgtgagcactaaaaaaaaaaa

SEQ ID NO: 10586 - DNA, 31737 bp, Homo sapiens
  ref <308>: DATABASE ACCESSION NUMBER: EMBL / AC009812
  ref <309>: DATABASE ENTRY DATE: 2002-09-02
gaattccagctaggttctcccttttcatctccccatagtaatgattagttagtggggggtgaagaggagccttcccaaacacccaaggaaaagtacacttaaacaagcacatttcagccactcagctagagcttccttcatctactttgtgttattggtggcattagaagaaggctcacagctgtggcctctgagctcaaagaaagttgctgactttctttgtagactgaagttttagataataccatctccttttcccttagtctggtggaaggcagaggctatctctgaggcatccagacgtgcttagacctatccagaggactgaccgcagctcttggttttgaaccaaaaattttggctaattcaccttgagagagtgaccattggttagaaggtgagtagaaggagaatgggagagaaaaatccttagccaactgattagttgaaacttgaaataaagatggtggacaacattaatactgttactattaacatgtaattgaagaattgttttttgtagaatttactaatttggaaatcactggcctatttgtttatggcctgagggaaagtcggggtgagagagacaggaactggggagggaaggcttccctgaggaagcgacttttcaactgcatgttcatttgttaggggccaggcttgaggagcactgaggagaaaaagaggtttctccgaggggcggggacggctggcgcaaggaccctgtgaagcccatacattcgattttgctggaatttacccattttcctcttttctaagaaccatacttcttaaaaaaactgatctcgcctattagactacacaagacaagcatattcctgcccctttttatttgatggcttaacaatgtttaccgggggcgtttattgttggggttcagggacatagccatacttcattgtgcccaagggcaagtgcatcctggcctcagaaggaactgggtgaaatccccaaagctagcaggaaagaggcagaacaccttccccatttctactttttgtctgtttttttctcttcatgaagcttcttatcacttctgcagaccagctttgcgttcctctgaacacatgatcaactgcgatcacagaaaagcttagtttctatcacctcagttctgggtacaccactaactggccatcttgactctcatttccaaatatgggggcaaaaaaaaattgactgattccacctcagtcaagtattcacctttgagccaatcatccgtagtcaagaatgttgattttaaatagctgattttgagttagggagaagcggtttctccttacaccaggtaagtaggcagtctccaaagactccctgtgactttccacatcacgttttagctcttcctaccttgacttccagattctttaaaatatacttatatccttgttccatgttaaccgctacttattaccatgactttaaaaataataatacaccgggcgtggtggctcacatctgtaatcccagcaatttgggaagccgaggcgggcagatcacttgaggtcaggagttcgagaccagcctggccaacatggtgaaactctgcctctaatgaaaatacaaaaattagctaggtgtggctgcttgcgcctgtaatcgcagctacttgggaggctgaggtgggagaatcgcttgaacccaggaggcggaggttgcagtgagccaagatcacaatactgcactccagcctgggcgacagagcaagactctgtctcaaaaataaataaattaattaattaaataaaaaataaaaataaaataaatacaaaaaattagtctattagtctccttttatgattcaattaaacatctgtttttctccccctcatttatcttagagatcatctaattcactctattacaaaccagagatgttaagtgacttacctggggtcatacatttgtggcagaaccctctgtacagggtttttttcagttataaagtgctgcctcctactgaggtttgtgtctgggaccccaggacaaaataagaaaggacatagcaggaatctcacctaacctatgtctcagctcagaggggaaaacttcacagaagggatcagtctggcataagcataccattgaacaggtgtttcaagggggcaggacttggatgaccagatcttagaagaaagacttagtctaagtctctgtgcattctggagaggccttgctcaccagaaagcccaatgttggtgttcagctgctgcccaccttagggtacaatgaaccctattctgctggaagagttgttccatcaaagaaacgggatctttctcagaagtctcatgcaaatattaattcattcagacaaaagcagatgagtagacactgggtgactttgaaccactattcaaccgactctgggcctccattatcaaataaaatggttggataagaactaggcaacttccatgatggctcatagctctaaaatctcatgattccataataagtaaatagaaataacagaagaaattcatcagacaataaacacaaaacagacattaagtcctcaggctaaatgcaatttttaaaattcagccatttttttttaaaaaacccaaataattaaaagcttaaaatttttaagaaaatgatcttataaccactgcatgaaacactatcaacaataaattgttttttaaattatgaaaataggccgggcgcagtggctcacgcctgtaatcccagcactttgggaggctgaggcgggtggatcacgaggtcaggagatcgagaccatcctggctaacacggtgaaaccccgtctctactaaaaatacaaaaaattagccaggcatggtgcacacgcctgtagtcccagctacttgggaggctgaggcaggagaatcgcttgaacccgggaggcagaggttgcagtgagccaagatcgcgccactgcactccagtctggacgacagagcgagactccatctcaaaaaaaaaaaaaaaaaaaaagaaagaaaagaaaactctacatattaaattttatgacacagccaagtgattcccttctgcctcctatgacactcttaaacatagattacctcatggtaacaatactgttctggagcagaaagatacccatcttacataggaagacattgaaatccaaagaaatggatctcaggtgaaataccatgctcatgagaccataacctaaagtttcaagcagtaggcaaaactggaattttttgaaatcaagggaagctttatgttatccaataatactttcattttgattttttaaaggctaatgataaaaaattaaaaataaaaacacaaaagtacaaaaaaagctaatgatgaaactgcacatttagtagttaaatactaaaacaataaaacagggccgggggcggtgactcatgcctgtaatcccagcactttgggaggcctaggcaggcagatcatttgaggtcaggagttcgagaccagcctgaccaacatgatgaaaccccatctctactaaaaatacaaaaattagccaggcatggtggcacatgcctgtagtcccagctacttgggaggctgaggcaggagaatggcttgaaccagggaggtggaggttgcagtgagctacgatcccaccactgcactccagcctgggcgacaagagtgaaattccatctcaaaaaaaaaaagacaataaaacaaattaaagatgatattgaattctttaattatgcagtttaagcttacatatttgaaaatatgagtaaacttatttccctcaaaaatgccaaaaattgctatcaaatagactcagctatttttaggaactttggaagtataaaagttgaaaatttttcttcatgtttgccaatttgaaaaacatcctattgaagaatgtgtgcatgtgtttgtgtgtgtgtgcgtgtgtgtgttgaactgttccttggtgtgtgactgtgcctgtataactattctgatggggctaagtgtgaccaccgcatggagtaatgaagaaagacctgtgtttcactgtgtaagaaaaaatatctagtttcttcaaaaaagagaaaatccctatttacttacttcctcatgaaggactccttcagaaggagccatgaggtatgaaaagggtgttatttctaggcagtgtttccaaaagtgtagtagggtagataattttatgtggcatatgaataaacatttttatttgaataattatgcttttatttttatcattcctctccactctctccttcaacactcacagccttggtaccaccgtctgcctgtgatcactggttttattcacagcgtctatttgggtcctcatgtctgctgccacccgccaggccctgaaggtcacacctcgctgcctactccccacgtaactctctgcatcgtcttttctgaccctatatccctgtattctctaactagaggaacccttacctgtgtcctctgcaactcacaataaatcatcggccaaaactcagtttagagaaccaagtctaactgtctttccaataaagcaaagccattccctgttaaccaagagttataggtgacagtgaatggcttgctttctgtttcaattatttattgctatgtaacaaattgccccaaacttagtggcttaaaacaacaaacactttgtttgctttttaagcttctgtggattgatagctcagctggcagttcttggtgtctttcaaaagatgcctggaactagaggcaccaggaagccccaccaggaggccagcctcctccctctccaatgcaaggcatgtggtctgtctgtgtggtagtttgggggtcccagaagagatggaaaatggaaatttccaggccttctcaggacttaagccaagagctgccacagcgtcacttctgccaccttctattcattaagcagtctcaaagccaggccatattcaaggagagaagaaataaattccacctctgaggggtcgggggtggtgataaagaatttgcagtcttttttagtccatcccagtttctcaagcaggagagttccttttagttttctatgcagaacactttgagagtttctaaatctatttactattctttgggatagacttaaattccctgggtagaaaaagcatgatgtttccccagagcagtacaacattgaggtcaggagctggttcaaacacactgtaagtgattataaaattatgtacacatgagtacatataaatactacttgcctttcaaacaacactctgaaatccaagttttacaaccatgaacctcactttgaaggcgctctcacattctctactttcttagaaattaaaatttattttccagtccaggctgtggcagtcaccgaggaaggaggccagctcagcttggcagtgccagggacatggacttggggaacaccccccacagactgtgagctccttcagcagtgattgtgtcttattctttttcatgtctatgcatgcccttgcctgacacgtaacagacacccagcactgggtcaaggagtaggccgagcacactcaactggaagaaaagcaaacacgaagtcatcatgcccccaatatctactcatggaaaccaagagaaaggtccccatttgccaccaccaagcaagcagagactgttgttttatccaaaatcaaactgcacatccacagaggagagatttcaaacattataagaggatgtcaagaagaaagtttctggaagagagctctgcctttttctcctgtaagcatgctcatcacccagggactagtctgccaaggttatttagcagctaatccaagatttggatcattgcctgaagttacacttgttggtatattgggattggccttggaaaggtatcatacataagagtatgccagagtaaattccatttctttgaagatcagctccatggggctgattttggtccacagcagaacaggcactgattgcttacctgtgaagaatgcaaaataaagcatggattcaatgagaagagaagttcacagcctttggcttcctaaactctgtgtctatgatttttgaagatttttttatcctctgaattgtacacatttgaaatttcaagtgtagttttaaatattttattttaaatattttgttttaaatatttattttaaatattttgttgtaaatatttattttaaatattttgctccacttgatttattttacttctagtatttatttactagaagtattgttccacttctattggaataaaaattattttctaatcagtaaaagcatttctgtccacacctttaaaagttaaaattataaattatcaattataaatttattcaccccaaataaatgtaagcaaataaaagacattgtgtaaattaacctagcatgggaactcttcctgctttcatttaatctcacctccctctgtaaaatttcccagcgtattacactttcaggatatgtgtctccatttctgttcatttcaccatctactgattgcttcttctttttatttaaacttacaaacttatttcaggtaattaaagtcaatctgtaggagggaagccatggtatggacaattcaaaaatcactcatagctgggcgcagtggctcacgcctgtaatcccagcactttggaagactgaggcaggcggatcacgaggtcaagagttcaagaccggcctggccaatatggtgaaaccccatctctactaaaaaatacagaacagtagccgggcgtggtggcgctcatctgtagtccagctactcaggaggctgagggaggagaatcacttgaacctgggaggcagaggtttgcagtgagctgagatcacaccactgcactccagcctgggcgacagagtgagactttgtctcaaaaaaaaaaaaaaaaaatcacttgttcaatttggtaaatatattggcacttacatttgagtggctgtatgatgtttttcaaatcaaatctttttgctctgtggggaaaattgccaattttgctcagttgctcctgagcagtcactcccagcaatttcacctatactagaagcagatgctaaaagatttgccttccctctggcaaattctgtgacttctctgggactgggatcgacaaatgtttgggttcaaagggcttttctctttgcaaagtaaacagaaggaacagagatgtgaagagcgcaagtaattaagtaggaatatattgtcaattacctggaaggtactttacagattgtcaagtaaatgatgatacctccatcatcattcattggtgatatttgttaatgcatgtgcaatgtgcagcactgaggtgaacaaactgaaaaacagcctcatggttatttaggtgatgtgagggttccatcagcccggacactcatctacaacaaaacagcagttctttaaatcagagctttataaagatactacaaggagtaaccgatgtgataatgattggccctccactgcagtataagaactccctgcattttacaatgtcagatttatgtatgactacaaatatattaatttccagtccctctttattctcctaagaatcttagccaagtgtgtaaggggataattcccatccttgatgggagtcttcttcccaaattatccaagttctcctggtccttacaggggaacctcttcccggggagcccctgagaggtagctttttaagttcagtttggaacagatgactttgggaaggaaactctcccagactttgatactcctgtgaaagacatgcaaattcctgcccctcatttcttgttccaggggaattgcttcccgtttgcaccaggctctgcgcgatcagccttctgcccgaccagttctcaaagtgcccagctgcgtccatgggagggaaattttgttttctcctttagcagaattggggggccggctgacgtgagagtttcccagggcagaaacatgggtgccctggtatttgtgtgacgtcccgaaccgcgccacaccgggaggcctgaaggtggcggtggaaccggtgttccgcgcccgcccccgcgcgcctggggtctgggagggcagaggctgtcactgtttaacttggggccatcctcgcatagcacctctccttcgacgccagcctctgcaggtaaccgtaacatacgataggaggaaagacgagaacacccacgcaggccaaggtcaactaaaggcttctaaaaacaaaatctgtaaactgcccgtaaggaagtagcctggaagcttccaagtagccttggggggcgggagcggggacgggggagatcttaaaatgctgaggaaatactaagcgaggtttcaggtgacaaaggaaagagaaaataccacacaattttcctaaattagctaattagtaaaatccatttgagaaaaggacttgagattcaacctaaaatgaacatttaagttccctaaaaagtatagtgagaatggaaatggactagagctgttaagcctcaaaactagccggaatgccctgacaaagagagggggtgccttatgcgttgaaacctgctctaaatatggctaaagttttgcaataaaacatactttctactataatttgtgtttggcaaaatagaatgccccaaataaaaaaaaaacagtattattacctattaggaaacttctgtctggcatggtggctcatgcctgtactctcagcccagcactttgggaggctgaggtgggagggtagtttgagcccaggagttccatgccagcctaggcaacatagggagacacacctctattttttttttaaaggaaacttctgtatgtaatcatttcttacatgtaaggtgagataatgccatctgaaaattttttaaaaaccaatattatgcttttaaaaataacactaaatcactagcagcgggggacatagaaaatcagcgtctcggttagggtaaataaatgcactttggagggcctcagtagaacacctctatgcttgtcttacaccttcattttctgtaggtttctagaagcttagcggttcactggggtaggctgcctgcgttggccagtgcagaggaccgatggcacttgcaatctccctctctagatttatgacgctgcaatctccttgtcgaagtaatggtacatttttttttcttttattgttggcttttgcctggttttttttttgtttgtttgttttttgttttttttttattttttatttttgttctgcagataaatacaaactaataaagagacactaattctacttttccactttttttttttttttttttttgagatggagtcttgctctgtcgctaaggctggagtgcagtggcgccatctcaggtcactgcaacttctacctcccgagttcaagtgattctcctgcctgagcctcccaagtacgtgggactacaggtacatgccaccttgcccggctaatttttgtatttttagtggagatgggggtttcactgtgttggccaggctggtcgtgaactgttgacctcaggtgattcgcccgcctcagactcccaaagtgctagagttacaggcatgagccaccatgcctggccttactttttcacttttaatttttgtactaagttcttctgtttgtttagtgatataatgcaaaagtgatagtattgtcattttgataaagtcaaatttaagcaattaatccaacattttgcatatttggttaaagaaaaacatgattgactttaaaattcagaagctaaaaaaaattaagacaagatctacttgttttaaataggaaaaggaaaaactatatcgtcagtatgtgtgtatatttaaaaagaaaaaactgtatctccaatatgtgtgtatatatgtatgtaattgtgtgtgtatgcagtgtgtgtgagaaagtgtatgcaaacaagtcttatttgactgtagcaccttattactgatattctctccagtcatatatcatggtcaagcaagatgcattgctctaaaaacgtaaaagacacaattgcaaaattgttcgtacttccaaatttgcatccataaactttccaaagttgcatcatttttgcatagtgaaatgtctttgtaataaacacactaaaagaaattgtctttggttttgcagttcagatacagcagttagcctcctagagcctaacaaagtttcagtgaaagttagagccctgaataatttagagaagcatgaaaacaatttagctttcctacagcttgttctgtgaacctcaatgagaacctgtatgaaagtcggtgtttttttgttgttgttgttgttgttgtttttttaaaaaaaaaaaaaaaaggtgaggggagggagtagaattccttgttgaaaacattttgggaaacattttatatcctccctgttggagactcacaacatacattaacatattaaagactcttaaatttatgcttaattgattttcaacaaaggtgccatggtaattcaatagagaaaggatagtcttttcaacaaatggtgctaggacaattcaatagccacatgcaaaaagatatatttaaacctttgcctcccacatcatactcaaaatttaactccaaatgaatcatagatctaaatgtaagagctaaaactgcaaaactcttaaaagaaaacataggcataaatctttgtgacctttgtaggtacaacaaagcacaagcactaaaaaaaattgataaattggactttgtcaaaactcaaaacttctgtgcttcagaagacaccattaagaatagtgaagagaaaaaccacagagaaaaaacatgcaaatcatatctgattaaggccttgtatctagaatatagaaggaactcttgcaacttaataataagaaaattacccaattttaaaatgggcaaaaatttgaataaacatttgggtaaagaagctatatgaatggtcaataaacaaatgaaaagatactcattattggtcatcaaggaatgcaaatagaaaccacaatgagatactactacatacccactaggatggttagaatcaacagacaatgacaaatggtggtaaggatgtggagaagctgggactctcacacactgtcagtagaaatgcaaatggtgcaaccactttggaaaacgtgtggaaatttctttaaaagtttaacataagttcgccatatgatttacaattccattccaaagtatatacctaagagaaatataaaaatgtgtgtccacactaaaacttgtactcaaatgttattcacagtaccacaaagtgaaaacaacccacatgtccataaactgatgaatggataagctaaatgtggtatacttatatggaatactatttagcaataaaaagcaatgaagtattgatacatgctacaaaatggatgatcctcaaaaacattacgctaagccgggtgcagtggctcatgcctgtaatcccagcactttgggaggctgaggcaggcagatcacctgaggttgggaggtcgagaccagcctgactgacatggcaaaaccccgtctctactaaaaatacaaaattagccgggtgtggtgacacatgtctgtaatcccagctgaggcaggagaatctcttgaacctgggaggcggaggttgtggcgagtcgagatcgcgccattgcactcccccctgggcaacaagaacgaaactccatctcaaaaaacaaaacaaaacaaaacaaaatcattatgctaagtggcggggcagagtggctcatccctgtaatcccagcacttcgggaggccaaggtgggaggatcacttgagcccagaagttccagcttgaagtgggctatgattgcaccactgcactccagcctgagtgacagagcaagatctattgtataagtccatttatataaaatttctagaaaagagaaatctataaagacagaaagtagattagtggttgcctggggctggggtgaagaatagcgagtgatggcaaatagaaacaaattttttttgagggtggtgaaaatgttttaaacttgaattttggtgacgattgcataagtgtaaatacactaaaaatcatttaattgttcctttaagacaagtgaatttcatggcacataaattatacctcaataaagttgttatttgtttagaaagaaagggtgttctcttttcaaacaatttgggaaacattttatatcccacttcttggaaagtcacaacatatattaacatattaaagaacaagcaactctataataaagaaacctatttaattttaaatccagcataaaccaaatttatgtgaccacaagaatttttttaagttatgccaattacacctcttcaaaatgagcattaagggaaaaataatcaggagctgctgaaggtagtttgtttcactctctgtcccttaacttctctcttttttttttttcttttttttttgaggtggaatttcgctcttgttgcccaggctggagggcaatggtgctatctcagttcagtgcaacctttgcctcatgaattcaagcgattctcctgcttcagcctcccgagtagctgggattacaggcgtctgccaccacgcccggctaatcttgtatttttcatagagatggggtttcaccatgttagtcaggctagtctcgaactcctgacctcaggtgatctgcccaactcagcctcccaaagtgctgggattacaggtgtgagccaccacgcatggcccccttaacttctctaagcccttaagtccaagaaaatggcatatactttactaatctctgaggtttttttttttgcaaaaataaatgcaatttatataattaatgagtccatacacatcagtaagctggagaggtcttctcacccacccgtcactgccattgtatatacaggatttctgctggggtgtcaggctgagaggctgagattaaaaagtaattgtcattgaagctgaatgtaattgattacataatttgcagttgttcaagattaattcaatgaaaattacatcataaaattagggcattaacaaggattactgtcaaaaggaaagtaggtgtgaatcaagcaactgacttatatatgactcatacccaaaagcaccctgggttcatatttggatcatatataacagttgaatgacaaacatgtcctcactagatgtaattagggaaataattgatgcaaaccctacactacacaattctcatcatgggaaccacagttggaaaaatctggaagcccctgatgtgtgtgtctgttgttttgtatgggggtggggtcattgttgcagaagaaggtatgaaaaaattttgatcagaattgttacataaggaaggagaagcagaatttttaaaaatgcattaacaagtaagatgtgttctgcaaacaactctcctaaacttttttgtcagacaggaatgattgtggggatgagaaatggatgactgatttattatacccaattgattattttttttttttttagcagaggattttctggtcactggaaaacctactagacgaattctaaaagagctgtaacacttctgattgttttaatgtaaataatttcttatggctatattaacaaagaactattacagtcacatatatggattttttttttttttgaaatggagtctcactctgttgcccaggctggagtgcagtgtcacgatctcggctcactgcaagctccgcctcccgggttcacaccattctcctgcctcagcctcccgagtagctgggactacaggcgcccgccaccactcccagctaattttttgtatttttagtagagacagggtttcaccatgttagccaggatggtctccatctcctgaccttgtgatccacacacctcggcctcctgaagtgctgggattacaggcatgagccaccaagactggccaaggtggatttgttaataaaatgatactttttaatgatacttttgggaaaaatattggcttctatcaaggcacagattatgttattagccccttgtctttattccaaatatatgcaaataatgatactgatataagcccaaaagatgccagacagaatttcaggatattggttttcatatttgggaaatgaatataaactttcgatggaattatttggatatatgctgggtagaaggcaaaatgaacattataagacaccattttaaataactttggcatcaacctatcagtaattacttgtaactagaataatcttttaaatgaaagtgtgtatagaagaaagccagtgtcacccacgattaaacttttttttttttagaaactgatgtttattttccatccaccatttttccatattgcttaagagcctatgcaagaacagcttaagaccattcagtggttgctcctacccattcagtggcctgggcagtgggagctgcagaccagtcttccgtggcaggctgagcgctgcagtcttcagtagggaactgctgaataggcacagagggcacctgcacaccttcagaccagtctgcaacctcaggctgagtagcagtgaactcaggagctggagcagtcctttcaccctgaaattcctccttggtcacagccttttcagcagcaggctgctcttctttttcaatctcttcaggatctctgtagaagcagaaatcaggcatgacctcccacgggtgttcacgggaaatggtgccacgcatgcacagaacttcccaagccagcatccaccacatcaaacccactgagtgagctcccttgttgttgcatgggatggcaatgtgcacatagcgcagaggagaatctgtgttacacagagcaatggtaggtaggttaacataagatgcctccgtgaaaggctggtggtcagccctggggtcagtaaccacaagaagtcgtggctcctggaaggctgcctggatctggttagtgaaagttccaggagtgaagcagccagcaattggagtggctccagtggcagcagcaaacttcagcacagccctctggccagtattcctggatgatataacactgacatcagcagggttttcaatggcaacaatggcacgagctgccagcagaagcttctcccaggtcctcttcagatttatgatgtagataccatcacttttccttttatagatgtactgttccatctggaagtcaagattggtgccacctaagtgggttcctgctgcaaggaacttaaggacatcctcctccttcatttgcaggacatcaagggctccggacattgtgaaagtttccctttaagttacgacgggaatccagaacaacgccgtatggacccctctgtaggtagcgtggaaagcgattgaacttgttaaagcaaggtgagaaaagcaagaacttttggatactctctaaaaatctgaatttgtgtttcaagtacagatgtaaattacagcttaataacatgcttatgggagaagagcaagccaaaagggctgcaggtatgcaactccagaccactctgaaaacccaaaatgttttagaaagtcaagataacttaacgccttcctgctagctgcaccccctccaggttaatctattttttattcataatctatttttgttctgtatcacgcttttttgtaaagtttgtggctcaattacttctattttccaaattctacttccccttcttactggctttcctttgctagttttaaggttttcccctcaaaaccagggttacctcacctctgatggcaccccatcttcatatattcttcacaactcttcaggtaaactggatcctcgttttctcaaaaacagctttgcaattcctgatgtgcatttgctatcttataaataaaaaagtaaaatattatttgctcctacttatacacaaatgtttcttattaactccagattggatgaatagttgaggattttgaagaagttaggtggagaattcaggcaaaggctctttttaggaaaaataggaatgggaatagagcctatttgtgaggtggctgtgtccacctggaagccacttcttctatctgcatagatatgataaaggaaagacccaccccatcaagactttctccatatttatgtgtcatttcctttcagcctatagctcaaaatgatctctgttctctcctgctggattcaagcatcattaagtacttagcaattgttttaaataattttgaataataataatataatcaccttcacggaacatagagaaaaattagaaaagaaaataaaatcacccttttttccgctaccctaaagcaatctttgtcagggttttaatacatttctttcctttttctatcaacttaaagatctcccctgttgccaaaagttcttcataatcataatttataagctatgcataatccaatatttttgaaatatttaattttttgacattttaaaatcacaatactgtgatgaatatctttctgcatatactttatcaatatttggggtttaataattatcttttattaaccttagctctccaggactcaagcaataggacaaagcatgtcttgacgtctatttattccaacttcatataggagggtatcccactgtcagcaggtagaaatgctagcatttgttcatttggctgtctaaaggaatgcagtcttgttagtctaagccaaagaccgttgtgaacttgatggatgtcatttttatttttttatcattattattattattttattttgagacggagttttgctcttgtagcccaggctggattgcaatggcgcagtctcggctcactgcaacctcagcctcccaggttcaagcaattcttctgcctcaggctcccgagaagctgagattacaggcatgctccaccacacccagctaatttttttgtattgttagtagagacagggtttcaccatgttggccaggctagtctcaaactcctgatcccaagtaatccacccacctctgcctcccaaaagtgctgggattaaaggcgtgagccactgcacccggctgatggatgtcacttttaaagaaaaaataggtagtttggcttaaaagggaataagggggaaattcacctctaatagcgttttgttcttaataaaaaatactttacatttaatcttcattaaaggaccaagacaatgttattcaaggttatatgctgcagtgttttaatagattgaaagggttgataacttaaagttggtttcttcaatctcatttttcattgtttcctcccaaataacgtatttcattgttaatataaaagtgcactgttgtactcgcaaaagaacttggcagttcataaagaatgggaaaaaaacatatgcaaatctttgccaatctccaagtcccttaaggttaatttaactgtcacaagtaattttccaagaaagaaagcagcctgtgtccatgaaccagccagttaactcatctacacttgcagcgtgcattttcctcctgtgtaattttttcatcacagtatgacttactgtgtcagaagcattgataaaggtggcaaccacgttctgttcacactgaatatttgggcaaatctttgagcaaatcttgaagtcattctgcagcaggtaatgggtccttcatcacaaattcacaaatcaccagcattagataattacactacccatccataattcttttgttaagtggcacgtccatgcaatcaccgtacatgattctgaacacatcagtaagatactagggccaggcgcggtggctcacgcctgtaatcccagcactttgggaggccgaggggggcagatggctttaggccaggagctcgagaccagctggaccaacatggtgaaaccccgtctctactaaaaatacaaaaattagccaggcgtggtgtgcatgcctgtaatcccagctactcgggaggctgaggcatgagaattgcatgaacccaagaggcagtggttgccgtgagctgagatcacgccactgcactccagcctgggtgacagagcgagactcagtctctctctatataaaataatatatattcagtagttacaattatgcatatatattcagtatatgtatattcagtaaatagttacaattatacatatatacaacattatacatgtacatatacacatatatacattatacatgtatatatacatatatatatagagagagaagaagtgtttgccacgatcattctgtaatcacttaaaatattttttctgcctcctcaaaaaataaactctgtgcatcacaaatacatttttaatgtttctgcttgaaattagcaggttctaattaattttttcagggtgcatttggggtcatccttcttgttctaatcctgcttccatctgaccatgttgtttcgcactgcaccaggattaagaaacaagaaatagaatggatggctctgggcccctaacccttccctccatttccactggcatgtgaactcacggtgacctgttctggttatctcttgctgcataacaagctacctaaacctggtggcttaaacaaccatcatttattttgcacatgcatctgcaatttgggcagggctctgcggggacagcctatttctttccatgcagtgtcagctggtgactcaactgttaggggctgcaaccatccgagtcccttacatatctagtagttgatgctggcgaatggctggggcctcagctgaggctgctgctggctggaacacctgcatgtggcctttccatatgggatcttgccttccttacatagtgtttggatcccaagaatgtgtcccaagaggataaggcagaatgtatggcatttttacgacccatctttggaagtcatatggcatcacttccagctatatacactgttgatcaaggcagtcacggagactgcacaagttcaagcagaggggatatatgccacactacttgatgggaggagtgtcaccttctcattgtacaagtagcatgtgaaatgaaatatattatggtggctatttttgaaaaataaaacctacggtcgctaaataaatcagtcagatgtaaaatattcattgaaaaagacttgcttttgaaagtatttgtttacccaggtatttagatactaccattggtatctacataccattatataaaccttgcagtatctcagggatagtactcgtatgtgttgaatactatgctaggcactagggtccaaagagaaaaggcattattagccttgcccacaagaagtgtataatctactgggagagacccttcagtaaatagttacaattatacatgataggccgggtgcggtggctcacgcctgtaatcccagtactttgggatgccgaggcaggtggatcacttgaggtgtggagttggagaccagcctggccaatgtggtgaaaccccatctctactaaaaatataaaaaattagccaggcgtggtggcgcacccctgttatcccagctacttgggagctgagacaggagaatcgcttgaatacaggaggcagaggttgcagtgagccgagatcgtgccacttaactccagcctgggcaacagaacaagactctgtctcaaaaaaaataaaaaataaaaaattaagtgtgataaatgcaataatgtagataaatattgacatatatatgaaaagaacactgcatctcattctgtctgagtgaaacacagatgccttcataggggaggactcctttatgccagctctttcaaattctggtaataaaaaaggggggaaatcatttatattgaaggaagggggaattccactgccatatttctaatgtaggcaccaacttcaaggcaattggaaataaacgaccttgcacttggaatattctggttgcatcttgagttcaaattctgatgtatctcagtaagtcatgcctgacttagcaatgctttaatgtcgcacaaaagagaatcactcattaaaaacgataaattattatgtaataggaaatattataaacatgataactctaaatacctgacagatttccatgaaacaatttggtattggtttccaaacaattatttaccaataaatatgtattgaatggttatttgccattgttcttaaaatgcattggctcttgaatacaaagtgttctttttttttgtttttgttttttgttttgagacagagtctcgctctgtcgcccaggctggagtgcagtggcgcgatctcggctcactgcaagctccgcctcctgggttcacaccattctcctgccccagcctccctagtagctggcactacaggcgcccgccaccatgcccggctatttttttgtgttcttagaagagacggggtttcaccgtgttagccaggatggtctcaatctcctgacctcgtgatctgcccgcttcggcctcccaaagtgctgagattacaggcgtgagccaccgagcccggccgcaaagtgtttcttaattactcctaaaacaaacttaagccatatctatgtgagaacaaaatagatgtttttggataaaaagtaaacatccaaatcctttttcaccttctttttttttttttttttttgagatggagtttcgctcttgttgcccaggctggagtgcaatggcttgatatcggctcacctcaatctctgcctcccaggttcaagcgattctcttgcctcagcctcccgagtagctgggattacaggcatgcaccaccaggcccagctaattttgtatttttagtagagacggggtttctccatgttggtctggctggtcgcgcactcccgacctcgggtgatccgcccacctcggcctcccaaagtgctgggattacaggtgtgagccaccatgcccggcctcatctatgtgttttaaacatagatgagatcattttataaatattgctctgaatcttttttacttacaaattgatgatgggtatcttcccatgtcagttcacatagttccacttgatcctttttaacatgtcatgatgctatgtttgtaccataatccaaccattctctatttatggatgttaaaacgtttccattttttcactcttacaaatgatgccacagggaccatgcatatgcattcaataaataatctaatcaataagaaatacaaaaaggaaatatacagtaatattaacaatgatgttgctgggtgatgaactgtgagttgttttgacttttctatattttccaaaattttattttgttagtaatatgaaaaatagattctggtttttaaaaagatatcaatgcatcaggctgggcatggtggctcacgcctgtaatcccagcactttgggaggctgaggggagcagatcacctgagatcaggagttcaagaccagcttggccaacatggcaaaaccctgtgtctataaaaaatacaaaaattagccaggcatggtggcgggcacctgtaatcccagctactcgtgaggctgaggcagggagaatcgcttgaacctgggaggcggagactgcagtgagctgagatcgcgtcactgcactccagcctgggcgacagagcgggactccatctcaaaataaataaataaatacaacaaaaagatatcaatgcatcagatgcataagatagccagaaacaggttacttattatataagttggtttacatttggttttaattctacttcccatttcaaaatgtttgtttctaaggggagtcttccagacagaagcttcctgattggcctactcttcactctgtttttactccaactgggcaaacaatataggagtgacagaaatattttgggtaaacagctaagaacaggttgaaaatgccttccttatttggatagcttttaaagaaataccttcttgcttgtgggtttatctactggaaagctcattttctctttgaaaagcgcacactttgttagaagtcagcacagcagttacctttggatggggaaagggttcctgggaataatgggcttccaggatgctggtaatgttctgtttctgtacgtaaatgtagaatttacatacagatgtgctcaatttatgaaaattcatcaaactgtacaagtttgatgcttgcattttttaatgtatatgctattcttcccttacaagttagaaaacaaacaaacaaacaaggggccatgggaaaaaagatgctgtagttttggtgggtccaaagaaatccatgcaataaagggatgaagcaaggggactggtaatttagggagtactttcaggacaaaatgttatcaccctaccattcaagaaaatgagaaaaagcagctaatggcgaaatttccaccatatcaaatgtcttttgcttttaataaatataataatattgcaggctttgtctattattcctttattttatccataaagtggtcaccatgctagtgactttcttttccaggtcaatcctggaaacctttgtctaccaacaccttaacgcattaattaatgatgccctgtctctgcctctccactggttcttttctctcaacctgtaaaaatattcaaatctcttcctatcccggaaaattcctccccacaaccaggctccttcccaaacatttaccctcatttcctgtcatttcctctcctttcaactatcccttaactgcatgcaactcaaaaatattatgttggtctattacattatttaattgtattgtaatcatgtatgtgttacccacacccacatcatcagactggaagcaggaaagaggctattcatcatcgtattatcaaaccaagtaaaatgcctttctttctaaagactgtgtttattgttaccactaggaaactcttgagtaaagagtttcttatatcacggcacccccagtgccatgatataagaacacacttgtggccagtcatggtggctcatgcctgtaatcccagcactgtgggaggccgaggcaggtggatcacctgaggtcacgagttcgagaccagcctggccaacatggtgaaacccgtctctactaaaaataccaaaattagccgggcatggtggcagatacctgtcatcccagctactcaggaggctgaggcaggagaatcgcttgaacccgggaggcggaggttgcagtgagctgagattgtgccattgcactccagcctgggcaataagagtgaaattccatttcaaaaaaataaaaataaaaaagaagagcacacttgcctccttcctcactccaccactatctcccttggtgtttaggtctcttctgattcaggttccctaagacagcccactgctgcgcacccaacaggggaggaagtttggtaactttaaacaagcgggttagtcctctaaactctggacaagtagaaaccacatttctcctgctcaccactgtattcccagtaactggccaagtgcttgactcctggcagatgcttcataggtattcctctaataagtgaaatgaggaatgaatgaattagtgaaaaagaagtgtagaaagtgaatatgaagtagattagaaaagcttcttgggctggtgcagagaggacatttctagctttcaccttttgccacactttagagcaatgtttttcaaactactcattaagactaattagtaagtgggaaaaacaattttgtgagtcacagctgagttttaaaaatggaatagggtagctcacgcctgtaaccccagcactgagggaggtcgaagcaggaggattgcttgagcccagcctgggcaacacatggagaccagaccccccaacccggcccttgtcaaaaaaaaaagcaaacccaggtgtggtggcaaacacctgtggtctcagttgctcaaggaagctgaggtgggaagatcacttgagtccaggaattcggggctgcagtgagccaaaattgtgccactggactccagcctgggcaacagagcaagaccctgtctcaataaataaataaataaaagttaaatataaaaaaatgaaataggataaaacaaaacaaacaggagaatagaataggatttcagacagaaaaatggaatgaaaaaggaaagaaaatatcagtaaattgcaagtggtaagggaaagaaatatttaatacaactttttcttagttatatgtatacatacatacagaatgcctgttctagattcctatttgcaatatttcttatgtgtatcagggtcaaaaaactggtaagccactgccctagtagcctgtgaaggatagagttaatggagcttcaaaaggcagataaccaggagagaattagcttatcataaagatcagcaaagtttgagctgcttatttctttattattttttgttatcttttggtatttttggcagcacaaagtcttctaaacaagttaatcttcaactcaaaggcttagttcactttgaaatgtccagaaatctttcttgaaatagtggaagataaattatctgtttagaatttattacagtaccaattgtcacaaaagcacactttacagggctcactgcagaaatagcatgcactatttctttctctttgtcaaaaaattgagttttaatatatttcagaaacatatacatggaatttgataaagtttcacaatatttttgcttgtttcttaattctttcaacatgtttctcagggttgggtctgcctttacattttcttaattcactagcagtttcttcagtttcttaatgaaatagcactggtttgtatttttattttattttatttttaaagtttcttttcttttcttttctttttcttgaggcagagtcttgctctgtcacccaggctggagtgcagtggcgccatctctgctcactgcaacctccacctcctgggttcaagcgattcccctgcctcagcctcctgagtagctgggattacagctgtgtgccaccacacccggctaatttttttttttttttttttttgtatttttagtagagacagggtttcactttgttggccaggctggtctcaaattcctggtctcaactgctatgcccaccttggcctcccaaagtgctgggattacaggtgtgagccaccaggcccagcctgtgttgttgttttttttttttttttttttgagatggtgtcttgctctgtcacccaggctagaatgcagtggtgcgatgtcggctcactgcaacctccacctcctgggttcaagagattctcctgcctcagcctactgagtagctgggattacaggttcctgtcaccaagcctggctaatttttgtattttgagtagagacagggtttcaccattttggccaggctggtctcgaactcctgacctcaggtgatccacctgccttagcctcccaaagtgctgggattaaaggcgtgagccactgcgaccagccggcccagcctgtttttatgttatatatctaatttcgtagccttatttccagtcaaattgagtgggttacctttattatgatcagttcactttgattttctttgaccatgctaacctttagctgaaagttatagaacctgctattggatcttgctctggacaccgtatctggcaagaggcaattcccagagccctagctagagatgagggattacatcatcagtaaggtaggggcacagtgtactctgaacattcctggatgacatgcttgcctataaaggcaggggtgggttagaatgggaggaaggatgacgtcaaagagatcttgaaaaaaaaaacaaaaacgaaaaaacaaaggtatctcgctagtaggtctcttggctttcaggctctgtcttacagcaagctgtttgagtccaggagttcaagaccagcctgagcaacatagcaagaccccatctgtacagaataaatataaagattagctgggcttggtggtgcatacctgtggtcccagttactctggaggcttaggtgggagaatcgcttgagcccaggagttcaaggctgcagtgagccatgatcctatcaatgcactccagccagggtgacagagaccctgtctcctaaaagaagaagaaagaaagcagcttgaagcagaaaagacaaggaaccagaccagaaaggtaactctaaatactttcaagtacctaagaggccagtttcgtgaagttttctcacaatcgtagtaatcataaagggaagatgagggaacattggcctcaggtgcagtgagaggcccatcattggaggtatttaagtgcaggccacgtgatcattatctgagctgtgagtaggagaatgccagcactgggggtgggggagaagcccacagctatatggcctttttatctcctagatcctatttctagaagtcctcccagaacaaacaagcaaaaggcattctgctatggcttgaatgtgtcccccaaagttcatgtgttggaaacttaatccccaatgcaacagtgttgagatgggggccacttaagaggtgattagaggctgggtgcagtggctcatgcctgtaatcccagcactctgggaggctgaggtgggcggatcacttgaggtcagcagaccagcctggccaatgtggcgaaaccatgtctctactaaaagtacaaaaattagccaggtgcagtggcacacgcctgtaatcccagctactcgggaggctgaggcagaagaattgctggaacccaggaggcggaggttgcagtgagctgagattgctgccactgcactccagcctgggcaacagagtgagactttggctcaaagaagaagaaagaaagaaagaaagaagtgattaggccatgagaattctggcctcatgaatggatgaatgttgccatcacaggagtggcttgttatcgaaagaggggcttataataaaagccagttcgacccccctgctctctctcaacttgtgatgccctctgacatgctatgatgcagaaggccctccctagatgctggccactcaaccttgaacttctcaacctccagaactgtgagaaacacatttcttttctttataaattatccagtctctggtatacagcacaaagcagactaagatacattctgactccctggcaccactcagggccagagtcatctgttaaagacctgatgctactcagggagcttcctgacagccagcaattttgacagcgggatagggtaaaatgcctcaaggaaaacacagacaccaattctttttggccttattattttcttcttgtgctttcagagacctctttgagaaaaaggattgaactctgcaaacattgtccatggaagccctataaagatagggctttttcaaggaggtggaaaaaggaagtcgttgttcaatagggacaaagtttcagattcacaggaagaaaaagttctggagatctgtttctcggcaatgtgaatatacttaacattactaaactgcacacttaaaaatggttaagatggtaaattttaggttatgtatttttttaaccacagtaaaacaattttgtgtgttttgaaaaatcttatttcagcaagaaagctagataaactatctcttaattactcttcaatactccctagttgcaacagggattacaaatcaaactgagtgtttcaaatttctgggccatgtggttcatcctaataatagtaataattataataacccaggcacacaggagtttaatggtcttatccaagttgcctgagtacaaagcgcaattattaacctcacctaataaacatccagagatgcacgtagtccatgggttaggatgcaattttaatgctcaatattaaacaataacgggctttgagcttcaaaggaaacttggtaaattttataaaatatagaatatggcatagttagtgatactttgatggtctgtcacttaagataaaagagattaatgaatgtaaattagaaatatttcccagttctctagattgaggcttgccatgagagttgaaaaatttcattttcacaacatgtgatttaatgagatgacatacatagaaaacacacggcctatcaccagacatggagcacagctttttgtctcttttatttcataatgtacctagactagtacttggcatagtagatactcaatacacatttgtttagtaaatagcaagggctcaataaatgatagctaacaatgatttagattccaacaagaaagaaaaatgctcttaatggataatgtggcaaagctgacaacattggaataaattgcaactcaagatatttcacgaaaggaaatagttgctaaaaattcagaagcaataagaaagacagtgaaatctatgaaagataatacaaaagaggcagcttgtggaaacccaaggacggggcaataggtgggcatatactatgtcaatagatagtagtctcaaagtaaagcatgtggttttcagatgtccccttttctctgtgactcaatttatccaatattaatttaacacacatttaataagtaccaggtgctgtgcttgccctgaagatgcgaacatgtgtaaaatgaaacctaggccctgtcatttaaggagttcacagttaagaaggaaatgcagacacaacaaaatataatgtaacataacataatgtaatataagtggccacacagaagaagagtgtgattaatattgtcctactggtcaaaaaaaaaaaaaaaaaaagaaagaactataaaaggctgggcgcagtggctcacgcctgtaatgccagcactttgggaggcccaggcaggtggatcacgagatcaggagatcgagaccatcctggctaacacggtgaaaccctgtctctactgaaaatacaaaaaattagccgggtgtggtggtgggagcctgtagtcccagctactcgggaggctgaggcaggagaatggcgtgaactcggaaggcagagcttgcagtgagccgagatcgcaccaccacactccagcctgggtgacagagtaagactcttgtctcaaaaaataaataaatatatatatatatatatatatatatatatatatatatatatatagtcctactggtgtgagggatagaaagggcttcagagtgacagtctgccatgcagataattaaatagtagaaaaaaagatagatgaaaaggaaaagaaatatatgactattactgtaaaataataacgctaagaataataagcacctgtcacataccaggcactgtagcaggcacttgaagtgcattatatattacatgatgcagtatttttattgacatgtgaatgccatagtaaacaggaggaggatctgacctggtagaaagggcaggggaggaaaggtggaaagcaagttgccaggcccaatttccactcctttgcttggatcctcaccacctcccttcccccagcttccctctgctcactttccccttctccagagtcttaggtattatgcagagcctgaagccccctccttactcgttctatctggagaggttcaggccagaaaaacggaggcatccagtccagggaaagctgcatgggggtcaaactatagaagataatgacagtgattctcactttttattttattattattattatttatttattttgaggcagagtcttgctctgtcgcccaggctggagcgcagtgggacgatcttggctcactgcaacctccacctcccaggttcaagcgattcttaggcctcggcctcctgagtagctggatttacaggcgtgtgccaccacgccctgagatttttgtatttttagtagaaatggggtttcaccatgttggccaggctggtctcgaactccaggctggcctcaggtgatctgcctgcctcggcctcccaaagtgctgggattacaggcatgagccaccatgctggcctttttttttttttttttttttttttttttgattcttactttttaaagtctcagatgaaaaaaaaaatgcatcagccatcgttcaggtccaacattgcaagcactccctctgtgaacatacatattctgtagaaatactagtaaatgggcactggcaagttattaaagaatccacatatatcaattacttgcccacactatgacaaactggggaagaggtgcataaaccgtgaggaagcttctccagctttctacaatagcttccggcaagcctgaggccagggacgaaggattctacagtcgtgtttaactacaaagcttatctccctcttcctccacatcatttacttggtaattaatcaggaattaatcatagtcttacaattaaaagcatgatgaattcttgtcttgcaatgctttcactactaactaaatttcctattgttacttttacccgcacctgaaggtaaggagaacctcccttggcttcttgtatgtcttttctccacctaggattctgcatacattgttggagctcaaaaaaaaaaaaaaaaaaaaaaaagagacattctcaacaggtcaatttatggtagagatattatgtgtggtatagcgatataagaggatgtgtgttgcaagcttagggcagcggctcttagacttgagcacattgcaatcccttggagggcctgctgcaacagactgttggggccccgcccctgacccatcaccagtgggtccagcaggtctgggtgtggcccaaggatgtgcatttctaataagtttcaggtgatgctgatgccctctttgaaaatcactggtttagagtaattcaatttagctgtcatttaatccagaccaaaaaaagccattcaccttgtttagctgccgcaactgactcatgtgtcaaggaactcagaaatccaacttagagatcacaggtcaacctgtgcaaagcttgcggcttctctttaccagctgggagaaacacctaaccttccttctcacaatactgtgcagggattaacacaccaacaccaactccaccaccttgattctcgcctcctttaacccaaagggatccagggaaggacgctgattggccctgcttcagatacatacccaccaatctggagcgccggagatgagctgctgcgattggccagatccaaaggtgggcgtaagaaggaaatgttctggggaaccaaacaccgtggctaccacccgtgcgttgcaaaaagacagaagcagagctgtggtgggattttttctttcaagtaaactttttaattgaagtataacacacatacagaaaagtacacaagtggtaagtatagagtttgatgaatgtttacaaagtgaacacacccatataagtatcaccaagatcaagaaataaatcatgacgtttggagttttaaaaagtacacttcggtcttaatggcttcatttcagcccctttcagggcagttttctacatgtgctaactcatttccacaaaatagataaaatataaccaccagtgcttgtaatcaaagagtaagtcaaagcataaattcagccctctaaataacgaattaaatgcagaaaccttttggttttcatgactcttctctcatgataagagagcttttctttaaaaacaggaaaggctgtccagcagtcctcagaacctgtgtcttctcaccattcctcaatcacttgtcagctttttgtttccacattctgggatcttcatcttcttattctatgctgtgtttatacagtgctatggaataagccagtggcttaataattattgtaattttgcggtcttaattatgttttcttaactcagaaatagtcactatatcaaatgatgttaattccaataagttttagtaaaagggaaataggtgaatgtttgactccaaatattctgtaattatgtaaaagtaattgagctcattgctgaacatttgaaaataaccaaaatacaaagaaactgaaaatcatccatgctcccaccactcaggaataatcactgcaaacattatgatc

SEQ ID NO: 10587 - DNA, 797 bp, Rattus norvegicus
  ref <308>: DATABASE ACCESSION NUMBER: EMBL / AF053312
  ref <309>: DATABASE ENTRY DATE: 2000-03-03
cagcagggcactgggtacccagcactgagcagatcaattcctggagctgagaatggcctgcaagcatctgcccttcctggctttggcgggggtactgctggcttacctctgcagccagtcagaagcagcaagcaactttgactgctgcctcacgtacacaaagaacgtgtatcatcatgcgagaaattttgtgggtttcacaacacagatggccgacgaagcttgtgacattaatgctatcatctttcacctgaagtcgaaaagatccgtgtgcgctgacccaaagcagatctgggtgaaaaggattttgcacctcctcagcctaagaaccaagaagatgtaaaaacggatgcttttctgggatggaattggacacagcccaaggaggaaatgatcacagctggggttggaggtttcacctgcacatcactgcacagacctgatttgtgtcccagtggtcttgtccaatggatgaagttgattcatattgcatcatagtgtgtcatatttaagctcatattagagttaagttgtattttgtgttatttatagatccgaattttctatgtttagctatttaatgttaatttcccacaatctatgaggggcgcttagtagaaggttcaatattatgtttaaggcagtaagtttatatggcccttcttggaaacaataagctattgtaaaaatatttaatgttcttctgtgtgcttaattgtttcttaaattgatacgatttacttataaaacagaaaggaattataagaatatattgaaaataaaagaactgaaaggca

SEQ ID NO: 10588 - protein, 96 aa, Rattus norvegicus
  ref <308>: DATABASE ACCESSION NUMBER: SWISS-Prot / P97884
  ref <309>: DATABASE ENTRY DATE: 2002-06-15
MACKHLPFLALAGVLLAYLCSQSEAASNFDCCLTYTKNVYHHARNFVGFTTQMADEACDINAIIFHLKSKRSVCADPKQIWVKRILHLLSLRTKKM

SEQ ID NO: 10589 - DNA, 821 bp, Homo sapiens
  ref <308>: DATABASE ACCESSION NUMBER: EMBL / U64197
  ref <309>: DATABASE ENTRY DATE: 1999-07-02
ggtactcaacactgagcagatctgttctttgagctaaaaaccatgtgctgtaccaagagtttgctcctggctgctttgatgtcagtgctgctactccacctctgcggcgaatcagaagcaagcaactttgactgctgtcttggatacacagaccgtattcttcatcctaaatttattgtgggcttcacacggcagctggccaatgaaggctgtgacatcaatgctatcatctttcacacaaagaaaaagttgtctgtgtgcgcaaatccaaaacagacttgggtgaaatatattgtgcgtctcctcagtaaaaaagtcaagaacatgtaaaaactgtggcttttctggaatggaattggacatagcccaagaacagaaagaaccttgctggggttggaggtttcacttgcacatcatggagggtttagtgcttatctaatttgtgcctcacctggacttgtccaattaatgaagttgattcatattgcatcatagtttgctttgtttaagcatcacattaaagtgaaactgtattttatgttatttatagctgtaggttttctgtgtttagctatttaatactaattttccataagctattttggtttagtgcaaagtataaaattatatttgggggggaataagattatatggactttcttgcaagcaacaagctattttttaaaaaaaactatttaacattcttttgtttatattgttttgtctcctaaattgttgtaatgtcattataaaataagaaaaatattaataagacaaatattgaaaataaagaaacaaaaagtgcttctgttaaaaaaaaa

SEQ ID NO: 10590 - protein, 96 aa, Homo sapiens
  ref <308>: DATABASE ACCESSION NUMBER: SWISS-Prot / P78556
  ref <309>: DATABASE ENTRY DATE: 2002-06-15
MCCTKSLLLAALMSVLLLHLCGESEAASNFDCCLGYTDRILHPKFIVGFTRQLANEGCDINAIIFHTKKKLSVCANPKQTWVKYIVRLLSKKVKNM

SEQ ID NO: 10591 - DNA, 816 bp, Rattus norvegicus
  ref <308>: DATABASE ACCESSION NUMBER: EMBL / AF058791
  ref <309>: DATABASE ENTRY DATE: 1998-04-24
cggcacgagcttgagtttccgatgagacacaagactgaagaggaaaactgatctcccccaaagacatagaataattggtaaatctggacgagaacacaggctcataactgcgaagagcaaggatttttatattactcttataggaaagagaccgaaagatctttacaagctatcttgctaggagatgcccaaagtcaaaagaagccggaaagcacctccagatggctgggagctgatcgagccaacgttggatgaactagatcaaaagatgagagaagctgaaactgaaccccatgaggggaagaggaaggtggagtctctgtggcccatcttcaggatccatcaccagaaaacccgctacatcttcgacctcttttacaagaggaaagccataagcagagaactctatgaatactgcattaaagaaggctatgcagacaaaaacctgattgcgaagtggaagaagcagggctatgagaatctatgctgtctacgctgcatccagactcgagacaccaacttcggcaccaactgcatttgccgggttcccaagagcaagctggaagtgggtcgcatcatcgattgcacgcactgtggctgccggggttggtctggttgactgacgcccctgactcctctgcatcttggactttggaccttgggctcctgcttattgggccactgcctcctgaagcaactcttctcagattggcactcagagaaaagacccaggggaagcatgagctctacaggtgacagctttagtgttcaccagctgagatctgtaaaaataaaacctttagacctcttaaaaaa

SEQ ID NO: 10592 - protein, 144 aa, Rattus norvegicus
  ref <308>: DATABASE ACCESSION NUMBER: SWISS-Prot / AAC14190
  ref <309>: DATABASE ENTRY DATE: 2002-06-15
MPKVKRSRKAPPDGWELIEPTLDELDQKMREAETEPHEGKRKVESLWPIFRIHHQKTRYIFDLFYKRKAISRELYEYCIKEGYADKNLIAKWKKQGYENLCCLRCIQTRDTNFGTNCICRVPKSKLEVGRIIDCTHCGCRGWSG

SEQ ID NO: 10593 - DNA, 5413 bp, Homo sapiens
  ref <308>: DATABASE ACCESSION NUMBER: EMBL / AB014532
  ref <309>: DATABASE ENTRY DATE: 1998-07-15
cgccgcggggaccgggcagggctccccgtcggagtgcactgcgccggacacttcaagccctggagggacaggaaagccagaaatggacttcgtgagactcgctcgactgttcgccagggcccgccccatgggactgttcatcctgcaacacctggacccctgtagagccaggtgggcaggaggcagggaggggctgatgcggccaatgtgggcgcccttcagcagctcctcctctcagctgcccctcggccaggagcgtcaggaaaacacgggcagcctgggctctgacccgagccactccaactccacggccacgcaggaagaagacgaggaggaggaggagagttttgggaccctctctgacaaatactcctcccggagactattccgcaaatccgcagcccagttccataacctgcggtttggggaacggagagatgagcaaatggaaccggagcccaaattatggcgaggccggagaaacaccccgtactggtacttcttgcagtgcaaacacctgatcaaggaagggaagctggttgaagccctggacctgtttgagaggcagatgctgaaggaggagcgattgcagcccatggagagcaactacacggtgctgattgggggctgcgggcgggttggctacctgaagaaggccttcaacctctacaaccagatgaaaaagcgggacctggagccctcggacgccacctacacggccctgttcaacgtctgtgccgagtccccctggaaggactcagctctacagagcgccctgaagctccggcagcagctgcaggccaaaaacttcgagctcaacttgaaaacataccacgcgctgctgaagatggctgccaagtgcgcagaccttaggatgtgcctcgatgtgttcaaggaaatcatccacaaagggcacgtggtcacagaggagaccttcagtttcctgctcatgggctgcatccaagacaagaagacaggcttccggtacgccctccaggtgtggcggctgatgctgagtctagggctacagccgagccgggacagctacaacctgctgttggtggcagctcgggactgtggcctaggggacccccaggtggcctcagagctgcttctgaagcccagggaggaggcgactgtgcttcagcccccagtgagcaggcagcggccaaggaggacagcccaggccaaggcaggcaacctcatgtcagccatgctgcatgtggaggccctggagaggcagctgtttctggaaccttctcaggcacttgggcctccagagcctccggaagccagagtgcccggcaaggcccaaccagaggtggatactaaggcagagcccagccacacagcagccctcaccgcagtggccctgaagccacctcccgtggagctggaagtcaacctcctgacccccggggccgttccccctacagtggtctcctttggaacggtgaccaccccagctgaccggctggccttgatagggggcctggagggcttcctgagcaagatggcagagcacaggcagcagcccgacatcaggaccctcacgctactggccgaggtggtggagtccgggagtcctgcagagtccttgctgctggccctcctggatgagcaccaggtagaggccgacctgacattctttaacacgctggtgagaaagaagagcaagctgggagacctggagggggccaaggcgctgttgccggtcctggcaaagaggggcctcgtccccaacctgcagacattctgcaacctggccatcgggtgccacaggccgaaggacggtctacagcttctcacagacatgaagaagtcccaggtgacccccaacactcacatctacagtgccctcatcaacgcggccatcaggaagctgaactacacctatctcatcagcatcttgaaggacatgaagcagaacagggtcccggtgaacgaagtggtcatccgccagctggagtttgcagcccagtaccctcccacctttgaccggtaccaagggaagaacacctacctggagaagattgacggcttccgagcctattacaagcagtggctgacagtgatgcccgcagaggaaaccccgcacccctggcagaagttccggaccaagccccagggggaccaggacaccggcaaggaggctgatgacggatgtgcccttgggggcaggtgatgggagcacagctggaacaatgtgctcggcccccagtgctctgtgggagccccaggacaagtgagctggtgtcacctcctgcctgggggaagagccaggccctgaggaacagccgcagcgtgtcacaggtgttggtgaggacacacactaggcccaaggtgcctgtgctcccagcaggtccaagtgcagctccagccacctttgcgtgtcaccttcacgggacttccagctccagctacctttgtgtgtcacctcacacaccacaagggggctggggcatctggtccctggggcctgggccgccccgccgggttccataggccgatgctctgaaagaagagacgtggggctcgagagatttaaagattttatttttacaaatcacagctgatagacagcgaagccttccccatagagaccgtgctccaactcgggcctggggcactgctcgctgctcccaggaagggggtggcgtgacaggcaggaacctgcgaagtccagagtccagggtggagcgcgccagcctcagccagagcagccacgacagccacagtgtgtgcactcgatgatgcggccctgcaacggaggaggacagtgagacgatgccactgcgccacgctcgcccctgcacactcacatatgtggcaaccctcccacgaaggacctgccaccatgccatatagggacacacctcagaaacccttccttgacagctctggacagggaaaatttggctccctcatgaaggtagaaccagctgctgttgacaccgaggttacatctgtatgtctatttataatatgttctgcaaatccaacacacgtttgccaatcaagaaaaagaaatcggtgtgaatgagtctcgttattctgctaagtgagcatgacagaccctgcgatgagcagacgtggctctgctactgtttggggacttcaggggggcctctgggctggtacactctggtgggggaagagggcaggagactatgcacttgagtcacacccttctggcccagagccccccagaaagaagggtcttgtcccccaggcctggtgcggcccaacacttggccagccagaaagccctagaacagtggcttgtgtttattttactttttcaagttctttttttggaagaacaagaccatagtttaagtaaacaggatcctctggtgaaacccaggtaagtctacagcgggctgttttggccacagggctgaagcagcaccccagcccaccagcccctgacctggactccttgtggaatctgggcactcagaggaagggggcttctgccactctgccacctgtccctgcctccatcagaaaaccaacaccccagtcttccgtcggggaggcggcccttgctcgcccccactgctcagtacccaagtcctcagcatccagccacagctctccattgtcagtctcactgcagcataaaggggactcatgtgaagaggcccctgtgtggagctggggaaaagaaggccaggctggcagatgggcggtggggccaacaactgtgctgaggggctgcactgagcggccactgctgtgactctgcctcgggccacagctgcctttcagaggggcttggaaccggatggagctcagctcctgtccctcagcaccactcctgaggcgcctggcctaggagtggtacttggaacagaaagttctgaaagaagaaacacagtgggctgggcgcagtagctcatgcctgtaatcccggcactttgggaggctgaggcgggtggatcacctgaggtcgggagttcgagaccagcctgagcaacattgagaaaccccgtctctactaaaaatacaaaattagccaggcgtggtggtgcatgcctgtagtcccagctactcaggaggatgaggcaggagaaccgcttgaacccgggaggtggaggttgcagtgagccaagatggcatcactgcactccagcctgggcgacaaagcaagactccgtcttgggggggcgggaaagatagtgatggtaatgttaaagtatcactgtgaggactgaaagggacaggaactcactggttgtccttccctgatgtcaccctgccaccaccttgggattagggctccccaccaccatttcctaagtgaggaaaggggttcagtaatttgcccaaaagtggagttgagattgaccccagacctaacaaacacacagccacacgctgcctcacatggattcctgaatacagggacccactcccacgagggagagccagcaggacatccagggacaaaacgacattccagcccaaccaaataacataagatcccttgcagtcgactaaggcagaattttgagctgaaaacaacaccaagcttgagtgtcagacattaccacttccagcttgcttttgggcacgcggcagatgcagttcgtcccgaagttggtgtcccgtgtctgaatgcaccgcaggcagcacaagttctcatatccttgctttttccattttgcaatcaggtttttgtctgcatagccttctttaatacaatattcatagagttctgtcaaaaagatggggaaagagcatcaggccatggtctaaaaaccttccccacccttgatcaaaaaaagcattcaggccgggtgcagtggctcacacctgtaatcccagcactttgggaggccgaggcaggcggatcacctgaggtcaggagttcaggaccagcccggccaacatggtaaaaccccgtctctactaaaaatacaaaaattactcgggcgtggtagcagctgtaatcccagctacttaggaggctgaggcaggagaatcacttgaacccaggaggcggaggttgtagtgacctgaggtcgtgccactggactccagcctgggtgacagcgaaactccatctcaaaaaaaaaaaggcattcagtattgcaacgggacagtccttggaggaggaacaaaaaaaaaaagtacttaggccaggcaaggtgcctcacacctgtaatcccagcacttttggaagccaacgccagaggatcatttgagttaagaaaccagcctgggccaagggcccatctccacaaaaaatttaaaaattagctgggtgtggtggtgcacacctgtagtcacagctactcaggaggttgaggtgagaggatcccttgagcccagaaggttgaggctgcagtgagccatcattgcaccactgcactccagcctgtggaacagagcaagaccctgtttc

SEQ ID NO: 10594 - protein, 144 aa, Homo sapiens
  ref <308>: DATABASE ACCESSION NUMBER: SWISS-Prot / P41223
  ref <309>: DATABASE ENTRY DATE: 2002-06-15
MPKVKRSRKAPQDGWELIEPTLDQLDQKMREAETEPHEGKRKVESLWPIFRIHHQKTRYIFDLFYKRKAYSRELLDICYKEGLADKNLLAKWKKQGIGNLCCLRCIQTRDTNFGTNCICRVPKSKLEVGRIIECTHCGCRGCSG

SEQ ID NO: 10595 - DNA, 632 bp, Rattus norvegicus; identical to SEQ ID NO: 912
  ref <308>: DATABASE ACCESSION NUMBER: EMBL / AF061242
  ref <309>: DATABASE ENTRY DATE: 2000-03-03

SEQ ID NO: 10596 - protein, 100 aa, Rattus norvegicus; identical to SEQ ID NO: 913
  ref <308>: DATABASE ACCESSION NUMBER: SWISS-Prot / Q9R1B1
  ref <309>: DATABASE ENTRY DATE: 2001-10-16

SEQ ID NO: 10597 - DNA, 421 bp, Homo sapiens; identical to SEQ ID NO: 914
  ref <308>: DATABASE ACCESSION NUMBER: EMBL / AI005112
  ref <309>: DATABASE ENTRY DATE: 2000-03-03

SEQ ID NO: 10598 - protein, 103 aa, Homo sapiens; identical to SEQ ID NO: 915
  ref <308>: DATABASE ACCESSION NUMBER: SWISS-Prot / Q9Y5J6
  ref <309>: DATABASE ENTRY DATE: 2001-10-16

SEQ ID NO: 10599 - DNA, 4521 bp, Rattus norvegicus; identical to SEQ ID NO: 1082
  ref <308>: DATABASE ACCESSION NUMBER: EMBL / AF077354
  ref <309>: DATABASE ENTRY DATE: 2000-03-03

SEQ ID NO: 10600 - protein, 999 aa, Rattus norvegicus; identical to SEQ ID NO: 1083
  ref <308>: DATABASE ACCESSION NUMBER: SWISS-Prot / Q63617
  ref <309>: DATABASE ENTRY DATE: 2002-06-15

SEQ ID NO: 10601 - DNA, 715 bp, Homo sapiens; identical to SEQ ID NO: 1084
  ref <308>: DATABASE ACCESSION NUMBER: EMBL / BC002526
  ref <309>: DATABASE ENTRY DATE: 2001-07-13

SEQ ID NO: 10602 - protein, 840 aa, Homo sapiens; identical to SEQ ID NO: 1085
  ref <308>: DATABASE ACCESSION NUMBER: SWISS-Prot / P34932
  ref <309>: DATABASE ENTRY DATE: 2000-05-30

SEQ ID NO: 10603 - DNA, 1846 bp, Rattus norvegicus
  ref <308>: DATABASE ACCESSION NUMBER: EMBL / AF080568
  ref <309>: DATABASE ENTRY DATE: 1999-10-22
tgtgtcgcgggagctgccaggacttgcggggggcctctggtgccatgatccggaacgggcacggggctggcggcgctgctgggctgaagggtccgggcggccagcgcaccgtgcgggtgtggtgcgatggctgctatgacatggtgcattacggccactccaaccagctacgccaggcgcgggccatgggggactacctcattgtgggcgtgcatactgacgaggagattgccaagcataaggggcccccggtgtttacccaggaggagcggtacaagatggtacaggccatcaagtgggtggatgaagtggtaccggctgctccctacgtcaccacactggagacactggacaagcacaactgtgacttctgcgttcatggcaatgacatcacgctgacagtagatggccgagatacctacgaggaagtgaagcaggctgggaggtacagagagtgcaaacgcacccagggtgtgtccaccacagacctcgtgggtcgcatgctgctggtgaccaaggcccaccatagcagccaggagatgtcctctgagtaccgggaatatgctgacagttttggcaagccccctcacccgacacctgccggggacacactttcctcagaagtctcctcccagtgccctggggggcagagcccctggacaggggtgtcccagttcctacagacatcccagaagatcatccagtttgcttctgggaaggagccccagcccggggagacagtcatctatgtggctggtgcctttgacctgttccacatcgggcacgtggacttcctacaggaggtgcacaagctagccaagaggccctacgtcatcgcgggcctacactttgaccaggaagtaaaccggtacaagggcaagaactaccccatcatgaacctgcatgagcggactctcagtgtgctggcctgccggtatgtttcagaagtggtgattggggcaccgtactccgtcacagcagagctcctgaatcatttcaaggtggacctggtgtgtcatgggaagacagaaattgtacccgacagggatgggtctgacccctacgaggagcccaagagaagaggcattttctgtcagattgacagtggcagtgacctcactacagacctgattgtgcaaaggatcatcaagaacaggttggagtacgaagcacggaatcagaagaaggaagccaaggaattagcctttttggaggccctgaggcagcaggaggcacagcccagaggggagactgactagcttctgacccggagacgtcattcacgccgttgccctgtgcccacctcatctctccctgccctgctctgcttctgtgtcttggtgtcagctcacacaattccaaaggaaactggccttgctgagggtgctgtccctgcctgcctgcagcaggctctcagtcctttccactgagctgctcagagagggtagctagcccagtggggcagccccgtggacaggataagcagacggcacctgtgactggaggattgttgctgtgtatccttggcatccacgggttccaactgcccactgtcccagtttggctggggatacccctcctgcctgactggaagctgcacttctgcccaccgagctttggtgaaaggtacagaggctttggggacctctgttcctgggccaccctgcacgtgggcaccctctaccttggggcacgttctagcaccccattcctgactcctagaagatgcacttgccccgggtggctgggccagcgtggctgccctccgcacagacttcctggtcctcgtttgtacctcagtggctgatgtaaacctctttggctcaactgaataaagcctagtggg

SEQ ID NO: 10604 - protein, 367 aa, Rattus norvegicus
  ref <308>: DATABASE ACCESSION NUMBER: SWISS-Prot / P19836
  ref <309>: DATABASE ENTRY DATE: 2002-06-15
MDAQSSAKVNSRKRRKEVPGPNGATEEDGIPSKVQRCAVGLRQPAPFSDEIEVDFSKPYVRVTMEEACRGTPCERPVRVYADGIFDLFHSGHARALMQAKNLFPNTYLIVGVCSDELTHNFKGFTVMNENERYDAVQHCRYVDEVVRNAPWTLTPEFLAEHRIDFVAHDDIPYSSAGSDDVYKHIKEAGMFAPTQRTEGISTSDIITRIVRDYDVYARRNLQRGYTAKELNVSFINEKKYHLQERVDKVKKKVKDVEEKSKEFVQKVEEKSIDLIQKWEEKSREFIGSFLEMFGPEGALKHMLKEGKGRMLQAISPKQSPSSSPTHERSPSPSFRWPFSGKTSPSSSPASLSRCKAVTCDISEDEED

SEQ ID NO: 10605 - DNA, 1856 bp, Homo sapiens
  ref <308>: DATABASE ACCESSION NUMBER: EMBL / D84307
  ref <309>: DATABASE ENTRY DATE: 1999-01-21
attgcgggcggcggcgttcggagtcgccgggagctgccaggctgtccgcgccgccgctgcggggccatgatccggaacgggcgcggggctgcaggcggcgcagagcagccgggcccggggggcaggcgcgccgtgagggtgtggtgcgatggctgctatgacatggtgcattacggccactccaaccagctgcgccaggcacgggccatgggtgactacctcatcgtaggcgtgcacaccgatgaggagatcgccaagcacaaggggcccccggtgttcactcaggaggagagatacaagatggtgcaggccatcaaatgggtggacgaggtggtgccagcggctccctacgtcactacactagagaccctggacaaatacaactgtgacttctgtgttcacggcaatgacatcaccctgactgtagatggccgggacacctatgaggaagtaaagcaggctgggaggtacagagaatgcaagcgcacgcaaggggtgtccaccacagacctcgtgggccgcatgctgctggtaaccaaagcccatcacagcagccaggagatgtcctctgagtaccgggagtatgcagacagttttggcaagtgccctggtgggcggaacccctggaccggggtatcccagttcctgcagacatctcagaagatcatccagtttgcttctgggaaggagccccagccaggggagacagtcatctatgtggctggtgccttcgacctgttccacatcgggcatgtggacttcctggagaaggtgcacaggctggcagagaggccctacatcatcgcgggcttacactttgaccaggaggtcaatcactacaaggggaagaactaccccatcatgaatctgcatgaacggactctgagcgtgctggcctgccggtacgtgtcagaagtggtgattggagccccgtacgcggtcacagcagagctcctaagtcacttcaaggtggacctggtgtgtcacggcaagacagaaattatccctgacagggatggctccgacccataccaggagcccaagagaaggggcatcttccgtcagattgacagtggcagcaacctcaccacagacctcatcgtccagcggatcatcaccaacaggttggagtatgaggcgcgaaaccagaagaaggaagccaaggagctggccttcctggaggctgccaggcagcaggcggcacagcccctgggggagcgcgatggtgacttctaacctggcagaggccctggccggccctccccctgctctgcttctgcgccttctgcgtttggacataggactctgcagggccgccctctctaactggcctggctctggaagggctggtgaggactctgcctccttgcctgcctacaaggtgcctggtttgcagcaggctctccgctctttccagcaaagctgctcagagagggtgtccagcacagtggagaggccggaagtgagacgggcagacggcacctgcagcctgaaacgcaccgctcctgcgtgcgcccccacctggtccccggatgcccccaccacctggacagaggccacactgactgcccacccagctgtggcgggaggtgcagagcagggggctttagggagcagtgactgcggtcacccctttagttctctgggtgtagaccacaccacctcccactgggcaccccccaacacggtgtcctgccacccagcgcctggctccaggaaaacacgcttgccttccttcccggcagcttcgccactctccttatggactctgttctgtttgtacatggctgacggaaatctctttggtacaaccgaataaagcctggtggcagtgctgcgcggggctcccagccaat

SEQ ID NO: 10606 - protein, 389 aa, Homo sapiens
  ref <308>: DATABASE ACCESSION NUMBER: SWISS-Prot / Q99447
  ref <309>: DATABASE ENTRY DATE: 2002-06-15
MIRNGRGAAGGAEQPGPGGRRAVRVWCDGCYDMVHYGHSNQLRQARAMGDYLIVGVHTDEEIAKHKGPPVFTQEERYKMVQAIKWVDEVVPAAPYVTTLETLDKYNCDFCVHGNDITLTVDGRDTYEEVKQAGRYRECKRTQGVSTTDLVGRMLLVTKAHHSSQEMSSEYREYADSFGKCPGGRNPWTGVSQFLQTSQKIIQFASGKEPQPGETVIYVAGAFDLFHIGHVDFLEKVHRLAERPYIIAGLHFDQEVNHYKGKNYPIMNLHERTLSVLACRYVSEVVIGAPYAVTAELLSHFKVDLVCHGKTEIIPDRDGSDPYQEPKRRGIFRQIDSGSNLTTDLIVQRIITNRLEYEARNQKKEAKELAFLEAARQQAAQPLGERDGDF

SEQ ID NO: 10607 - DNA, 1430 bp, Rattus norvegicus
  ref <308>: DATABASE ACCESSION NUMBER: EMBL / AF083269
  ref <309>: DATABASE ENTRY DATE: 1998-08-24
atggcttaccacagcttcctggtggaacccatcagctgccatgcctggaacaaggaccgtactcagatcgccatctgccccaacaaccacgaggtgcacatctacgagaagagcggtgccaagtggaacaaggtgcacgagctcaaggagcacaacgggcaggtgacaggcatcgactgggcccccgagagtaaccgcattgtgacctgcggcacagaccgcaatgcctatgtgtggacgctgaagggccgcacgtggaagcccacgctggtcatccttcggattaatcgagctgcccgctgcgtgcgctgggcccccaatgagaacaagttcgccgtgggcagtggctcccgtgtcatttccatctgttattttgagcaggagaatgactggtgggtgtgcaaacacatcaaaaagcccatccgctccactgtccttagcctggactggcaccccaacaacgtgctcctggctgcaggctcctgtgacttcaagtgcaggatcttctctgcctatatcaaggaggtggaggaacggccagcccctacaccgtggggctccaagatgccctttggggagctgatgtttgaatcgagcagcagctgtggctgggtgcatggtgtctgcttctcggccggtgggagccgagttgcttgggtcagccatgacagcactgtgtgcctggtagatgctgagaagaagatggccgtggcaaccctggcctctgagacattaccgctcctggccatcaccttcatcacagaaaatagtctcgtggcagcgggccacgactgcttcccggtgctgtttacctatgacaacgctgcggggacattgagctttggtggccggctggatgtgcccaagcagaactcccagcgtggcctgacagcccgagagcgcttccagaacctcgacaagaaggccagctctgaagggggtgcagccacaggggctggcctggattcactgcacaagaacagcgtcagtcaaatctcggtgctcagcgggggcaaggccaagtgctcgcagttctgcaccacaggcatggacggtggcatgagcatctgggatgtgaagagcttggagtcagccttgaaggacctgaagatcagatgagctgtgaggagtgctgtcctcatcccacatgctggggaggagggaaaggggttggggaggctaagggctgctttgctgaatgcttctagggtgtagtacaggtctgcaaaggggatgctctctctccaaagaggggaagaggaaggtggggaactttcctgcctatttaatgaaaatgtgccttttaaagagatgctttcattcattgcaaaccaaaaacaagacaaaaaacccaaagcacaatgctggtcataaactgcttcaaaatgtgggctaataaacataccaaatgtgaaaaaaaaaaaaaaaaa

SEQ ID NO: 10608 - protein, 372 aa, Rattus norvegicus
  ref <308>: DATABASE ACCESSION NUMBER: SWISS-Prot / O88656
  ref <309>: DATABASE ENTRY DATE: 2001-10-16
MAYHSFLVEPISCHAWNKDRTQIAICPNNHEVHIYEKSGAKWNKVHELKEHNGQVTGIDWAPESNRIVTCGTDRNAYVWTLKGRTWKPTLVILRINRAARCVRWAPNENKFAVGSGSRVISICYFEQENDWWVCKHIKKPIRSTVLSLDWHPNNVLLAAGSCDFKCRIFSAYIKEVEERPAPTPWGSKMPFGELMFESSSSCGWVHGVCFSAGGSRVAWVSHDSTVCLVDAEKKMAVATLASETLPLLAITFITENSLVAAGHDCFPVLFTYDNAAGTLSFGGRLDVPKQNSQRGLTARERFQNLDKKASSEGGAATGAGLDSLHKNSVSQISVLSGGKAKCSQFCTTGMDGGMSIWDVKSLESALKDLKIR

SEQ ID NO: 10609 - DNA, 829 bp, Homo sapiens
  misc_feature (1)..(829): n=a, c, g or t
  ref <308>: DATABASE ACCESSION NUMBER: EMBL / AI768321
  ref <309>: DATABASE ENTRY DATE: 1999-12-23
tttttactatttgcattttattacctccacatttggaagcagttcatgaccagcatagtgctttgggggcattttttttttttttcaataaatgaaagcatttaaaaaaaaggcacgtattccttgaataggtaaaaaaagctccccatctgtcccctccctttttgagggagcagcccctatgggaactcgtattggtaccccagaaacattcagcaaagcaaccattagcctccctgacccctctccccgcttccccaaacagctaggatgaaggcaacatattcctcacaggtcatttgatcttgaggtccttcaaggctgactccaagctcttcacatcccagatactcatgccgccatccatgccagtggtgcaaaactgcgagcacttggccttgccgccgctgagcaccgagatctggctgacgctgttcttgtgcagcgagtctaggcccgcgcccgcagccgtgccaccctcggagctcgccttcttgtccaggttctggaagcgctcgcgggccgtcaagccacgctgcgagctctgcttaagaacgtccagccgcccgccgaagctcagcatccccgcggcggcgttataggtgaacagcaccgngaagcagtcgtggcccggtgccaccaggctgttgtctgtgatgaaggtcagcgccaagcagtggtagtgtttcagaagccagagtcgcgacggtcatcttcttgtcggcatcacaccagcacgacggtgctgtcgtggcttacctcagcccaccggtttccgcttggctgagataccgacgccctgtacccaaccgcagcttctgcttgaatt

SEQ ID NO: 10610 - protein, 372 aa, Homo sapiens
  ref <308>: DATABASE ACCESSION NUMBER: SWISS-Prot / O15143
  ref <309>: DATABASE ENTRY DATE: 2002-06-15
MAYHSFLVEPISCHAWNKDRTQIAICPNNHEVHIYEKSGAKWTKVHELKEHNGQVTGIDWAPESNRIVTCGTDRNAYVWTLKGRTWKPTLVILRINRAARCVRWAPNENKFAVGSGSRVISICYFEQENDWWVCKHIKKPIRSTVLSLDWHPNNVLLAAGSCDFKCRIFSAYIKEVEERPAPTPWGSKMPFGELMFESSSSCGWVHGVCFSASGSRVAWVSHDSTVCLADADKKMAVATLASETLPLLALTFITDNSLVAAGHDCFPVLFTYDAAAGMLSFGGRLDVPKQSSQRGLTARERFQNLDKKASSEGGTAAGAGLDSLHKNSVSQISVLSGGKAKCSQFCTTGMDGGMSIWDVKSLESALKDLKIK

SEQ ID NO: 10611 - DNA, 1607 bp, Rattus norvegicus; identical to SEQ ID NO: 662
  ref <308>: DATABASE ACCESSION NUMBER: EMBL / AF032120
  ref <309>: DATABASE ENTRY DATE: 1999-12-23

SEQ ID NO: 10612 - protein, 333 aa, Rattus norvegicus; identical to SEQ ID NO: 663
  ref <308>: DATABASE ACCESSION NUMBER: SWISS-Prot / Q9Z254
  ref <309>: DATABASE ENTRY DATE: 2002-06-15

SEQ ID NO: 10613 - DNA, 1416 bp, Homo sapiens; identical to SEQ ID NO: 664
  ref <308>: DATABASE ACCESSION NUMBER: EMBL / AF028824
  ref <309>: DATABASE ENTRY DATE: 1999-12-10

SEQ ID NO: 10614 - protein, 333 aa, Homo sapiens; identical to SEQ ID NO: 665
  ref <308>: DATABASE ACCESSION NUMBER: SWISS-Prot / O14908
  ref <309>: DATABASE ENTRY DATE: 2002-06-15

SEQ ID NO: 10615 - DNA, 663 bp, Rattus norvegicus; identical to SEQ ID NO: 1212
  ref <308>: DATABASE ACCESSION NUMBER: EMBL / AF091561
  ref <309>: DATABASE ENTRY DATE: 1998-10-20

SEQ ID NO: 10616 - protein, 221 aa, Rattus norvegicus; identical to SEQ ID NO: 1213
  ref <308>: DATABASE ACCESSION NUMBER: SWISS-Prot / AAC64584
  ref <309>: DATABASE ENTRY DATE: 2003-02-01

SEQ ID NO: 10617 - DNA, 31737 bp, Homo sapiens; identical to SEQ ID NO: 1214
  ref <308>: DATABASE ACCESSION NUMBER: EMBL / AF321237
  ref <309>: DATABASE ENTRY DATE: 2001-06-21

SEQ ID NO: 10618 - protein, 317 aa, Homo sapiens; identical to SEQ ID NO: 1215
  ref <308>: DATABASE ACCESSION NUMBER: SWISS-Prot / AAG45206
  ref <309>: DATABASE ENTRY DATE: 2002-06-15

SEQ ID NO: 10619 - DNA, 2856 bp, Rattus norvegicus; identical to SEQ ID NO: 1256
  ref <308>: DATABASE ACCESSION NUMBER: EMBL / AF095576
  ref <309>: DATABASE ENTRY DATE: 2002-07-10

SEQ ID NO: 10620 - protein, 621 aa, Rattus norvegicus; identical to SEQ ID NO: 1257
  ref <308>: DATABASE ACCESSION NUMBER: SWISS-Prot / AAC64408
  ref <309>: DATABASE ENTRY DATE: 2003-02-01

SEQ ID NO: 10621 - DNA, 2110 bp, Homo sapiens; identical to SEQ ID NO: 1258
  ref <308>: DATABASE ACCESSION NUMBER: EMBL / AB000520
  ref <309>: DATABASE ENTRY DATE: 1997-09-29

SEQ ID NO: 10622 - protein, 632 aa, Homo sapiens; identical to SEQ ID NO: 1259
  ref <308>: DATABASE ACCESSION NUMBER: SWISS-Prot / BAA22514
  ref <309>: DATABASE ENTRY DATE: 2003-02-01

SEQ ID NO: 10623 - DNA, 1752 bp, Rattus norvegicus
  ref <308>: DATABASE ACCESSION NUMBER: Refseq / NM_021852
  ref <309>: DATABASE ENTRY DATE: 2000-11-15
atgacaacttcgtctatcagacggcagatgaaaaacattgtgaacagttactcagaggctgaaatcaaagtccgggaagccacctccaatgacccatggggcccatccagctctctgatgactgagattgctgacctgacctataatgtggtacgcttctcggagatcatgagcatggtttggaagcggcttaatgaccatggcaagaactggcgacatgtatacaaggcgctgacactgctggactaccttatcaagacaggttctgagcgggtggcccagcagtgtcgggagaacatctttgctatacagactctgaaggacttccagtacattgaccgtgatggcaaggaccagggtattaatgttcgagagaagtcaaagcaactggttgctctcctcaaggatgaggagcggctgaaggttgagagggttcaggctctcaaaaccaaagagcgcatggctcaagtggccactggtgtgggcagcaaccagataaccttcggtcgaggctccagccagcccaacctttctatcagccactcggagcaggagtatggcaaggctgggggctcgccggcgtcctaccacggctctacttccccacgagtgtcctctgagttggagcaggcccggccacagaccagcggagaagaggagctgcagctgcaactggcacttgccatgagcagagaggttgcagaacaggaagaacgcctcaggcggggtgatgacctcaggttgcagatggctttggaagaaagccggagagacacagtaaaagttccaaaaaagaaagaggtgaaagcttgctgcaagccaggctcccactcgcagcagactaccttgttggatttaatggatgccctccccagctcaggccctgttgcacagaaaactgagccgtggagtacgggaacccctgccaaccagaccaacccctggggtggaaccgtggcacctgcgaacatttctgacccctggccttcatttggtaccaagccagctgcctctgtggacccctggggagtacctaccacagccagcatacagtctgtccccaagaactcagacccttgggcagcctcacagcagcctgcctccgatgctggaaaaacagctgatgcctggggggctgccaagcctagtcctgcctcagggtcctttgagctcttcagtaatttcaacggtacagttaaagacgatttttctgaattcgacaaccttcgaacttcaaaaaaaccagctgagtcaggggcctcagtaccaccccaggacagcagaaccacgagccctgacctctttgagtctcaatccttgacttctgcctcgagcaagcctagcagtgctcggaaaacacctgagtccttcctgggccccaatgcagcactggtgaacctggactcactggtgactaagcctgctccaccagctcagtccctcaatcccttcctggcaccaggtgctgctgctccagctcctgtcaatcccttccaggtcaaccagccccagccactgacactgaaccagcttcggggaagccctgtcctgggaagcagtgcgtcctttgggtctggtccaggggtggagacggtggctcccatgccctctgtagctccacactcagcactgggggccactggctcctcattgacaccactaggccctacagcaatgaacatggtaggcagtatgggtattcccccatcagcagctcagccagcgggcacaaccaaccctttccttctctag

SEQ ID NO: 10624 - protein, 583 aa, Rattus norvegicus
  ref <308>: DATABASE ACCESSION NUMBER: Refseq / NP_068624
  ref <309>: DATABASE ENTRY DATE: 2000-11-15
MTTSSIRRQMKNIVNSYSEAEIKVREATSNDPWGPSSSLMTEIADLTYNVVRFSEIMSMVWKRLNDHGKNWRHVYKALTLLDYLIKTGSERVAQQCRENIFAIQTLKDFQYIDRDGKDQGINVREKSKQLVALLKDEERLKVERVQALKTKERMAQVATGVGSNQITFGRGSSQPNLSISHSEQEYGKAGGSPASYHGSTSPRVSSELEQARPQTSGEEELQLQLALAMSREVAEQEERLRRGDDLRLQMALEESRRDTVKVPKKKEVKACCKPGSHSQQTTLLDLMDALPSSGPVAQKTEPWSTGTPANQTNPWGGTVAPANISDPWPSFGTKPAASVDPWGVPTTASIQSVPKNSDPWAASQQPASDAGKTADAWGAAKPSPASGSFELFSNFNGTVKDDFSEFDNLRTSKKPAESGASVPPQDSRTTSPDLFESQSLTSASSKPSSARKTPESFLGPNAALVNLDSLVTKPAPPAQSLNPFLAPGAAAPAPVNPFQVNQPQPLTLNQLRGSPVLGSSASFGSGPGVETVAPMPSVAPHSALGATGSSLTPLGPTAMNMVGSMGIPPSAAQPAGTTNPFLL

SEQ ID NO: 10625 - DNA, 1929 bp, Homo sapiens
  misc_feature (1)..(1929): n=a, c, g or t
  ref <308>: DATABASE ACCESSION NUMBER: EMBL / AF062085
  ref <309>: DATABASE ENTRY DATE: 1999-11-23
atgacaacttcgtctatcagacggcagatgaaaaacatcgtgaacaattactcagaggcagaaatcaaagtccgggaagccacctccaatgacccgtggggcccgtccagttctctgatgaccgagattgccgacctgacctacaacgtggtggccttctcggagatcatgagcatggtgtggaagcggctgaatgaccatggcaagaactggcggcatgtgtacaaggcgctgaccctgctggactacctcatcaagacaggctccgaacgtgtggcccagcagtgccgggagaacatcttcgccatccagaccctgaaggacttccagtacattgaccgagatggcaaggaccagggcatcaatgtgcgtgagaagtcaaagcaactggtggctctcctcaaggacgaggaacggttgaaggctgagagggcccaggctctcaaaaccaaagagcgcatggcccaggttgccactggcatgggcagcaaccagatcacctttgggcgaggctccagccagcccaacctctccaccagccactcggagcaggagtatggcaaggccgggggctccccggcctcctaccatggctcgcctgaggcctcgctgtgcccccagcaccgcacaggggccccgctgggtcagagtgaggagctgcagccactgagccagcgccaccccttcctgccgcacctggggctggcctcccgcccaaatggcgactggtcccagccctgcctcacttgtgaccgcgcagcccgagcctccacctccccgcgagtgtcctccgagctggagcaagcccggccccagactagtggagaagaggagcttcagctgcagctggcacttgccatgagcagagaagtggctgagcaggaagaacgcctcaggcggggtgatgacctcagattacagatggccctggaagaaagccgaagggacacagttaaaattccaaaaaagaaagagcatggctctctcccacagcagactacgctgttggatttaatggatgctctccccagctcgggccccgcggcccagaaagcagagccctggggcccgtcagcctccactaaccagaccaacccctggggcgggccagcggctcctgcgagtacttcagacccctggccatcgtttggtaccaagccagctgcctccattgacccatggggggtgcccactggagccaccgcacaatctgtccccaagaactcggacccctgggcagcttcacagcagcctgcctccagtgctgggaaaagagcttctgacgcgtggggcgcagtctccaccaccaagcccgtgtctgtctctgggtcctttgagctcttcagtaatctgaatggtacaattaaagatgacttttctgaatttgacaaccttcggacttcaaaaaaaacagccgaatctgtgacctctctgccatcccaaaacaatggaactaccagccctgacccctttgagtctcaacccctgactgtcgcctcaagcaagcccagcagtgcccggaaaacacctgagtccttcctgggccccaacgcggccctggtgaacctggactcactggtgaccaggcctgccccancagcccagtccctcaaccctttcctggcaccaggtgctcccgccaactcggcccctgttaaccctttccaggtgaaccagccccagccgctgacactgaaccagcttcgggggagcccagtcctggggaccagcacatcctttgggcctggcccaggagtggagtccatggctgtggcctcgatgacctccgcggccccacagccagctctgggggccactggttcctctctgacaccactgggccctgcaatgatgaacatggtgggcagtgtgggtatacccccatcagcagcccaggccactggcacaaccaaccctttccttctctag

SEQ ID NO: 10626 - protein, 584 aa, Homo sapiens
  misc_feature (1)..(584): Xaa=Unknown amino acid
  ref <308>: DATABASE ACCESSION NUMBER: SWISS-Prot / AAC78608
  ref <309>: DATABASE ENTRY DATE: 2003-02-01
MTTSSIRRQMKNIVNNYSEAEIKVREATSNDPWGPSSSLMTEIADLTYNVVAFSEIMSMVWKRLNDHGKNWRHVYKALTLLDYLIKTGSERVAQQCRENIFAIQTLKDFQYIDRDGKDQGINVREKSKQLVALLKDEERLKAERAQALKTKERMAQVATGMGSNQITFGRGSSQPNLSTSHSEQEYGKAGGSPASYHGSTSPRVSSELEQARPQTSGEEELQLQLALAMSREVAEQEERLRRGDDLRLQMALEESRRDTVKIPKKKEHGSLPQQTTLLDLMDALPSSGPAAQKAEPWGPSASTNQTNPWGGPAAPASTSDPWPSFGTKPAASIDPWGVPTGATAQSVPKNSDPWAASQQPASSAGKRASDAWGAVSTTKPVSVSGSFELFSNLNGTIKDDFSEFDNLRTSKKTAESVTSLPSQNNGTTSPDPFESQPLTVASSKPSSARKTPESFLGPNAALVNLDSLVTRPAPXAQSLNPFLAPGAPANSAPVNPFQVNQPQPLTLNQLRGSPVLGTSTSFGPGPGVESMAVASMTSAAPQPALGATGSSLTPLGPAMMNMVGSVGIPPSAAQATGTTNPFLL

SEQ ID NO: 10627 - DNA, 2691 bp, Rattus norvegicus
  ref <308>: DATABASE ACCESSION NUMBER: Refseq / NM_021686
  ref <309>: DATABASE ENTRY DATE: 2001-03-30
atggctctgataatggaaccagtgagcaaatggtctccgagtcaagtagtggactggatgaaaggtctcgatgactgcttacagcagtatattaagaactttgagagggagaagatcagtggagaccagctgctacgcattacacatcaggagctagaagatctgggagtcagccgtattggccatcaggagctgatcttggaggcagtcgaccttctgtgtgcactgaattatggcttagaaacagaaaatctaaaaaccctttctcacaagttgaatgcgtctgccaaaaatctacagaacttcataacaggaaggaggaggagcggccattatgatgggaggaccagccgaaaattaccaaatgactttttgacctcagttgtggatctgattggagcagccaagagtcttcttgcttggttggacaggtcaccatttgctgctgtgacagactattcagtcacaagaaataatgtcatacaactctgcttggagttaacaacaattgtgcaacaggattgcactgtctatgaaactgaaaataaaattcttcatgtgtgtaaaactctttctggggtctgtgaccacatcatatccctgtcgtcagatcctctggtttcacagtctgctcaccttgaagtgattcagctggcaaatatcaaaccaagtgaagggctgggtatgtatattaaatccacatatgatgggctccatgtaattacgggaaccacagaaaattcacctgcagatcggtgcaagaaaatccacgctggggatgaagtgattcaagtcaatcatcagactgtggtggggtggcagttgaaaaatttggtgaatgcactacgagaggacccgagtggtgttatcttaactttgaaaaagcgacctcagagcatgcttacctcagcaccagctttactgaaaaatatgagatggaagccccttgctctgcagcctcttatacctagaagtcccacaagcagcgttgccacgccttccagcaccatcagtacacccaccaaaagagacagttctgctctccaggatctctacatcccccctcctcctgcagaaccatacattcccagggacgaaaaaggaaaccttccttgtgaagatctcagaggacatatggtgggcaagccagttcataagggatctgaatcccccaattcatttctggaccaggaatatcgaaagaggtttaacattgttgaagaagacactgtcttatattgctatgaatatgaaaaaggacgatcaagtagtcaaggaagacgagaaagcacaccaacctatggcaagctacgacctatatctatgccagtcgaatataattgggtgggggactatgaagatccaaataagatgaagagagatagtagaagagaaaactctctacttcgatacatgagcaatgaaaaaattgctcaagaagaatacatgtttcagagaaacagcaaaaaggacacagggaagaagtcaaaaaagaagggtgataagagtactagcccaactcactactccttgctgcctagtttgcaaatggatgcattgagacaagacatcatgggcacaccagtgccagaaaccacactgtaccatacatttcagcagtcctctctgcagcacaaatcaaagaagaaaaacaaaggagctatagcaggcaagagcaaaagaagaatttcttgcaaggatcttggccgtggtgactgtgaaggatggctttggaaaaagaaagatgcaaagagctatttttcacagaaatggaagaagtactggtttgtcctaaaggatgcatccttgtactggtatattaatgaagaggatgaaaaagcagagggattcatcagtctgcctgaatttaaaatcgatagagccagtgaatgccgcaagaaatatgcattcaaggcctgccatcctaaaatcaaaagcttttatttcgctgctgagcatctcgatgacatgaacaggtggcttaatagaattaacatgctgactgcaggatatgccgaaagagagaggattaaacaagaacaagattactggagtgagagtgacaaagaagaagcagatactccatcaacaccaaaacaagacagccctccacccccatatgacacatacccacggcctccctctatgagttgtgccagtccttatgtggaagcaaaacacagccggctttcctccacagagacctctcagtctcagtcttcacatgaggaatttcgacaggaagttactgggagcagtgctgtgtcccccattcgcaagacagccagtcagcgccgctcctggcaggatttaatcgagacgccactgacaagttcaggcttacactatcttcagactctgcctctggaagattctgtcttctctgactcggcagccatctcccctgagcacaggcggcagtccactcttccaactcagaagtgccacctccaggatcattatggcccataccctttagctgagagcgagaggatgcaagtgttgaatggcaatgggggcaagcctcgaagttttactctgcctcgagatagcgggttcaaccattgctgtctgaacgcaccagttagtgcctgcgatccacaagatgacatacagccaccagaggtggaggaagaagaggaggaggaggaagaggaggcagcaggagaaaacataggcgagaaaagctaa

SEQ ID NO: 10628 - protein, 896 aa, Rattus norvegicus
  ref <308>: DATABASE ACCESSION NUMBER: Refseq / NP_067718
  ref <309>: DATABASE ENTRY DATE: 2001-03-30
MALIMEPVSKWSPSQVVDWMKGLDDCLQQYIKNFEREKISGDQLLRITHQELEDLGVSRIGHQELILEAVDLLCALNYGLETENLKTLSHKLNASAKNLQNFITGRRRSGHYDGRTSRKLPNDFLTSVVDLIGAAKSLLAWLDRSPFAAVTDYSVTRNNVIQLCLELTTIVQQDCTVYETENKILHVCKTLSGVCDHIISLSSDPLVSQSAHLEVIQLANIKPSEGLGMYIKSTYDGLHVITGTTENSPADRCKKIHAGDEVIQVNHQTVVGWQLKNLVNALREDPSGVILTLKKRPQSMLTSAPALLKNMRWKPLALQPLIPRSPTSSVATPSSTISTPTKRDSSALQDLYIPPPPAEPYIPRDEKGNLPCEDLRGHMVGKPVHKGSESPNSFLDQEYRKRFNIVEEDTVLYCYEYEKGRSSSQGRRESTPTYGKLRPISMPVEYNWVGDYEDPNKMKRDSRRENSLLRYMSNEKIAQEEYMFQRNSKKDTGKKSKKKGDKSTSPTHYSLLPSLQMDALRQDIMGTPVPETTLYHTFQQSSLQHKSKKKNKGAIAGKSKRRISCKDLGRGDCEGWLWKKKDAKSYFSQKWKKYWFVLKDASLYWYINEEDEKAEGFISLPEFKIDRASECRKKYAFKACHPKIKSFYFAAEHLDDMNRWLNRINMLTAGYAERERIKQEQDYWSESDKEEADTPSTPKQDSPPPPYDTYPRPPSMSCASPYVEAKHSRLSSTETSQSQSSHEEFRQEVTGSSAVSPIRKTASQRRSWQDLIETPLTSSGLHYLQTLPLEDSVFSDSAAISPEHRRQSTLPTQKCHLQDHYGPYPLAESERMQVLNGNGGKPRSFTLPRDSGFNHCCLNAPVSACDPQDDIQPPEVEEEEEEEEEEAAGENIGEKS

SEQ ID NO: 10629 - DNA, 3070 bp, Homo sapiens
  ref <308>: DATABASE ACCESSION NUMBER: EMBL / AF418270
  ref <309>: DATABASE ENTRY DATE: 2002-01-16
gagctctgcgctctgcacggaaccgaccccgtacccatggctctgataatggaaccggtgagcaaatggtctccgagtcaagtagtggactggatgaaaggtcttgatgactgtttgcagcagtatattaagaactttgagagggagaagatcagtggggaccagctgctgcgcattacacatcaggagctagaagatctgggggtcagccgcattggccatcaggaactgatcttggaagcagttgaccttctgtgtgcattgaattatggcttggaaacagaaaatctaaaaaccctttctcacaagttgaatgcatctgccaaaaatctgcagaattttataacaggaaggagaaggagtggccattatgatgggaggaccagccgaaaattgccaaacgactttctgacctcagttgtggatctgattggagcagccaagagtctgcttgcctggttggacaggtcaccatttgctgctgtgacagactattcagttacaagaaataatgtcatacaactctgcctggagttaacaacaattgtgcaacaggattgtactgtatatgaaacagagaataaaattcttcacgtgtgtaaaactctttctggagtctgtgaccacatcatatccctgtcgtcagatcctctggtttcacagtctgctcacctggaagtgattcaactggcaaacattaaaccaagcgaagggctgggtatgtatattaaatctacatatgatggcctccatgtaattactggaaccacagaaaattcacctgcagatcggtgcaagaaaatccatgctggcgatgaagtgattcaagttaatcatcagactgtggtggggtggcagttgaaaaatttggtgaatgcactacgagaggacccgagtggtgttatcttaactttgaaaaagcgacctcagagcatgcttacctcagcaccagctttactgaaaaatatgagatggaagccccttgctctgcagcctcttatacctagaagtcccacaagcagcgttgccacgccttccagcaccatcagtacacccaccaaaagagacagttctgccctccaggatctctacattccccctcctcctgcagaaccatatattcccagggatgaaaaaggaaaccttccttgtgaagacctcagaggacatatggtgggcaagccagtgcataagggatctgaatcaccaaattcatttctggatcaggaatatcgaaagagatttaatattgtcgaagaagatactgtcttatattgctatgaatatgaaaaaggaagatcaagtagtcaaggaagacgagaaagcaccccaacttatggcaagctacgacctatatctatgccagtggaatataattgggtgggggactatgaagatccaaataagatgaagagagatagtagaagagaaaactctctacttcggtatatgagcaatgaaaagattgctcaagaagaatacatgtttcagagaaacagcaaaaaggacacagggaagaagtcaaaaaagaagggtgataagagtaatagcccaactcactattcattgctacctagtttacaaatggatgcactgagacaagacatcatgggcactcctgtgccagagaccacactataccatacatttcagcagtcctcactgcagcacaaatcaaagaagaaaaacaaaggtcctatagcaggcaagagcaaaagacgaatttcttgcaaagatcttggccgtggtgactgtgagggctggctttggaaaaagaaagatgcgaagagttacttttcacagaaatggaaaaaatattggtttgtcctaaaggatgcatccctttattggtatattaatgaggaggatgaaaaagcagaaggattcattagcctgcctgaatttaaaattgatagagccagtgaatgccgcaaaaaatatgcattcaaagcctgtcatcctaaaatcaaaagcttttattttgctgctgaacatcttgatgatatgaacaggtggcttaacagaattaatatgctgactgcaggatatgcagaaagagagaggattaagcaggaacaagattactggagtgagagtgacaaggaagaagcagatactccatcaacaccaaaacaagatagccctccacccccatatgatacatacccacgacctccctcgatgagttgcgccagtccttatgtggaagcaaaacatagccgactttcctccacggagacttctcagtctcagtcttctcatgaggagtttcgccaggaagtaactgggagcagtgcagtgtctcccattcgcaagacagccagtcagcgccgctcctggcaggatttaattgagacgccactgacaagttcaggcttacactatcttcagactctgcccctggaggattctgtcttctctgactccgcggccatctccccagagcacaggcggcagtctaccctgccaactcagaaatgccacctgcaggatcactatgggccataccccttagctgagagtgagaggatgcaagtgctaaatggaaatgggggcaagcctcgaagttttactctgcctcgagatagcgggttcaaccattgctgtctgaatgctccagttagtgcctgtgacccacaggatgacgtgcaacccccagaggtggaggaagaggaggaggaggaggaggaggaaggggaggcagcaggggaaaacataggagaaaaaagctaatacactgcgagagttggtagaacctctccatgccaaatcggatccacttctgttggcactcaacccattggactcacagattgataagctaatgtttagagaatttagatcggagagagtcggtacggcgcagactcaacatcaacctcttgcaagcaactaaaatggcctcgtccttgctgtttataacagaaaacagacttgtaaaaagcttagatcatcaagtgttttggattgggggcctcccaaagggatataagaggggcaggccactcttaagaagaatgcgagctttctacattgggactagcataagatcaaagccaatcaagatgga

SEQ ID NO: 10630 - protein, 893 aa, Homo sapiens
  ref <308>: DATABASE ACCESSION NUMBER: Refseq / NP_055742
  ref <309>: DATABASE ENTRY DATE: 2002-01-20
MALIMEPVSKWSPSQVVDWMKGLDDCLQQYIKNFEREKISGDQLLRITHQELEDLGVSRIGHQELILEAVDLLCALNYGLETENLKTLSHKLNASAKNLQNFITGRRRSGHYDGRTSRKLPNDFLTSVVDLIGAAKSLLAWLDRSPFAAVTDYSVTRNNVIQLCLELTTIVQQDCTVYETENKILHVCKTLSGVCDHIISLSSDPLVSQSAHLEVIQLANIKPSEGLGMYIKSTYDGLHVITGTTENSPADRCKKIHAGDEVIQVNHQTVVGWQLKNLVNALREDPSGVILTLKKRPQSMLTSAPALLKNMRWKPLALQPLIPRSPTSSVATPSSTISTPTKRDSSALQDLYIPPPPAEPYIPRDEKGNLPCEDLRGHMVGKPVHKGSESPNSFLDQEYRKRFNIVEEDTVLYCYEYEKGRSSSQGRRESTPTYGKLRPISMPVEYNWVGDYEDPNKMKRDSRRENSLLRYMSNEKIAQEEYMFQRNSKKDTGKKSKKKGDKSNSPTHYSLLPSLQMDALRQDIMGTPVPETTLYHTFQQSSLQHKSKKKNKGPIAGKSKRRISCKDLGRGDCEGWLWKKKDAKSYFSQKWKKYWFVLKDASLYWYINEEDEKAEGFISLPEFKIDRASECRKKYAFKACHPKIKSFYFAAEHLDDMNRWLNRINMLTAGYAERERIKQEQDYWSESDKEEADTPSTPKQDSPPPPYDTYPRPPSMSCASPYVEAKHSRLSSTETSQSQSSHEEFRQEVTGSSAVSPIRKTASQRRSWQDLIETPLTSSGLHYLQTLPLEDSVFSDSAAISPEHRRQSTLPTQKCHLQDHYGPYPLAESERMQVLNGNGGKPRSFTLPRDSGFNHCCLMLQLVPVTHRMTCNPQRWRKRRRRRRRKGRQQGKT

SEQ ID NO: 10631 - DNA, 1524 bp, Rattus norvegicus
  ref <308>: DATABASE ACCESSION NUMBER: EMBL / AJ001044
  ref <309>: DATABASE ENTRY DATE: 2000-11-29
aagcttggtaccgagctcggatccactagtaacggccgccagtgtggtggaattccagcgcgactgtccctggagccgtcccgcgcctcagacccgcgagtccccgccgctccgcgcgcagtatggcgccccccaaggccctcgcgttcgggctcctgctcgcggtggtcacggcgacgctggccgcagctcagaaagactgtgtctgtaacaactacaagctgacgtcacggtgctatgagaatgagaatggtgaatgccagtgtacttcctatgggacacaaaatactgtcatttgctccaaactggcatccaagtgcttggtgatgaaggcggagatgactcacagcaagtctgggaggaggatgaaacccgagggggcgatccagaacaacgacggtctgtatgatcccgagtgtgacgagcaagggctcttcaaagccaagcagtgcaacggcaccgccacgtgctggtgcgtgaacaccgcgggtgtccggagaaccgacaaggacacggagatcacgtgctccgagagagtgaggacctactggatcatcattgagctcaaacacaaagaaagagcacagccttataacttcgagagtttgcatactgcacttcaggacacatttgcatctcgatacatgctgaatccgaaatttatcaaaagtattatgtatgagaataatgttatcactattgatttgatgcaaaactcttctcagaagactcaagatgatgtggacatagctgatgtggcttactattttgagaaagatgtaaagggggagtccttgttccattcatctaagagcatggacctgagggtgaacggggagctcctcgatctggaccccgggcagactctgatttactacgtcgatgaaaaggccccggagttttccatgcagggcctcacggctgggatcatcgccgtcattgtcgtggtggtgttagcagtcattgcggggattgttgtcctggttatatctacaaggaagagatcagcaaaatatgagaaggctgagataaaggagatgggtgagatacacagagagctcaatgcctaaccaaccatgccgtgtgctgcactgaggagggagccaccggacggaaatggcgaagaactcaggttgcaaacggatagacctggggaggatggagacctttcgagggtcactgctttgttagctaagctcacacatttgtaacagtgaaatttgtactcataaatacaagcagcttgacattggcattaacaatcttaaaattagacgagtgtcttacacatgcaggtctggcgtggaactcagaacttagcctgccaagataggagagcttatgcttattgttgaagtgtgtgtgtgtgtgtgtgtgtgtgtgtgtgtgtgtcataaacagcccacagtagaatacgatgactactctcatttttgtgattaaagctgcccttctacacactgagtcttgtacataataaacgtttttaatgaaataaaacatttttaaactgaaaaaaaaaaa

SEQ ID NO: 10632 - protein, 316 aa, Rattus norvegicus
  misc_feature (1)..(316): Xaa=Unknown amino acid
MAPPKALAFGLLLAVVTATLAAAQKDCVCNNYKLTSRCYENENGECQCTSYGTQNTVICSKLASKCLVMKAEMTHSKSGRRMKPEGAIQNNDGLYDPECDEQGLFKAKQCNGTATCWCVNTAGVRRTDKDTEITCSERVRTYWIIIELKHKERAQPYNFESLHTALQDTFASRYMLNPKFIKSIMYENNVITIDLMQNSSQKTQDDVDIADVAYYFEKDVKGESLFHSSKSMDLRVNGELLDLDPGQTLIYYVDEKAPEFSMQGLTAGIIAVIVVVVLAVIAGIVVLVISTRKRSAKYEKAEIKEMGEIHRELNAX

SEQ ID NO: 10633 - DNA, 1457 bp, Homo sapiens
  ref <308>: DATABASE ACCESSION NUMBER: EMBL / M33011
  ref <309>: DATABASE ENTRY DATE: 2000-03-04
cccaggcctcgcgctgcccggccggctcctcgtgtcccactcccggcgcacgccctcccgcgagtcccgggcccctcccgcgcccctcttctcggcgcgcgcgcagcatggcgcccccgcaggtcctcgcgttcgggcttctgcttgccgcggcgacggcgacttttgccgcagctcaggaagaatgtgtctgtgaaaactacaagctggccgtaaactgctttgtgaataataatcgtcaatgccagtgtacttcagttggtgcacaaaatactgtcatttgctcaaagctggctgccaaatgtttggtgatgaaggcagaaatgaatggctcaaaacttgggagaagagcaaaacctgaaggggccctccagaacaatgatgggctttatgatcctgactgcgatgagagcgggctctttaaggccaagcagtgcaacggcacctccacgtgctggtgtgtgaacactgctggggtcagaagaacagacaaggacactgaaataacctgctctgagcgagtgagaacctactggatcatcattgaactaaaacacaaagcaagagaaaaaccttatgatagtaaaagtttgcggactgcacttcagaaggagatcacaacgcgttatcaactggatccaaaatttatcacgagtattttgtatgagaataatgttatcactattgatctggttcaaaattcttctcaaaaaactcagaatgatgtggacatagctgatgtggcttattattttgaaaaagatgttaaaggtgaatccttgtttcattctaagaaaatggacctgacagtaaatggggaacaactggatctggatcctggtcaaactttaatttattatgttgatgaaaaagcacctgaattctcaatgcagggtctaaaagctggtgttattgctgttattgtggttgtggtgatagcagttgttgctggaattgttgtgctggttatttccagaaagaagagaatggcaaagtatgagaaggctgagataaaggagatgggtgagatgcatagggaactcaatgcataactatataatttgaagattatagaagaagggaaatagcaaatggacacaaattacaaatgtgtgtgcgtgggacgaagacatctttgaaggtcatgagtttgttagtttaacatcatacatttgtaatagtgaaacctgtactcaaaatataagcagcttgaaactggctttaccaatcttgaaatttgaccacaagtgtcttatatatgcagatctaatgtaaaatccagaacttggactccatcgttaaaattatttatgtgtaacattcaaatgtgtgcattaaatatgcttccacagtaaaatctgaaaaactgatttgtgattgaaagctgcctttctatttacttgagtcttgtacatacatacttttttatgagctatgaaataaaacattttaaactg

SEQ ID NO: 10634 - protein, 314 aa, Homo sapiens [sequence omitted]

SEQ ID NO: 10635 - DNA, 2036 bp, Rattus norvegicus; identical to SEQ ID NO: 1360
  ref <308>: DATABASE ACCESSION NUMBER: EMBL / AJ004858
  ref <309>: DATABASE ENTRY DATE: 1998-09-24

SEQ ID NO: 10636 - protein, 396 aa, Rattus norvegicus; identical to SEQ ID NO: 1361
  misc_feature (1)..(396): Xaa=Unknown amino acid

SEQ ID NO: 10637 - DNA, 177 bp, Homo sapiens; identical to SEQ ID NO: 1362
  ref <308>: DATABASE ACCESSION NUMBER: EMBL / X73039
  ref <309>: DATABASE ENTRY DATE: 1993-06-16

SEQ ID NO: 10638 - protein, 441 aa, Homo sapiens; identical to SEQ ID NO: 1363
  ref <308>: DATABASE ACCESSION NUMBER: PIR / S34118
  ref <309>: DATABASE ENTRY DATE: 1999-09-24

SEQ ID NO: 10639 - DNA, 3933 bp, Rattus norvegicus; identical to SEQ ID NO: 1372
  ref <308>: DATABASE ACCESSION NUMBER: EMBL / AJ005113
  ref <309>: DATABASE ENTRY DATE: 1999-01-07

SEQ ID NO: 10640 - protein, 1935 aa, Rattus norvegicus
  ref <308>: DATABASE ACCESSION NUMBER: PIR / S06006
  ref <309>: DATABASE ENTRY DATE: 2002-04-19
MADREMAAFGAGAPFLRKSEKERLEAQTRPFDLKKDVFVPDDKEEFVKAKIVSREGGKVTAETENGKTVTVKEDQVMQQNPPKFDKIEDMAMLTFLHEPAVLYNLKERYASWMIYTYSGLFCVTVNPYKWLPVYNAQVVAAYRGKKRSEAPPHIFSISDNAYQYMLTDRENQSILITGESGAGKTVNTKRVIQYFAVIAAIGDRSKKDQTPGKGTLEDQIIQANPALEAFGNAKTVRNDNSSRFGKFIRIHFGATGKLASADIETYLLEKSRVIFQLKAERDYHIFYQILSNKKPELLDMLLITNNPYDYAFFSQGETTVASIDDSEEHMATDSAFDVLGFTPEEKNSIYKLTGAIMHFGNMKFKQKQREEQAEPDGTEEADKSAYLMGLNSADLLKGLCHPRVKVGNEYVTKGQNVQQVAYAIGALAKSVYEKMFNWMVTRINATLETKQPRQYFIGVLDIAGFEIFDFNSFEQLCINFTNEKLQQFFNHHMFVLEQEEYKKEGIEWTFIDFGMDLQACIDLIEKPMGIMSILEEECMFPKATDMTFKAKLYDNHLGKSNNFQKPRNIKGKQEAHFSLIHYAGTVDYNILGWLQKNKDPLNETVVGLYQKSSLKLLSNLFANYAGADAPVDKGKGKAKKGSSFQTVSALHRENLNKLMTNLRSTHPHFVRCIIPNETKSPGVMDNPLVMHQLRCNGVLEGIRICRKGFPNRILYGDFRQRYRILNPAAIPEGQFIDSRKGAEKLLGSLDIDHNQYKFGHTKVFFKAGLLGLLEEMRDERLSRIITRIQAQSRGVLSRMEFKKLLERRDSLLIIQWNIRAFMGVKNWPWMKLYFKIKPLLKSAETEKEMANMKEEFGRVKDALEKSEARRKELEEKMVSLLQEKNDLQLQVQAEQDNLADAEERCDQLIKNKIQLEAKVKEMTERLEDEEEMNAELTAKKRKLEDECSELKRDIDDLELTLAKVEKEKHATENKVKNLTEEMAGLDEIIVKLTKEKKALQEAHQQALDDLQAEEDKVNTLTKAKVKLEQQVDDLEGSLDQDKKVRMDLERAKRKLEGDLKLTQESIMDLENDKQQLDERLKKKDFELNALNARIEDEQALGSQLQKKLKELQARIEELEEELEAERTARAKVEKLRSDLSRELEEISERLEEAGGATSVQIEMNKKREAEFQKMRRDLEEATLQHEATAAALRKKHADSVAELGEQIDNLQRVKQKLEKEKSEFKLELDDVTSNMEQIIKAKANLEKMCRTLEDQMNEHRSKAEETQRSVNDLTRQRAKLQTENGELSRQLDEKEALISQLTRGKLTYTQQLEDLKRQLEEEVKAKNALAHALQSARHDCDLLREQYEEETEAKAELQRVLSKANSEVAQWRTKYETDAIQRTEELEEAKKKLAQRLQDAEEAVEAVNAKCSSLEKTKHRLQNEIEDLMVDVERSNAAAAALDKKQRNFDKILVEWKQKYEESQSELESSQKEARSLSTELFKLKNAYEESLEHLETFKRENKNLQEEISDLTEQLGSTGKSIHELEKIRKQLEAEKLELQSALEEAEASLEHEEGKILRAQLEFNQIKAEIERKLAEKDEEMEQAKRNHLRVVDSLQTSLDAETRSRNEALRVKKKMEGDLNEMEIQLSHANRMAAEAQKQVKSLQSLLKDTQIQLDDAVRANDDLKENIAIVERRNNLLQAELEELRAVVEQTERSRKLAEQELIETSERVQLLHSQNTSLINQKKKMDADLSQLQTEVEEAVQECRNAEEKAKKAITDAAMMAEELKKEQDTSAHLERMKNNMEQTIKDLQHRLDEAEQIALKGGKKQLQKLEARVRELENELEAEQKRNAESVKGMRKSERRIKELTYQTEEDRKNLLRLQDLVDKLQLKVKAYKRQAEEAEEQANTNLSKFRKVQHELDEAEERADIAESQVNKLRAKSRDIGAKGLNEE

SEQ ID NO: 10641 - DNA, 5825 bp, Homo sapiens; identical to SEQ ID NO: 1374
  ref <308>: DATABASE ACCESSION NUMBER: EMBL / D80000
  ref <309>: DATABASE ENTRY DATE: 2002-05-12

SEQ ID NO: 10642 - DNA, 754 bp, Rattus norvegicus
  ref <308>: DATABASE ACCESSION NUMBER: EMBL / AJ011811
  ref <309>: DATABASE ENTRY DATE: 1999-04-14
gctgatagcgagcactgctatcccacagtggcagatgagctcctatgcaggcgacaacatcatcacagcccaggccatgtacaaggggctctggatggagtgcgtcacgcagagtaccggcatgatgagctgcaaaatgtacgactcggtgcttgccctgccagcggccacgcaggccactcgagccttaatgattgtgtccttggtgttgggcttcttggccatgtttgtcgccacgatgggcatgaaatgcacacgctgtgggggagatgacaaagtgaagaaggcccgcatagctatgactggaggcattattttcatcgtggcaggtcttgctgctttggtagcatgctcctggattggtcatcagattgtcacagacttttataaccccttgacgcccatgaatattaagtacgagtttggtcctgccatctttatcggctgggcagggtctgctctggtccttctgggaggggccctgctctcttgctcctgccccggcagtgaaagcaaagctgcataccgtgcaccccgctcctaccctaagtccaactcctctaaggaatacgtgtgagctggggaccccagcctgtgggcaaggtgtgaggcaaaggcctcctggtcactccaccgccaaacaccatgtatagttccctgtgggaggggggggagggccgaggggggtgggtgggagaggaagacaaaacatggggagggtgtgcttttgtacagtaataaaattaagttttgg

SEQ ID NO: 10643 - protein, 191 aa, Rattus norvegicus
  ref <308>: DATABASE ACCESSION NUMBER: SWISS-Prot / Q9Z1L1
  ref <309>: DATABASE ENTRY DATE: 2000-05-30
LIASTAIPQWQMSSYAGDNIITAQAMYKGLWMECVTQSTGMMSCKMYDSVLALPAATQATRALMIVSLVLGFLAMFVATMGMKCTRCGGDDKVKKARIAMTGGIIFIVAGLAALVACSWIGHQIVTDFYNPLTPMNIKYEFGPAIFIGWAGSALVLLGGALLSCSCPGSESKAAYRAPRSYPKSNSSKEYV

SEQ ID NO: 10644 - DNA, 1207 bp, Homo sapiens
  ref <308>: DATABASE ACCESSION NUMBER: EMBL / AJ011497
  ref <309>: DATABASE ENTRY DATE: 1999-04-14
tccagttaggagccttgatgccggaggggacagtgggtcgccgagagcgcccggagggaaccgcctggccttcggggaccaccaattttgtctggaaccaccctcccggcgtatcctactccctgtgccgcgaggccatcgcttcactggaggggtcgatttgtgtgtagtttggtgacaagatttgcattcacctggcccaaaccctttttgtctctttgggtgaccggaaaactccacctcaagttttcttttgtggggctgccccccaagtgtcgtttgttttactgtagggtctcccgcccggcgcccccagtgttttctgagggcggaaatggccaattcgggcctgcagttgctgggcttctccatggccctgctgggctgggtgggtctggtggcctgcaccgccatcccgcagtggcagatgagctcctatgcgggtgacaacatcatcacggcccaggccatgtacaaggggctgtggatggactgcgtcacgcagagcacggggatgatgagctgcaaaatgtacgactcggtgctcgccctgtccgcggccttgcaggccactcgagccctaatggtggtctccctggtgctgggcttcctggccatgtttgtggccacgatgggcatgaagtgcacgcgctgtgggggagacgacaaagtgaagaaggcccgtatagccatgggtggaggcataattttcatcgtggcaggtcttgccgccttggtagcttgctcctggtatggccatcagattgtcacagacttttataaccctttgatccctaccaacattaagtatgagtttggccctgccatctttattggctgggcagggtctgccctagtcatcctgggaggtgcactgctctcctgttcctgtcctgggaatgagagcaaggctgggtaccgtgcaccccgctcttaccctaagtccaactcttccaaggagtatgtgtgacctgggatctccttgccccagcctgacaggctatgggagtgtctagatgcctgaaagggcctggggctgagctcagcctgtgggcagggtgccggacaaaggcctcctggtcactctgtccctgcactccatgtatagtcctcttgggttgggggtgggggggtgccgttggtgggagagacaaaaagagggagagtgtgctttttgtacagtaataaaaaataagtattgggaagc

SEQ ID NO: 10645 - protein, 211 aa, Homo sapiens
  ref <308>: DATABASE ACCESSION NUMBER: SWISS-Prot / O95471
  ref <309>: DATABASE ENTRY DATE: 2002-06-15
MANSGLQLLGFSMALLGWVGLVACTAIPQWQMSSYAGDNIITAQAMYKGLWMDCVTQSTGMMSCKMYDSVLALSAALQATRALMVVSLVLGFLAMFVATMGMKCTRCGGDDKVKKARIAMGGGIIFIVAGLAALVACSWYGHQIVTDFYNPLIPTNIKYEFGPAIFIGWAGSALVILGGALLSCSCPGNESKAGYRAPRSYPKSNSSKEYV

SEQ ID NO: 10646 - DNA, 6412 bp, Rattus norvegicus
  misc_feature (1)..(6412): n=a, c, g or t
  ref <308>: DATABASE ACCESSION NUMBER: EMBL / AJ131902
  ref <309>: DATABASE ENTRY DATE: 2000-05-10
aattgtgagcggataacaattcccctctagaaataattttgtttaactttaagaaggagatataccatgggcagtagccatgatcatcatcatcacagcagcggcctggtgccgcagcggcagccatatggaattcatggcaacggcacttcagaagcctgggatggtcccccctccaccaggagaggagagccagacggtcatccttccacccggctggcacagctacttgtctcctcagggccgccgttactatgtcaacacgactaccaatgagaccacctgggaacgtcccagcagttctcctgggatttcagccagccctggccctcacaggagctctctgcctacaacagtgaatggataccacgcatcagggaccccggcgcaccctccagagactgcccacatgagtctccgaaaatccaccggtgattcccagaacctgggatcctcatcgccaggcaggaaacagagcaaggaaaacaccatcaccatcaactgtgtgacattccctcacccggacacgatgcctgaacagcaactgctcaagccgactgagtggagctattgcgactacttctgggcggataagaaggacccacaaggcaatggcacagtggctgggtttgaactgctgctgcagaagcaactgaaaggcaagcagatgcagaaggagatgtctgagttcatccgagaaaggataaagattgaagaagaatatgcaaagaaccttgctaagctctctcagaactccttggctgcccaggaggaaggctccctgggagaggcatgggcccaagtaaagaagagtctggccgatgaggctgaagttcatctcaagttctctgccaagctccacagcgaggtggagaaacccctgatgaacttcagagagaacttcaagaaagacatgaaaaagtgcgaccaccacatcgctgacctccgtaagcagctgggcgagagccgctatgcctcagtggagaaggcccgcaaagccctcacagagcggcagaaagacctggagatgaagacccagcagctggagatcaagttgagcaacaagactgaggaggacatcaagaaggcacggaggaagtccactcaggcaggagatgatctcatgcgctgtgtggacctctacaaccaggcccagtccaagtggtttgaagagatggtgacgaccaccctggagctggagcggctggaggtggagagggtagagatgatccgacaacatctgtgccagtacacacagctgcggcatgagacagacatgttcaaccaaagcacagtcgagcctgtggaccaactgctgcgaaaagtggacccagccaaagacagagagctatgggtcagagagcacaaaacaggcaacattcgcccagtggacatggagatctagaagtgactgtatggtcctgggggtcctcctgaggagaggggctgggggtcccatggagaaggggctgtatctgccctattacctgctaatctatccagggaaaaggaggaaaagagacagtgattcccgaaggangngggcccagccaggggctcccccaatattcccaggccataatgatggacccacagccccaacttcacctcaaagactggagcctcccctccaactcccatgctgtgcttgtcactctgagaaccaactgaggctagaaccctggggtcccagctgagttccacaggggtggccatcacacacctgtgccccaggtatccaaggcctgtcctctagcgggattgtcatctccaggaccatggaaggggaagggggtggtgtctctgtctccaaacaatgtcaggatcaggatcgaggacaggagggaaagtgaagttcgcatcctgtcccacaaccttttttagtcctccctacttctccctttgctttgtaggagcccccatctattttttttcgtctcccacaagaatggtggagtttcttcccaacccaaatctggagaggtcagaatggaactacctcagttggcacaaccagatcatagctcccatcagtttcagattccagatctggcattgactgtaaagtctaccacaaagtcccaatctacctttcccccaacctctttctcaaggaggaaactccacacctcatccagacagccctttccagactcaatagaggatattttcccaagtcctcagacagctagatgcatgatcaaaggctttgggggtggagccccacaaagtcttgtttgacacatgcccccgcccctcatcactatgacagccttgaccagtatgctctcccgtgctgactacaggccatgtgagtcagcggtggtaatattcaggtttggttattctctagaatggctctagctgtggatgtgcacaatggagtaggacctgctgtcccccttactgccattggtccgtagtgcagagtctcatggctgtaggtggttgccacccaggaaacgtaggaacgttgggtcgtcacacagtgagtggggttggggggtgaattctagctgggaacttgtgcggggtggggggcatttttcctcgtctttccacagatgactttgtgatttgacctgtctacccaaagggcagaatcccctgagcagcacgaattcggcacgagcctgagcgccactcccatcttgccatctcacatgcttgtcgcggatagcttactaatcttggacctttgggcagcccatccacagaaccatctctcatggttgttagcaagatgcctaatacactaaagcaaactaagcactgtcactttccttactgaaacatctcaaccataaaagccaccatgaggacatttcaccaacctgtgttcagcatggaccccgtgacaccagcctctgatattaggacattatttcttgatttccttattaaagaaaatgggtgctagtggtaatttgctttgtggcttagcaacctaatttgtgagtgatggtcaagttccaagtcttgtcatacacaggggttttgggtatcacagtgtggctcatgactttgttcccttgccacctcgcttaggacattcagagtcccctgagatgtcacttcctccagcataactgaagttggctgatgtgagccgattccgtgtgaggctattctctttttgttgtcccctcacttcctttttaatctatccatgtatacattttccttcttttgtccccttctttccattgatcattcatttagagttttgttaaagacaagcaatctgtgatctctcatctgaagacagcgtacagctctgtgatgcaaagaaaccctcagacgttctgtatagatccaccccttcctgagatgcacttggctctccctctccggtaccagctctatgtgggttcatgtgcacctggtttatgtgccgtgtgctggttcacaggcatctgttcgttttcatactcataaatgctctcagtaatgctggaacggtgcgagtgcgactagcaccatgtgtctaggagggcacccccccagcttcggctccacctccggtttgaccctttctggacagaggaaacaatacattttccaccccacacactgggattcttgaagtattaactgtgctaagagatcttggcacagcagtgggatcttgagtctcctgactaccaaatctcagttcacaccaagctcaatttcagaaatggctgcagttggtttccggtatgtttccttctactacaaatagggaagataagagcatagaggaggtgggtgccaggaagtgatgcccagaactgtgattgtggtagagtcacgtgtcccaactaccctcactgtacccaggggatgaaaccaagaagatgatgatgtgcaagaacctgaaagtgcatactgagttgagtattcaagctgctgttgtggtccttggtctccatgcagtgctggatacccaaccaagagtcatgtgtctaggccagttgctctaccacttagctattcccatccccgttaccttgcttttgtgaacacgccagtgcataggttctgagaggatctggcagggtttatttagagtgggcgagcatccattgtccaggctgagagcagcaacagccctttctacctgcccccgactaggagtgccaatgcacttaagctttgtctgcaaaaccctgattttaaaaaaaaaaaactctaaaatgaatgatgttcaaaaatgggttagttgccatggcaacctccaggaagagatacttgttacccttcattattttctagtacctttgaacagtctcacagtgcaggggccatttgaaggatgtgaatggcagccctaggctgtctctgctatgggggccacctttctacctccacacaagaccctgttgactcgggaggatctctgcaatggttgattaatagctgaggcaaagtatccaaatttgtgacaggggtttgtttgtgtgcaatccctctgtggaatccacccaattatgagggtagtggatgggtgcatgagaatcttggttaagccaaagccccttcatggaaatacaagccataaaattcaaaaggtgtcaaaagaccttggcttgtttgggggtttgttccccatctgtgagtagacttgacaagaaggatttaaacaggagtctgaagacctgctgttactaggaagctaagaaaggcattttacagacttgaagtagagaagcaggtcagctcctgatggcttagactgaagaccccttcattgccaaagttgttcccatgccacaaagcatctctccaactcccttttcaaggtaaattgaaggtgtgactaaaatacaagtacaactcgccctttcaaggaatgcagttctatgaaccttaccatgactggtcttctcaaccacaaccaagataagcatatcaccttgtcaattcctcttttcccaccccggatctagcagccagttcaatgttctgtccctataattttgcctttttctacaacaccatgtaaatggagtcacactgatacaaccttctggatcagccatgttgtgggtgtcagtagaaggtcccctttccctgctgagtgttctatcaaatgaatgggccctaggatttccttagttttaaaatgaggtttttatgccttggaagtcctagccccagatcttggcacagcagtgggatctgagtctcctgactaccaaatctcagttcacaccaagctcaatttcagaaatggctgcagttggtttccggtatgtttccttctactacaactagggaagataagagcatagaggaggtgggtgccaggaagtgatgcccagaactgtgattgtggtagagtcacgtgtcccaactaccctcactgtacccaggggatgaaaccaagaagatgatgatgtgcaagaacctgaaagtgcatactgagttgagtattcaagctgctgttgtggtccttggtctccatgcagtgctggatacccaaccaagagtcatgtgtctaggccagttgctctaccacttagctattcccatccccgttaccttgcttttgtgaacacgccagtgcataggttctgagaggatctggcagggtttatttagagtgggcgagcatccattgtccaggctgagagcagcaacagccctttctacctgcccccgactaggagtgccaatgcacttaaagcttgggttgggtagtgcggatgatgtttagactctttctgggtggtattagggatgtgagccctatgtgtttaaaggagagtttccaataggactgtgttggtggagtgtggaggccggaagccacactatggcaccggggcagaaaggaagaactgagactggccctcccctgcttcccagtctgtcccacatcctaagatcacaccccgggggactcctctgtgctcacctgttccttcctgcagcttcctcgacagacaggttcttggacccaggtaccgacattccaagggacaccagccaacctgggtgagggccgcactctgtatgtcttcccttccctggggaaagagatacccagaagcacccccttacaacctgagcacatgagcgaaccccatgaaagtggaattttctaacaaaataaacttgctcgttttgtctgttttctgtaacttttgctaaatactttatacatttttaatgttgaaaaaaaaaaagcagtgtctcctgccagaactcctcacccgggatgaatgtgtttacttctcgctgtatatctttccatgctgcggctgcctggaccagtaaataaaatggatgtaatataagttgtaagtaacattgtcaaaactcagatcccaatggaggctgcccgcctcccccaccccatgatagcatctctgtgtattaattctgaagaattaaatgtttaaattagaaaaaaaaaaaaaaaaaa

SEQ ID NO: 10647 - protein, 422 aa, Rattus norvegicus
  ref <308>: DATABASE ACCESSION NUMBER: SWISS-Prot / O55148
  ref <309>: DATABASE ENTRY DATE: 2002-06-15
MATALQKPGMVPPPPGEESQTVILPPGWHSYLSPQGRRYYVNTTTNETTWERPSSSPGISASPGPHRSSLPTTVNGYHASGTPAHPPETAHMSLRKSTGDSQNLGSSSPGRKQSKENTITINCVTFPHPDTMPEQQLLKPTEWSYCDYFWADKKDPQGNGTVAGFELLLQKQLKGKQMQKEMSEFIRERIKIEEEYAKNLAKLSQNSLAAQEEGSLGEAWAQVKKSLADEAEVHLKFSAKLHSEVEKPLMNFRENFKKDMKKCDHHIADLRKQLGESRYASVEKARKALTERQKDLEMKTQQLEIKLSNKTEEDIKKARRKSTQAGDDLMRCVDLYNQAQSKWFEEMVTTTLELERLEVERVEMIRQHLCQYTQLRHETDMFNQSTVEPVDQLLRKVDPAKDRELWVREHKTGNIRPVDMEI

SEQ ID NO: 10648 - DNA, 2831 bp, Homo sapiens
  ref <308>: DATABASE ACCESSION NUMBER: EMBL / AK057761
  ref <309>: DATABASE ENTRY DATE: 2001-10-31
agcaagcactggagcggatttggaaggaactatgcaatgtagtgggttctttgtgaaagaacagcaatgagcaaagccacaggaacctccgctggggtgcccagaacactggccctgggctagcgacttgcctcagccccatttcccggagaggctgccatgaagaggaagccggcggagtcttggtgctgagtctgagggcttcaggcaggacccaagactctcctctgaggtagcagcccccagagaaggttagctgttctctgatgaagcctggaatggtcccccctccgccgggagaagaaagccagacggtcatccttccacctggctggcagagctacctgtcgcctcagggccggcggtactatgtcaacacgaccaccaatgagaccacctgggaacgtcccagcagttctcctgggattccagccagccctggctctcacaggagctctctgcctccagaaacagctgaagggcaaacaaatgcagaaggaaatgtcagaattcatccgggaaaggataaagattgaagaagactatgcgaagaacttagctaagctctctcagaactccttggcttcacaggaggaaggctccttgggagaggcgtgggcccaggtgaagaagagcctggcggacgaagcagaagttcacctcaagttctctgccaagcttcacattgccgaccttcgcaagcagctcgccagccgctatgcctcggtggagaaggcccggaaagccctcacagagcggcagagagacctggagatgaagacccagcagctggagatcaagctgagcaacaagacagagggggacatcaagaaggcgcggagaaagtccacacaggctggagacgacctcatgcgctgtgtggatctctacaaccaggcccagtccaaatggtttgaagagatggtgaccaccacattggagctagagcggctggaggtggagagggtagagatgatccggcagcacctgtgccagtacacgcagctgcggcatgaaacagacatgttcaaccaaagcacagtcgagcccgtggatcagctgcttcgaaaagtggacccggccaaagacagggagctgtgggtcagagagcacaagacgggcaacatccgccctgtggacatggagatctagatgggcctgtgcagcttcggggggtcctgctggggaggggggctgggctcccaccatggggcccatgccgagtggatgccccccaccctctctcctgggccactgaggagaggggagagagctggtgattccagaagggtgacccggacagcctagctgggggctcccccatattcccaggcccagaagacagacccacagccctgcccttgtctctgaggctgaagaccccctgactcccatgctgtgcttgccgctctgaaacaaacagaggctggaactttgtggtccttgccgagttttgtaggggtcactgtcacatgcttgtgccctggaagccccaaggctcttcctccagctggctcccttgtctccagggctttggaggatcagggtagggagggctctgtctctaagccaggtgtcaggatcagaatcatgggtagaaggtgccattcagctcacagccgcacccagaatcctttgcagccctccttctttatttttttcccattgcattctgggagtccacatctggctttctcagccactgttcatcaccaggggttttaggaggaaggcttggctcctgtcttcccagacccaccatgcctggagaggtcaggatggaactacctcattcggcaaattagccccaaattgagcgctgaatcgtgtcccatgagatcaggcgccatctgtaaagtctcctctggaaatgccaatccatccttcccccagctgcttcctcggggaggcccctgcccccaccctgccagcccttcccagtctcattagaggaagctttccaaagttctcagttatcaagacctcatccagctcgtccaaaggcttcagggatggaaacaaaccagctcgtctcagaggccagcaagctggggcctgtccgccacggtgccctgtgcacctttgggctgccctggcccccactctcccgggccgcccaccacaggctcttaatggggccgggtcagtcctacatgtgagatgggttagggcaagtctttgccatcccccagatggctctgtcttcttgtgtatggcagggctgggactgctgtcccttgtacagttttctgtcactggtgggcactggacaggcatagcagactctcttgtggccacactaggttgtcgcctttcaggcagtgtcccgccacctttgcttcccgctccttctggacattccagagccctgcaccaaacccttacttggtgtctgcacctcctttccctctctccatcttccaatccctggaaaagtctggtctgagtgtgacttgggaagctttcagtgctgctgtttggcccagctcattactttctccctttctctaccacagcaaacacattctccaccatgtcagtctaaagagtctaaaggggccgggagaagcgtgagcgaggggcagattctagtcgggagcccatgccctggaaatccatctttcttcatctttcccattgaccactttgggtttgacctgcacatctgcagtgagggcagaattcaacaagcacaactcactggtctttcagtcaacgtgctagaaaccgatgacttattaatctctaattttttggcgcctctttcattgaatgagaattgctttcgtatagttcacattagaaaaatgcctaatatactaaagtaaacc

SEQ ID NO: 10649 - protein, 412 aa, Homo sapiens
  ref <308>: DATABASE ACCESSION NUMBER: SWISS-Prot / O60861
  ref <309>: DATABASE ENTRY DATE: 2002-06-15
MVPPPPGEESQTVILPPGWQSYLSPQGRRYYVNTTTNETTWERPSSSPGIPASPGSHRSSLPPTVNGYHASGTPAHPPETAHMSVRKSTGDSQNLGSSSPSKKQSKENTITINCVTFPHPDTMPEQQLLKPTEWSYCDYFWADKKDPQGNGTVAGFELLLQKQLKGKQMQKEMSEFIRERIKIEEDYAKNLAKLSQNSLASQEEGSLGEAWAQVKKSLADEAEVHLKFSAKLHSEVEKPLMNFRENFKKDMKKCDHHIADLRKQLASRYASVEKARKALTERQRDLEMKTQQLEIKLSNKTEEDIKKARRKSTQAGDDLMRCVDLYNQAQSKWFEEMVTTTLELERLEVERVEMIRQHLCQYTQLRHETDMFNQSTVEPVDQLLRKVDPAKDRELWVREHKTGNIRPVDMEI

SEQ ID NO: 10650 - DNA, 1946 bp, Rattus norvegicus; identical to SEQ ID NO: 1500
  ref <308>: DATABASE ACCESSION NUMBER: EMBL / AJ223355
  ref <309>: DATABASE ENTRY DATE: 1998-09-21

SEQ ID NO: 10651 - protein, 287 aa, Rattus norvegicus; identical to SEQ ID NO: 1501
  misc_feature (1)..(287): Xaa=Unknown amino acid

SEQ ID NO: 10652 - DNA, 1967 bp, Homo sapiens; identical to SEQ ID NO: 1502
  ref <308>: DATABASE ACCESSION NUMBER: EMBL / BC015797
  ref <309>: DATABASE ENTRY DATE: 2001-10-15

SEQ ID NO: 10653 - protein, 287 aa, Homo sapiens; identical to SEQ ID NO: 1503
  ref <308>: DATABASE ACCESSION NUMBER: SWISS-Prot / Q9UBX3
  ref <309>: DATABASE ENTRY DATE: 2002-06-15

SEQ ID NO: 10654 - DNA, 2513 bp, Rattus norvegicus; identical to SEQ ID NO: 1555
  ref <308>: DATABASE ACCESSION NUMBER: EMBL / D00688
  ref <309>: DATABASE ENTRY DATE: 2002-06-03

SEQ ID NO: 10655 - protein, 526 aa, Rattus norvegicus; identical to SEQ ID NO: 1556
  ref <308>: DATABASE ACCESSION NUMBER: SWISS-Prot / BAA00592
  ref <309>: DATABASE ENTRY DATE: 2002-06-15

SEQ ID NO: 10656 - DNA, 1925 bp, Homo sapiens; identical to SEQ ID NO: 1557
  ref <308>: DATABASE ACCESSION NUMBER: Refseq / NM_000240
  ref <309>: DATABASE ENTRY DATE: 2000-10-31

SEQ ID NO: 10657 - protein, 527 aa, Homo sapiens; identical to SEQ ID NO: 1558
  ref <308>: DATABASE ACCESSION NUMBER: SWISS-Prot / P21397
  ref <309>: DATABASE ENTRY DATE: 2002-06-15

SEQ ID NO: 10658 - DNA, 2130 bp, Rattus norvegicus; identical to SEQ ID NO: 1575
  ref <308>: DATABASE ACCESSION NUMBER: EMBL / D10392
  ref <309>: DATABASE ENTRY DATE: 1998-11-24

SEQ ID NO: 10659 - protein, 288 aa, Rattus norvegicus; identical to SEQ ID NO: 1576
  ref <308>: DATABASE ACCESSION NUMBER: SWISS-Prot / P32851
  ref <309>: DATABASE ENTRY DATE: 2002-06-15

SEQ ID NO: 10660 - DNA, 2074 bp, Homo sapiens; identical to SEQ ID NO: 1577
  ref <308>: DATABASE ACCESSION NUMBER: EMBL / BC003011
  ref <309>: DATABASE ENTRY DATE: 2001-07-13

SEQ ID NO: 10661 - protein, 288 aa, Homo sapiens; identical to SEQ ID NO: 1578
  ref <308>: DATABASE ACCESSION NUMBER: SWISS-Prot / Q16623
  ref <309>: DATABASE ENTRY DATE: 2002-06-15

SEQ ID NO: 10662 - DNA, 2064 bp, Rattus norvegicus; identical to SEQ ID NO: 1579
  ref <308>: DATABASE ACCESSION NUMBER: EMBL / D10587
  ref <309>: DATABASE ENTRY DATE: 2000-02-01

SEQ ID NO: 10663 - protein, 477 aa, Rattus norvegicus; identical to SEQ ID NO: 1580
  ref <308>: DATABASE ACCESSION NUMBER: SWISS-Prot / BAA01444
  ref <309>: DATABASE ENTRY DATE: 2002-06-15

SEQ ID NO: 10664 - DNA, 2329 bp, Homo sapiens; identical to SEQ ID NO: 1581
  misc_feature (1)..(2329): n=a, c, g or t
  ref <308>: DATABASE ACCESSION NUMBER: EMBL / D12676
  ref <309>: DATABASE ENTRY DATE: 2000-02-01

SEQ ID NO: 10665 - protein, 477 aa, Homo sapiens; identical to SEQ ID NO: 1582
  ref <308>: DATABASE ACCESSION NUMBER: SWISS-Prot / Q14108
  ref <309>: DATABASE ENTRY DATE: 2002-06-15

SEQ ID NO: 10666 - DNA, 1018 bp, Rattus norvegicus; identical to SEQ ID NO: 1623
  ref <308>: DATABASE ACCESSION NUMBER: EMBL / D10729
  ref <309>: DATABASE ENTRY DATE: 1999-01-21

SEQ ID NO: 10667 - protein, 271 aa, Rattus norvegicus; identical to SEQ ID NO: 1624
  ref <308>: DATABASE ACCESSION NUMBER: SWISS-Prot / BAA01572
  ref <309>: DATABASE ENTRY DATE: 2002-06-15

SEQ ID NO: 10668 - DNA, 2934 bp, Rattus norvegicus
  ref <308>: DATABASE ACCESSION NUMBER: EMBL / D10853
  ref <309>: DATABASE ENTRY DATE: 2000-04-27
gcggacagctggttggcgcttggaccacgccgcagcagcaggtccctccacgtgctttcggcggcgccatggaactggaggagtcggggatccgtgaggaatgtggtgtgttcgggtgcatcgcttctggagactggcccacgcagctagatgtgccacatgtgatcactctgggactcgtggggcttcagcaccgaggtcaggagagcgctggtattgtgaccagtgatgggagttcagtgcctaaattcagggtgcataagggaatgggccttgtaaatcatgtttttaccgaagacaatttgaagaaattgtatgtctcaaatcttggaatcggacatacgcggtacgccaccacagggaagtgtgagctggaaaattgccagccgtttgttgttgagactctgcatgggaaaatagctgtggcccataacggagagctggtgaacgcagctcggctgaggaagaagcttctgcggcatggtattgggctttccacatcctccgatagtgaaatgattacccagttactcgcatatacccctcctcaggaacaagatgatactccagactgggtagcaagaattaagaacttaatgaaggaagcgcccgcagcctactccctggtcataatgcacagggacgtcatttacgcagtgcgagatccatacggaaatcgtcctctatgcatcggccgtcttatgccagtttctgacataaatgacaaagagaaaaagtcttcagagactgaaggatgggtggtgtcctcagagtcttgcagctttttatctattggtgcgagatattgccatgaagtgaagcctggggaaattgtagaaatatccagacatggtgtcagaactcttgatataattccaaggtctaatggagacccagtggctttttgtatcttcgaatatgtttattttgcaagaccagatagtatgtttgaagaccagatggtttatacggtaaggtaccggtgtggccagcagctggcagttgaagcaccggtggaggcggacctggtcagcacagttccagaatctgccacgcctgcggccctggggtatgcgacaaagtgtgggctgccatatgtggaggtgctgtgtaagaaccggtatgtaggaagaaccttcattcagccaaacatgaggctaagacaacttggggttgcaaagaaattcggcgtgttgtctgacaactttaaaggcaaaagaattgttctcatagatgattccattgtgagaggcaatactatctcacccatcataaaactcctcaaagaatccggtgcaaaggaggtacacattcgagtcgcttcgccaccaataaaacatccgtgcttcatgggaataaacattcctacaaaagaagagcttatagccaataagcccgaatttgagtatcttgcagagtaccttggagcaaacagcgttgtgtatctgtcagtggaaggactagtttcgtctgtgcaacaagaaataaagttcaagaagcagaaagttaaaaagcgtgatatcacaattcaagaaaatggaaatggtctggagtattttgagaagacgggacactgtacggcttgcctcactggccagtaccctgtggatctggaatggtagctgcctggaccgatgtgctgcttccagactgaaaggtcatcaagaagtggtttacatgtgttcctcagttggtacaaaatggacaccacttgcttatgtattataccttaagttttgagattttctgaggtcactgaattgctataattgaatcataaagattacatgtaatgcgacatgtggggattctttttgtataaggactgacttttcacccaagagaaggcaggaagtggcatttcccagacccatgcttgaatggttctaaagaggtgagatagggaggttgtgtgcccaggacaggaagctttataaagtttcatgaaaagcttgaattcattgtgccccatatgtatctagtctatgcagtcaagtctgcagttatggccttggtctttgattcttccaccccatacacacatgtatggctctggggaccagtgtacaactcctaaaaaatgaaaacctatgtggaaagctgaggcaggagagtcctgagttcaaggccaacctgggttttcctgtctcaagataaagaacctctttctgtgcctcggactccacatctgtttcctaagtcattcataaacttaatgcttagcgggaacttgtgtgtttgtctgggaggcttagagctgccgttttacccctgcttctttaccatgcatggtcagtagcttcagaagctaatggtaattagctttcactaaattagttttcagtttccttgtgatggaggtttgcagaccttttccatctctttgggatataccagaacgactgagaaatctatctggagccctgtttttctacacttgacagaaaatatttagcctagcaaataacttagtaagtacattggaaagagaaaattttaatttcaagtaagcctttatccttgatttgattaaacttggctgtttgaatgagtgcttgatcatttacagaactgtgtacttgtatacatgtatgcatttggtttaaacagagggaatagagacacagtagggccgattttgtttaaaggctgaggggacagccactgtttggggaattagattgcctgtacccaagcgttagctcatgatcatgttttttctaattttttttgttaggtctagtgacatttttaatttttttatgatgcagatttagtggattgaggtgatttactaactcctgtttgtgtgggatttttcacatggaaaaataattgtctctatattgccaaaatttgctactttccaaacccacttagaaatataatatttattaaaaactgaaatcattagcccacatttggtatatagtg

SEQ ID NO: 10669 - protein, 517 aa, Rattus norvegicus
  ref <308>: DATABASE ACCESSION NUMBER: SWISS-Prot / P35433
  ref <309>: DATABASE ENTRY DATE: 2002-06-15
MELEESGIREECGVFGCIASGDWPTQLDVPHVITLGLVGLQHRGQESAGIVTSDGSSVPKFRVHKGMGLVNHVFTEDNLKKLYVSNLGIGHTRYATTGKCELENCQPFVVETLHGKIAVAHNGELVNAARLRKKLLRHGIGLSTSSDSEMITQLLAYTPPQEQDDTPDWVARIKNLMKEAPAAYSLVIMHRDVIYAVRDPYGNRPLCIGRLMPVSDINDKEKKSSETEGWVVSSESCSFLSIGARYCHEVKPGEIVEISRHGVRTLDIIPRSNGDPVAFCIFEYVYFARPDSMFEDQMVYTVRYRCGQQLAVEAPVEADLVSTVPESATPAALGYATKCGLPYVEVLCKNRYVGRTFIQPNMRLRQLGVAKKFGVLSDNFKGKRIVLIDDSIVRGNTISPIIKLLKESGAKEVHIRVASPPIKHPCFMGINIPTKEELIANKPEFEYLAEYLGANSVVYLSVEGLVSSVQQEIKFKKQKVKKRDITIQENGNGLEYFEKTGHCTACLTGQYPVDLEW

SEQ ID NO: 10670 - DNA, 446 bp, Homo sapiens
  ref <308>: DATABASE ACCESSION NUMBER: EMBL / AA826427
  ref <309>: DATABASE ENTRY DATE: 2000-03-03
ggatctgacttttgggaggctttaagtgattatgattgcacttccctccacctggaaaccacctcttccttctctgatctcaccttggcttagctctccaacacaagactctgtggtgtctgcccatgcccactactctcactgttgagaatagtattcaatatctgtttaacatatataactacttttaacaaacactgaatactcctttttactaaaggtgtaaagactgtcaagctttggattttctctgttaataatcaaagtttatagaaattttaatacttacctagatattctgcaaggtgatcaaattctggtttattggcaatgagctcttcttttgtaggaatgtttattcccatgaagcatggatatttaattggtggtgaagctactcgaatgtgtaccttggaaagaaatcattgcacacaaggtttttaaga

SEQ ID NO: 10671 - protein, 517 aa, Homo sapiens
  ref <308>: DATABASE ACCESSION NUMBER: SWISS-Prot / Q06203
  ref <309>: DATABASE ENTRY DATE: 2002-06-15
MELEELGIREECGVFGCIASGEWPTQLDVPHVITLGLVGLQHRGQESAGIVTSDGSSVPTFKSHKGMGLVNHVFTEDNLKKLYVSNLGIGHTRYATTGKCELENCQPFVVETLHGKIAVAHNGELVNAARLRKKLLRHGIGLSTSSDSEMITQLLAYTPPQEQDDTPDWVARIKNLMKEAPTAYSLLIMHRDVIYAVRDPYGNRPLCIGRLIPVSDINDKEKKTSETEGWVVSSESCSFLSIGARYYREVLPGEIVEISRHNVQTLDIISRSEGNPVAFCIFEYVYFARPDSMFEDQMVYTVRYRCGQQLAIEAPVDADLVSTVPESATPAALAYAGKCGLPYVEVLCKNRYVGRTFIQPNMRLRQLGVAKKFGVLSDNFKGKRIVLVDDSIVRGNTISPIIKLLKESGAKEVHIRVASPPIKYPCFMGINIPTKEELIANKPEFDHLAEYLGANSVVYLSVEGLVSSVQEGIKFKKQKEKKHDIMIQENGNGLECFEKSGHCTACLTGKYPVELEW

SEQ ID NO: 10672 - DNA, 2721 bp, Rattus norvegicus; identical to SEQ ID NO: 1643
  ref <308>: DATABASE ACCESSION NUMBER: EMBL / D12769
  ref <309>: DATABASE ENTRY DATE: 1999-09-29

SEQ ID NO: 10673 - protein, 244 aa, Rattus norvegicus; identical to SEQ ID NO: 1644
  ref <308>: DATABASE ACCESSION NUMBER: SWISS-Prot / Q01713
  ref <309>: DATABASE ENTRY DATE: 2002-06-15

SEQ ID NO: 10674 - DNA, 4859 bp, Homo sapiens; identical to SEQ ID NO: 1645
  ref <308>: DATABASE ACCESSION NUMBER: Refseq / NM_001206
  ref <309>: DATABASE ENTRY DATE: 2000-10-31

SEQ ID NO: 10675 - protein, 244 aa, Homo sapiens; identical to SEQ ID NO: 1646
  ref <308>: DATABASE ACCESSION NUMBER: SWISS-Prot / Q13886
  ref <309>: DATABASE ENTRY DATE: 2002-06-15

SEQ ID NO: 10676 - DNA, 1673 bp, Rattus norvegicus; identical to SEQ ID NO: 1699
  ref <308>: DATABASE ACCESSION NUMBER: EMBL / D13962
  ref <309>: DATABASE ENTRY DATE: 2000-04-27

SEQ ID NO: 10677 - protein, 493 aa, Rattus norvegicus; identical to SEQ ID NO: 1700
  ref <308>: DATABASE ACCESSION NUMBER: SWISS-Prot / Q07647
  ref <309>: DATABASE ENTRY DATE: 2002-06-15

SEQ ID NO: 10678 - DNA, 3915 bp, Homo sapiens; identical to SEQ ID NO: 1701
  ref <308>: DATABASE ACCESSION NUMBER: EMBL / M20681
  ref <309>: DATABASE ENTRY DATE: 1999-07-02

SEQ ID NO: 10679 - protein, 496 aa, Homo sapiens; identical to SEQ ID NO: 1702
  ref <308>: DATABASE ACCESSION NUMBER: SWISS-Prot / P11169
  ref <309>: DATABASE ENTRY DATE: 2002-06-15

SEQ ID NO: 10680 - DNA, 1024 bp, Rattus norvegicus
  ref <308>: DATABASE ACCESSION NUMBER: EMBL / D14441
  ref <309>: DATABASE ENTRY DATE: 2000-04-19
gggggctgcagcggcggcggcagtagcggcagcggcggcggcggcggcggcagcgctccaactcgctccacgctccggctccgccgtcgagccgggagagagagagcctttgctgagcggccaggcactcggccggacgacaccagacacccgggccccttggaggcaccgcgctcacccagggccggcacagcgacccaaagccgaactccaagatgggaagcaagctgagcaagaagaagaagggctacaatgtgaacgacgagaaggccaaggacaaagacaagaaggctgaaggcgcgggcaccgaggaggaggggacccagaaggagagcgaaccccaggcggccgccgacgccaccgaggtcaaggagagcgcggaggagaagcccaaggacgcggcggacggcgaggccaaggcggaggaaaaggaggccgacaaggcggcggccaaggaggaggcgcccaaggccgagcccgagaagagcgagggcgccgcggaggagcagcccgagcccgcgccggcgcccgagcaggaggcggccgcgcccgggcccgctgcgggcggcgaggcccccaaggccggcgaggcgagcgcggagagcacgggcgcggccgacggcgcgccccaggaggagggcgaggccaaaaagactgaggctcccgccgccggccccgaagcgaaaagcgacgcggccccggcggcttcagactctaaacctagcacggagcccgcgccctcgtccaaggagacgcccgcggcctccgaggcgcccagttccgccgccaaggcccccgcgcccgccgcgcctgccgccgagccccaggccgaggcacccgtcgccagctccgagcaaagcgtggccgtcaaagagtaaccgggacagcctagccagaaccgacgccactcgcaaacgacctgtctcacgctctctctgtctctcactctgtcctctctctgtctctctatcctatactaacttgtttcaaattggaagtgaggatatgtattgcccaagggatt

SEQ ID NO: 10681 - protein, 219 aa, Rattus norvegicus
  ref <308>: DATABASE ACCESSION NUMBER: SWISS-Prot / Q05175
  ref <309>: DATABASE ENTRY DATE: 2000-05-30
GSKLSKKKKGYNVNDEKAKDKDKKAEGAGTEEEGTQKESEPQAAADATEVKESAEEKPKDAADGEAKAEEKEADKAAAKEEAPKAEPEKSEGAAEEQPEPAPAPEQEAAAPGPAAGGEAPKAGEASAESTGAADGAPQEEGEAKKTEAPAAGPEAKSDAAPAASDSKPSTEPAPSSKETPAASEAPSSAAKAPAPAAPAAEPQAEAPVASSEQSVAVKE

SEQ ID NO: 10682 - DNA, 1486 bp, Homo sapiens
  ref <308>: DATABASE ACCESSION NUMBER: EMBL / AF039656
  ref <309>: DATABASE ENTRY DATE: 2000-03-03
gaattcggcacgagctcaggggctgcataggcacccagagccgaactccaagatgggaggcaagctcagcaagaagaagaagggctacaatgtgaacgacgagaaagccaaggagaaagacaagaaggccgagggcgcggcgacggaagaggaggggaccccgaaggagagtgagccccaggcgcccgcagagcccgccgaggccaaggagggcaaggagaagcccgaccaggacgccgagggcaaggccgaggagaaggagggcgagaaggacgcggcggctgccaaggaggaggccccgaaggcggagcccgagaagacggagggcgcggcagaggccaaggctgagcccccgaaggcgcccgagcaggagcaggcggcccccggcccgctgcggggcggcgaggcccccaaagctgctgaggccgccgccggcccccggccgagagcggcccctgccgccggggaggagcccagcaaggaggaaggggaacccaaaaagactgaggcgcccgcagctcctgccgcccaggagaccaaaagtgacggggccccagcttcagactcaaaacccggcagctcggaggctgccccctcttccaaggagacccccgcagccacggaagcgcctagttccacacccaaggcccagggccccgcagcctctgcagaagagcccaagccggtggaggccccggcagctaattccgaccaaaccgtaaccgtgaaagagtgacaaggacagcctataggaaaaacaataccacttaaaacaatctcctctctctctctctctctctctctatctctctctctatctcctctctctctctcctctcctatctctcctctctctctctcctatactaacttgtttcaaattggaagtaatgatatgtattgcccaaggaaaaatacaggatgttgtcccatcaagggagggagggggtgggagaatccaaatagtatttttgtggggaaatatctaatataccttcagtcaactttaccaagaagtcctggatttccaagatccgcgtctgaaagtgcagtacatcgtttgtacctgaaactgccgccacatgcactcctccaccgctgagagttgaatagcttttcttctgcaatgggagttgggagtgatgcgtttgattctgcccacagggcctgtgccaaggcaatcagatctttatgagagcagtattttctgtgttttctttttaatttacagcctttcttattttgatatttttttaatgttgtggatgaatgccagctttcagacagagcccacttagcttgtccacatggatctcaatgccaatcctccattcttcctctccagatatttttgggagtgacaaacattctctcatcctacttagcctacctagatttctcatgacgagttaatgcatgtccgtggttgggtgcacctgtagttctgtttattggtcagtggaaatgaaaaaaaaaaaaaaaaaaa

SEQ ID NO: 10683 - protein, 226 aa, Homo sapiens
  ref <308>: DATABASE ACCESSION NUMBER: SWISS-Prot / P80723
  ref <309>: DATABASE ENTRY DATE: 2002-06-15
GGKLSKKKKGYNVNDEKAKEKDKKAEGAATEEEGTPKESEPQAAAEPAEAKEGKEKPDQDAEGKAEEKEGEKDAAAAKEEAPKAEPEKTEGAAEAKAEPPKAPEQEQAAPGPAAGGEAPKAAEAAAAPAESAAPAAGEEPSKEEGEPKKTEAPAAPAAQETKSDGAPASDSKPGSSEAAPSSKETPAATEAPSSTPKAQGPAASAEEPKPVEAPAANSDQTVTVKE

SEQ ID NO: 10684 - DNA, 2166 bp, Rattus norvegicus; identical to SEQ ID NO: 1833
  ref <308>: DATABASE ACCESSION NUMBER: Refseq / NM_022860
  ref <309>: DATABASE ENTRY DATE: 2001-01-24

SEQ ID NO: 10685 - protein, 533 aa, Rattus norvegicus; identical to SEQ ID NO: 1834
  ref <308>: DATABASE ACCESSION NUMBER: SWISS-Prot / Q10468
  ref <309>: DATABASE ENTRY DATE: 2002-06-15

SEQ ID NO: 10686 - DNA, 2512 bp, Homo sapiens; identical to SEQ ID NO: 1835
  ref <308>: DATABASE ACCESSION NUMBER: EMBL / M83651
  ref <309>: DATABASE ENTRY DATE: 1999-06-30

SEQ ID NO: 10687 - protein, 533 aa, Homo sapiens; identical to SEQ ID NO: 1836
  ref <308>: DATABASE ACCESSION NUMBER: SWISS-Prot / Q00973
  ref <309>: DATABASE ENTRY DATE: 2002-06-15

SEQ ID NO: 10688 - DNA, 1604 bp, Rattus norvegicus
  ref <308>: DATABASE ACCESSION NUMBER: EMBL / D26564
  ref <309>: DATABASE ENTRY DATE: 1998-10-27
cgagcggactctctagcccttgtgggtccctgttcagcgcccggccgtgtggagacccgggagccagtccgggcctccgaggcgaagatggtggactacagcgtttgggatcacatcgaggtgtcggacgatgaggacgagacgcaccccaacatagacacggccagcctgttccgctggcggcaccaggcccgggtggaacgcatggaacagtttcagaaggagaaagaagaactggaccggggctgccgggaatgcaagcgcaaggtagccgagttccagcgcaagctgaaggaactggaagtggctgagggtggtggccaggtggagcttgagcggcttcgagcggaggcacagcagctgcgcaaggaggagcgaactgggagcagaagctggaggacatgcggcaaaaaggagaagaacatgccctggaatgtggacacactcagcaaagatggcttcagcaagagcatggtcaataccaagcctgagaaggcagaggaagactcagaggaggcaagggagcagaaacacaagaccttcgttgaaaaatacgagaaacagatcaaacatttcggcatgctccaccgctgggatgacagccagaagtacctgtcagacaatgtccacctggtgtgcgaggagacagccaactacctggttatctggtgcattgacctggaagtcgaggagaagtgtgccctgatggagcaggtggctcaccagaccatggtcatgcagttcatcctggagttggccaagagtctgaaggtcgacccccgggcctgcttccggcagtttttcaccaagatcaagactgctgaccagcagtacatggagggcttcaagtatgaactggaggcctttaaggagcgtgtgcggggccgcgccaagctgcgaatagagaaggccatgaaggagtacgaggaggaggagcgcaagaagaggctaggccctggtggcctggaccctgtggaggtctacgaatctctgcctgaggagctgcagaagtgctttgatgtgaaggatgtacagatgctgcaagacgccatcagcaagatggatcctactgatgccaagtatcacatgcagcgttgcatcgattctggcctctgggtccccaactccaagtctggtgaggccaaggagggggaggaggcgggccccggggacccattgctggaagccgtccccaaagcgggcttcgagaaagacatcagtgcgtgacccttctccagaaaaggaaacccagccaccatgtccctagctcccgacttcttcacttctgctgctcctcacgtcctggcccatggcctgccccatgtcccctctcctccggcctgtccccagcactcatcagattctctgcttcgggttgaggggctctgctgtctgcagcccccccacccccatcagcgttatgccaaagtcctgggggtctggggaggggcagcagctgccaggttggtccaccgggttggggatacacatgtccccatctgggcagggtctgtccctatgggtctatggtcactgtttctcttctgtctagctttctgtcctgcaactggcaacaatgtccaataaacagttccaggtgctgg

SEQ ID NO: 10689 - protein, 379 aa, Rattus norvegicus
  ref <308>: DATABASE ACCESSION NUMBER: SWISS-Prot / Q63692
  ref <309>: DATABASE ENTRY DATE: 2002-06-15
MVDYSVWDHIEVSDDEDETHPNIDTASLFRWRHQARVERMEQFQKEKEELDRGCRECKRKVAEFQRKLKELEVAEGGGQVELERLRAEAQQLRKEERTGSRSWRTCGKKEKNMPWNVDTLSKDGFSKSMVNTKPEKAEEDSEEAREQKHKTFVEKYEKQIKHFGMLHRWDDSQKYLSDNVHLVCEETANYLVIWCIDLEVEEKCALMEQVAHQTMVMQFILELAKSLKVDPRACFRQFFTKIKTADQQYMEGFKYELEAFKERVRGRAKLRIEKAMKEYEEEERKKRLGPGGLDPVEVYESLPEELQKCFDVKDVQMLQDAISKMDPTDAKYHMQRCIDSGLWVPNSKSGEAKEGEEAGPGDPLLEAVPKAGFEKDISA

SEQ ID NO: 10690 - DNA, 1607 bp, Homo sapiens
  ref <308>: DATABASE ACCESSION NUMBER: Refseq / NM_016742
  ref <309>: DATABASE ENTRY DATE: 2002-01-07
gccgagcactctctagcccttgtgggtccctgttcagcgcccggccgtgtggagccccgggagccagtccgggcctccgaagcgaagatggtggactacagcgtttgggatcacatcgaggtgtcggacgatgaggacgagacgcaccccaacatagacactgccagcctcttccgctggcggcaccaggcccgggtggaacgcatggagcagtttcagaaggagaaagaggaactggaccggggctgccgggagtgcaagcgcaaggtagccgagtgccagcgcaagctgaaggagctggaagtggctgagagcgatggccaggtggagcttgagcggctgagagctgaggcacagcaactgcgcaaggaggagcggagctgggagcagaagctggaagacatgcgcaaaaaggagaagaacatgccctggaatgtggacacgctcagcaaagatggctttagcaagagcatggtcaataccaagcctgagaaggcagaggaggactcagaggaggcaagggagcagaaacacaagaccttcgttgaaaaatatgagaaacagatcaagcatttcggcatgctccaccgctgggatgacagccagaaatacctgtcggacaacgtccacctggtgtgtgaggaaacggccaactacctggttatctggtgcattgacctggaggtagaggagaaatgtgcactgatggagcaggtagctcaccagaccatggtgatgcagtttattctggagctggccaagagtctgaaggtcgacccccgagcctgcttccggcagtttttcaccaagatcaagaccgctgaccaccagtacatggagggcttcaagtatgaactggaagcctttaaggagcgagtgcggggccgcgccaagctgcgaatagagaaggccatgaaggaatatgaagaggaggagcgcaagaagaggctaggccctggtggcctggaccccgtggaggtctacgaatccctgcctgaggagctgcagaagtgctttgatgtgaaggatgtacagatgctgcaagacgccatcagcaaaatggatcccactgatgccaagtatcacatgcagcgttgcatcgattctggcctctgggtccccaactccaagtctggtgaggccaaggagggggaggaggcgggccccggggacccattgctggaagccgtccccaaagcgggcaacgagaaagacgtcagtgcgtgacccttctccggaaaaggaaacttagccaccatgtccctagctcccaacttcttcacttgtgctgctcctcacatcctgcccatggcctgccccgtgtcccctctcctcccacctgtccccagcgctcatgagactctctgcttcgggttgaggggctctgctgtctgcagcctcctacccccatcagcgttatgccaaagtcctgggggcctggggaggggcagcagttgccaggttggtccaccgggttggggatacaaatgtccccatctaggcaaggtctgtcctatgggtctatggtcactgtttttcttctgtctagcttcctgtcctgcaactggcaacaatgtccaataaacagttccaggtgctggaaaaaa

SEQ ID NO: 10691 - protein, 379 aa, Homo sapiens
  ref <308>: DATABASE ACCESSION NUMBER: SWISS-Prot / Q61081
  ref <309>: DATABASE ENTRY DATE: 2002-06-15
MVDYSVWDHIEVSDDEDETHPNIDTASLFRWRHQARVERMEQFQKEKEELDRGCRECKRKVAECQRKLKELEVAESDGQVELERLRAEAQQLRKEERSWEQKLEDMRKKEKNMPWNVDTLSKDGFSKSMVNTKPEKAEEDSEEAREQKHKTFVEKYEKQIKHFGMLHRWDDSQKYLSDNVHLVCEETANYLVIWCIDLEVEEKCALMEQVAHQTMVMQFILELAKSLKVDPRACFRQFFTKIKTADHQYMEGFKYELEAFKERVRGRAKLRIEKAMKEYEEEERKKRLGPGGLDPVEVYESLPEELQKCFDVKDVQMLQDAISKMDPTDAKYHMQRCIDSGLWVPNSKSGEAKEGEEAGPGDPLLEAVPKAGNEKDVSA

SEQ ID NO: 10692 - DNA, 2248 bp, Rattus norvegicus
  ref <308>: DATABASE ACCESSION NUMBER: EMBL / D29646
  ref <309>: DATABASE ENTRY DATE: 1999-01-21
caggagcccaatggccaactatgaattttcccaggtgtctgaggacagacctggctgccgcctcactaggaaagcccagatcggtcttggagtgggtctcctgctcctggtcgccttggtagtggtcgtggtcatagttctgtggccgcgctcacccctggtgtggaaagggaagcctaccacgaagcacttcgctgacatcatcttgggacgctgcctgatctatactcaaatcctccggccggagatgagagatcaggactgcaagaagatactaagtacattcaaaagagggtttatttccaagaatccttgcaacatcaccaatgaagactacgcaccactggttaaattggttactcaaaccataccatgtaacaagactctcttttggagcaagtccaaacacctggcccatcagtatacttggatccaggggaaaatgttcaccctggaggacacactgctgggctatattgcagatgatctcaggtggtgtggagaccccagtacttccgatatgaactatgactcttgcccacattggagtgaaaattgtcccaacaaccctgttgctgtgttctggaatgtgatttcccaaaagtttgcagaagatgcctgtggtgtggtccaagtgatgctcaatgggtccctcagtgagccattttacagaaacagcacctttggaagtgtggaagtctttaatttggacccaaataaggttcataaactacaggcctgggtaatgcatgacattaaaggaacttccagtaatgcatgttcgagcccctccataaatgagctgaagtcgattgtgaacaaaaggaatatgatatttgcctgccaggataactaccgacctgtaagatttcttcagtgtgtgaagaatcctgagcatccatcatgtagacttaatgtgtgaaggacttggatctcagaatccccacacacactccgcagcacgcaatgaggtgaaagattcagaagcaacactgtcgggaaagcagcagttgtcagggagaggtctctactacaatgctaacatcagagatggaagagcttcccaatacattatgacagaacgacacgatcagctcagtgcgtcctgtgtactaccagtaatagtcaagaaaagtcactccataaaccagagttaaggttctatattgttatttcaatgtggtgcttttatattgtttatattttgctagcatccttttttcctctcttttaatgaggtctctctttctctcttaatgaggctgagaatcagacctgagaacttgcacacatggtggataagcctatataccactgagctaactcctcagcatggctggatttttattgaaaaatgccaatccaacttcccattggacaaagaaaatcaaacatcaagtttatcgaaatgaataaccttatttttttatgtttttgcattctccccacaaatattcaaatggtaaacatgaggtcatagggtcattatagagaaggtgctctgtggaaactacccacatgccctgtgctttagtcgatttttaacccatccaacatgtccttgttaactttgagttttattgggggggattggggggggttaacgtgagaaaatggagtttagagagataatttattttcctaaagtcacattcttaggatcatggttacatctgaaattaaatcagttctgtcaaagtcaacaacataagtttttttttttcttttctgagcttttattgccaaattgatagtagcctgtgttatcgtctagcaatagactctgcaatgtgatctttatgggtgatttcgaaactaattacttgcactctctttctcttcttcctcattcttggtgccttctgtaggtagtcaggagttagcttacatttgttgctgatatcggcaatttatgttttttatcctttttttcttacatctgtcttgctcggagtcactaatttggttgttattttgttgttgttggttgtctttttcaaagctccactctttacccttcctcatttatttatttaattgagcttttgtctatttttagaaacatagaaatttcttctgtcttcaatatctccatttagcttttttgaggcaaatgtttagaccattgctatttcagcctgttctcttttttcttttttataggatattttatgtatttacatttcaaatgttatcccctttcccagttcccccgccctgattctatgaggatacttccccttccaca

SEQ ID NO: 10693 - protein, 303 aa, Rattus norvegicus
  ref <308>: DATABASE ACCESSION NUMBER: SWISS-Prot / Q64244
  ref <309>: DATABASE ENTRY DATE: 2002-06-15
MANYEFSQVSEDRPGCRLTRKAQIGLGVGLLLLVALVVVVVIVLWPRSPLVWKGKPTTKHFADIILGRCLIYTQILRPEMRDQDCKKILSTFKRGFISKNPCNITNEDYAPLVKLVTQTIPCNKTLFWSKSKHLAHQYTWIQGKMFTLEDTLLGYIADDLRWCGDPSTSDMNYDSCPHWSENCPNNPVAVFWNVISQKFAEDACGVVQVMLNGSLSEPFYRNSTFGSVEVFNLDPNKVHKLQAWVMHDIKGTSSNACSSPSINELKSIVNKRNMIFACQDNYRPVRFLQCVKNPEHPSCRLNV

SEQ ID NO: 10694 - DNA, 1233 bp, Homo sapiens
  ref <308>: DATABASE ACCESSION NUMBER: EMBL / M34461
  ref <309>: DATABASE ENTRY DATE: 2000-03-04
ctaaagctctcttgctgcctagcctcctgccggcctcatcttcgcccagccaaccccgcctggagccctatggccaactgcgagttcagcccggtgtccggggacaaaccctgctgccggctctctaggagagcccaactctgtcttggcgtcagtatcctggtcctgatcctcgtcgtggtgctcgcggtggtcgtcccgaggtggcgccagacgtggagcggtccgggcaccaccaagcgctttcccgagaccgtcctggcgcgatgcgtcaagtacactgaaattcatcctgagatgagacatgtagactgccaaagtgtatgggatgctttcaagggtgcatttatttcaaaacatccttgcaacattactgaagaagactatcagccactaatgaagttgggaactcagaccgtaccttgcaacaagattcttctttggagcagaataaaagatctggcccatcagttcacacaggtccagcgggacatgttcaccctggaggacacgctgctaggctaccttgctgatgacctcacatggtgtggtgaattcaacacttccaaaataaactatcaatcttgcccagactggagaaaggactgcagcaacaaccctgtttcagtattctggaaaacggtttcccgcaggtttgcagaagctgcctgtgatgtggtccatgtgatgctcaatggatcccgcagtaaaatctttgacaaaaacagcacttttgggagtgtggaagtccataatttgcaaccagagaaggttcagacactagaggcctgggtgatacatggtggaagagaagattccagagacttatgccaggatcccaccataaaagagctggaatcgattataagcaaaaggaatattcaattttcctgcaagaatatctacagacctgacaagtttcttcagtgtgtgaaaaatcctgaggattcatcttgcacatctgagatctgagccagtcgctgtggttgttttagctccttgactccttgtggtttatgtcatcatacatgactcagcatacctgctggtgcagagctgaagattttggagggtcctccacaataaggtcaatgccagagacggaagcctttttccccaaagtcttaaaataacttatatcatcagcatacctttattgtgatctatcaatagtcaagaaaaattattgtataagattagaatgaaaattgtatgttaagttacttcctttag

SEQ ID NO: 10695 - protein, 300 aa, Homo sapiens
  ref <308>: DATABASE ACCESSION NUMBER: SWISS-Prot / P28907
  ref <309>: DATABASE ENTRY DATE: 2002-06-15
MANCEFSPVSGDKPCCRLSRRAQLCLGVSILVLILVVVLAVVVPRWRQTWSGPGTTKRFPETVLARCVKYTEIHPEMRHVDCQSVWDAFKGAFISKHPCNITEEDYQPLMKLGTQTVPCNKILLWSRIKDLAHQFTQVQRDMFTLEDTLLGYLADDLTWCGEFNTSKINYQSCPDWRKDCSNNPVSVFWKTVSRRFAEAACDVVHVMLNGSRSKIFDKNSTFGSVEVHNLQPEKVQTLEAWVIHGGREDSRDLCQDPTIKELESIISKRNIQFSCKNIYRPDKFLQCVKNPEDSSCTSEI

SEQ ID NO: 10696 - DNA, 3335 bp, Rattus norvegicus; identical to SEQ ID NO: 1917
  ref <308>: DATABASE ACCESSION NUMBER: EMBL / D29766
  ref <309>: DATABASE ENTRY DATE: 1998-10-27

SEQ ID NO: 10697 - protein, 968 aa, Rattus norvegicus; identical to SEQ ID NO: 1918
  ref <308>: DATABASE ACCESSION NUMBER: SWISS-Prot / Q63767
  ref <309>: DATABASE ENTRY DATE: 2002-06-15

SEQ ID NO: 10698 - DNA, 3208 bp, Homo sapiens; identical to SEQ ID NO: 1919
  ref <308>: DATABASE ACCESSION NUMBER: EMBL / AJ242987
  ref <309>: DATABASE ENTRY DATE: 2000-03-02

SEQ ID NO: 10699 - protein, 870 aa, Homo sapiens; identical to SEQ ID NO: 1920
  ref <308>: DATABASE ACCESSION NUMBER: SWISS-Prot / P56945
  ref <309>: DATABASE ENTRY DATE: 2002-06-15

SEQ ID NO: 10700 - DNA, 3455 bp, Rattus norvegicus; identical to SEQ ID NO: 1993
  ref <308>: DATABASE ACCESSION NUMBER: EMBL / D31874
  ref <309>: DATABASE ENTRY DATE: 1999-01-21

SEQ ID NO: 10701 - protein, 638 aa, Rattus norvegicus; identical to SEQ ID NO: 1994
  ref <308>: DATABASE ACCESSION NUMBER: SWISS-Prot / P53670
  ref <309>: DATABASE ENTRY DATE: 2002-06-15

SEQ ID NO: 10702 - DNA, 2805 bp, Homo sapiens; identical to SEQ ID NO: 1995
  ref <308>: DATABASE ACCESSION NUMBER: EMBL / BC013051
  ref <309>: DATABASE ENTRY DATE: 2001-08-30

SEQ ID NO: 10703 - protein, 638 aa, Homo sapiens; identical to SEQ ID NO: 1996
  ref <308>: DATABASE ACCESSION NUMBER: SWISS-Prot / P53671
  ref <309>: DATABASE ENTRY DATE: 2002-06-15

SEQ ID NO: 10704 - DNA, 3726 bp, Rattus norvegicus; identical to SEQ ID NO: 2009
  ref <308>: DATABASE ACCESSION NUMBER: EMBL / D37880
  ref <309>: DATABASE ENTRY DATE: 2000-02-01

SEQ ID NO: 10705 - protein, 880 aa, Rattus norvegicus; identical to SEQ ID NO: 2010
  ref <308>: DATABASE ACCESSION NUMBER: SWISS-Prot / P55146
  ref <309>: DATABASE ENTRY DATE: 2002-06-15

SEQ ID NO: 10706 - DNA, 3031 bp, Homo sapiens; identical to SEQ ID NO: 2011
  ref <308>: DATABASE ACCESSION NUMBER: EMBL / U02566
  ref <309>: DATABASE ENTRY DATE: 1999-06-30

SEQ ID NO: 10707 - protein, 890 aa, Homo sapiens; identical to SEQ ID NO: 2012
  ref <308>: DATABASE ACCESSION NUMBER: SWISS-Prot / Q06418
  ref <309>: DATABASE ENTRY DATE: 2002-06-15

SEQ ID NO: 10708 - DNA, 3477 bp, Rattus norvegicus; identical to SEQ ID NO: 2013
  ref <308>: DATABASE ACCESSION NUMBER: EMBL / D38222
  ref <309>: DATABASE ENTRY DATE: 1999-01-21

SEQ ID NO: 10709 - protein, 923 aa, Rattus norvegicus; identical to SEQ ID NO: 2014
  misc_feature (1)..(923): Xaa=Unknown amino acid

SEQ ID NO: 10710 - DNA, 3613 bp, Homo sapiens; identical to SEQ ID NO: 2015
  ref <308>: DATABASE ACCESSION NUMBER: EMBL / L18983
  ref <309>: DATABASE ENTRY DATE: 1999-07-02

SEQ ID NO: 10711 - protein, 979 aa, Homo sapiens; identical to SEQ ID NO: 2016
  ref <308>: DATABASE ACCESSION NUMBER: SWISS-Prot / Q16849
  ref <309>: DATABASE ENTRY DATE: 2002-06-15

SEQ ID NO: 10712 - DNA, 2293 bp, Rattus norvegicus
  ref <308>: DATABASE ACCESSION NUMBER: EMBL / D38380
  ref <309>: DATABASE ENTRY DATE: 1999-06-07
cgtccgctcctcgccacacacaccgagaggatgaggttcgctgtgggtgccctgctggcttgtgccgccctgggactgtgtctggctgtccctgacaaaacggtcaaatggtgcgcagtgtctgagcatgagaacaccaagtgtatcagtttccgtgaccacatgaaaaccgtccttccagctgatggcccccggcttgcctgtgtgaagaaaacctcctatcaagattgcatcaaggccatttctggaggtgaagctgatgccattaccttggatgggggttgggtgtacgatgcaggcctgactcccaacaacctgaagcctgtggcagcagagttttatggatcacttgaacatccacagacccactacttggctgtggccgtggtgaagaagggaacagacttccagctgaaccagctccagggcaagaagtcctgccacactggcctgggcaggtctgcaggctggattatccccattggcttacttttctgtaacttgccagagccccgcaagcctcttgagaaagctgtggccagtttcttctcgggcagttgtgtcccctgtgcagatccagtggccttcccccagctgtgtcaactgtgtccaggctgtggctgctccccgactcaaccgttctttggctacgtaggcgccttcaagtgtctgagagatggaggtggagatgtggcctttgtcaagcatacaaccatatttgaggtcttgccacagaaggctgacagggatcaatatgagctgctctgccttgacaatacccgcaagccagtggatcagtatgaggactgctacctagcccggatcccttctcatgctgttgtggctcgaaatggagatggcaaagaggacttgatctgggagatcctcaaagtggctcaggaacactttggcaaaggcaaatcaaaagacttccaactgttcggctctcctcttgggaaagacctgctgtttaaggattctgcctttggctgttacggggtgcccccaaggatggactacaggctgtacctcggccacagctatgtcactgccattcgaaatcagcgggaaggcgtgtgcccggaggcctccatcgacagcgcgccagtgaaatggtgtgcactgagtcaccaagagagagccaagtgtgatgagtggagcgtcacgagcaatgggcagatagagtgtgagtcagcagagagcactgaggactgcattgacaagattgtgaatggagaagcagatgccatgagcttggatggaggtcatgcctacatagcaggccagtgtggactagtgcccgtcatggcagagaactatgatatctcttcgtgtacaaacccacaatcagatgtctttcctaaagggtattatgccgtggctgtggtgaaggcatcagactccagcatcaactggaacaacctgaaaggcaagaagtcctgccatactggagtagacagaaccgccggctggaacatccctatgggcctgctgttcagcaggatcaaccactgcaagttcgatgaatttttcagtcaaggctgtgctcctggctataagaagaattccaccctctgtgacctgtgtattggcccagcaaaatgtgctccgaacaacagagagggatataatggttatacaggggctttccagtgcctcgttgagaagggagacgtagcctttgtgaagcaccagactgtcctggaaaacacgaacggaaagaacactgctgcatgggctaaggatctgaagcaggaagacttccagctgctgtgccctgatggtaccaagaagcctgtaaccgagttcgccacctgccacctggcccaagctccaaaccatgttgtggtctcacgaaaagagaaggcagcccgggttagcactgtgctgactgcccagaaggatttattttggaaaggtgacaaggactgcactggcaatttctgtttgttccggtcttccaccaaggaccttctgttcagagatgacaccaagtgtttgactaaacttccagaaggtaccacatatgaagagtacttaggagcagagtacttgcaagctgttggaaacataaggaagtgttcaacctcacgactcctagaagcctgcactttccacaaaagttaaaatccaagaggtgggtgccactgtggtggaggaggatgcccccgtgatccatgggcttctcctggcctccatagccctgagcggctggggctaactgtgtccgtcttactgcttggtgttgttaccacatacacagagcacaaaataaaaaatgactgttgacttt

SEQ ID NO: 10713 - protein, 698 aa, Rattus norvegicus
  ref <308>: DATABASE ACCESSION NUMBER: SWISS-Prot / P12346
  ref <309>: DATABASE ENTRY DATE: 2002-06-15
MRFAVGALLACAALGLCLAVPDKTVKWCAVSEHENTKCISFRDHMKTVLPADGPRLACVKKTSYQDCIKAISGGEADAITLDGGWVYDAGLTPNNLKPVAAEFYGSLEHPQTHYLAVAVVKKGTDFQLNQLQGKKSCHTGLGRSAGWIIPIGLLFCNLPEPRKPLEKAVASFFSGSCVPCADPVAFPQLCQLCPGCGCSPTQPFFGYVGAFKCLRDGGGDVAFVKHTTIFEVLPQKADRDQYELLCLDNTRKPVDQYEDCYLARIPSHAVVARNGDGKEDLIWEILKVAQEHFGKGKSKDFQLFGSPLGKDLLFKDSAFGCYGVPPRMDYRLYLGHSYVTAIRNQREGVCPEASIDSAPVKWCALSHQERAKCDEWSVTSNGQIECESAESTEDCIDKIVNGEADAMSLDGGHAYIAGQCGLVPVMAENYDISSCTNPQSDVFPKGYYAVAVVKASDSSINWNNLKGKKSCHTGVDRTAGWNIPMGLLFSRINHCKFDEFFSQGCAPGYKKNSTLCDLCIGPAKCAPNNREGYNGYTGAFQCLVEKGDVAFVKHQTVLENTNGKNTAAWAKDLKQEDFQLLCPDGTKKPVTEFATCHLAQAPNHVVVSRKEKAARVSTVLTAQKDLFWKGDKDCTGNFCLFRSSTKDLLFRDDTKCLTKLPEGTTYEEYLGAEYLQAVGNIRKCSTSRLLEACTFHKS

SEQ ID NO: 10714 - DNA, 2298 bp, Homo sapiens
  ref <308>: DATABASE ACCESSION NUMBER: EMBL / M12530
  ref <309>: DATABASE ENTRY DATE: 2000-03-04
tgtgctcgctgctcagcgcgcacccggaagatgaggctcgccgtgggagccctgctggtctgcgccgtcctggggctgtgtctggctgtccctgataaaactgtgagatggtgtgcagtgtcggagcatgaggccactaagtgccagagtttccgcgaccatatgaaaagcgtcattccatccgatggtcccagtgttgcttgtgtgaagaaagcctcctaccttgattgcatcagggccattgcggcaaacgaagcggatgctgtgacactggatgcaggtttggtgtatgatgcttacttggctcccaataacctgaagcctgtggtggcagagttctatgggtcaaaagaggatccacagactttctattatgctgttgctgtggtgaagaaggatagtggcttccagatgaaccagcttcgaggcaagaagtcctgccacacgggtctaggcaggtccgctgggtggaacatccccataggcttactttactgtgacttacctgagccacgtaaacctcttgagaaagcagtggccaatttcttctcgggcagctgtgccccttgtgcggatgggacggacttcccccagctgtgtcaactgtgtccagggtgtggctgctccacccttaaccaatacttcggctactcgggagccttcaagtgtctgaaggatggtgctggggatgtggcctttgtcaagcactcgactatatttgagaacttggcaaacaaggctgacagggaccagtatgagctgctttgcctagacaacacccggaagccggtagatgaatacaaggactgccacttggcccaggtcccttctcataccgtcgtggcccgaagtatgggcggcaaggaggacttgatctgggagcttctcaaccaggcccaggaacattttggcaaagacaaatcaaaagaattccaactattcagctctcctcatgggaaggacctgctgtttaaggactctgcccacgggtttttaaaagtccccccaaggatggatgccaagatgtacctgggctatgagtatgtcactgccatccggaatctacgggaaggcacatgcccagaagccccaacagatgaatgcaagcctgtgaagtggtgtgcgctgagccaccacgagaggctcaagtgtgatgagtggagtgttaacagtgtagggaaaatagagtgtgtatcagcagagaccaccgaagactgcatcgccaagatcatgaatggagaagctgatgccatgagcttggatggagggtttgtctacatagcgggcaagtgtggtctggtgcctgtcttggcagaaaactacaataagagcgataattgtgaggatacaccagaggcagggtattttgctgtagcagtggtgaagaaatcagcttctgacctcacctgggacaatctgaaaggcaagaagtcctgccatacggcagttggcagaaccgctggctggaacatccccatgggcctgctctacaataagatcaaccactgcagatttgatgaatttttcagtgaaggttgtgcccctgggtctaagaaagactccagtctctgtaagctgtgtatgggctcaggcctaaacctgtgtgaacccaacaacaaagagggatactacggctacacaggcgctttcaggtgtctggttgagaagggagatgtggcctttgtgaaacaccagactgtcccacagaacactgggggaaaaaaccctgatccatgggctaagaatctgaatgaaaaagactatgagttgctgtgccttgatggtaccaggaaacctgtggaggagtatgcgaactgccacctggccagagccccgaatcacgctgtggtcacacggaaagataaggaagcttgcgtccacaagatattacgtcaacagcagcacctatttggaagcaacgtaactgactgctcgggcaacttttgtttgttccggtcggaaaccaaggaccttctgttcagagatgacacagtatgtttggccaaacttcatgacagaaacacatatgaaaaatacttaggagaagaatatgtcaaggctgttggtaacctgagaaaatgctccacctcatcactcctggaagcctgcactttccgtagaccttaaaatctcagaggtagggctgccaccaaggtgaagatgggaacgcagatgatccatgagtttgccctggtttcactggcccaagtggtttgtgctaaccacgtctgtcttcacagctctgtgttgccatgtgtgctgaacaaaaaataaaaattattattgattttatatttc

SEQ ID NO: 10715 - protein, 698 aa, Homo sapiens
  ref <308>: DATABASE ACCESSION NUMBER: SWISS-Prot / P02787
  ref <309>: DATABASE ENTRY DATE: 2002-06-15
MRLAVGALLVCAVLGLCLAVPDKTVRWCAVSEHEATKCQSFRDHMKSVIPSDGPSVACVKKASYLDCIRAIAANEADAVTLDAGLVYDAYLAPNNLKPVVAEFYGSKEDPQTFYYAVAVVKKDSGFQMNQLRGKKSCHTGLGRSAGWNIPIGLLYCDLPEPRKPLEKAVANFFSGSCAPCADGTDFPQLCQLCPGCGCSTLNQYFGYSGAFKCLKDGAGDVAFVKHSTIFENLANKADRDQYELLCLDNTRKPVDEYKDCHLAQVPSHTVVARSMGGKEDLIWELLNQAQEHFGKDKSKEFQLFSSPHGKDLLFKDSAHGFLKVPPRMDAKMYLGYEYVTAIRNLREGTCPEAPTDECKPVKWCALSHHERLKCDEWSVNSVGKIECVSAETTEDCIAKIMNGEADAMSLDGGFVYIAGKCGLVPVLAENYNKSDNCEDTPEAGYFAVAVVKKSASDLTWDNLKGKKSCHTAVGRTAGWNIPMGLLYNKINHCRFDEFFSEGCAPGSKKDSSLCKLCMGSGLNLCEPNNKEGYYGYTGAFRCLVEKGDVAFVKHQTVPQNTGGKNPDPWAKNLNEKDYELLCLDGTRKPVEEYANCHLARAPNHAVVTRKDKEACVHKILRQQQHLFGSNVTDCSGNFCLFRSETKDLLFRDDTVCLAKLHDRNTYEKYLGEEYVKAVGNLRKCSTSSLLEACTFRRP

SEQ ID NO: 10716 - DNA, 2355 bp, Rattus norvegicus
  ref <308>: DATABASE ACCESSION NUMBER: EMBL / D38468
  ref <309>: DATABASE ENTRY DATE: 1997-08-02
gctcttttcttctccctcgctatccgctcccccgcccccgtgcctctggctctgcgcctggctccctcgggtccgctcccctttcccgccggcctggcccggcgtcacgctcccggagtctccccgctcggcggcgtctcattgtgggagggggtcagatcaccccgccgggcggtggcgctggggggcagcggagggggaggggccttagtcgttcgcccgcgccgcccgcccgcctgccgagcgcgctcaccgccgatctccctccttgctctgcagccgcggcccatggagcccgccggcccggcccctggccgcctagggccgctgctgttctgcctgctgctctccgcgtcctgtttctgtgcaggagccagcgggaaagaactgaaggtgactcaggctgacaaatcagtgtctgttgctgctggagattcggccactctgaactgcactgtgtcctccctgacgcctgtgggacccattaagtggttcaaaggagaagggcaaaatcggagcccgatctacagtttcataggaggagaacactttcctcgaattacaaatgtttcagatgctactaagagaaacaatatggactttagcatctgtatcagtaatgtcaccccagaagatgctggcacctactactgtgtgaagttccagaaaggaatagtagagcctgacacagaaattaaatctggagggggaacaacgctctatgtactcgccaaaccttcttcaccggaagtatcgggcccagactccagggcctctcctggacagacagtgaacttcacctgcaagtcttacggcttctctccccggaatatcaccctgaagtggctcaaagatgggaaagaactctcccatttggagaccaccatctccagtaaaagcaatgtctcctacaacatctccagcacagtcagcgtgaaactaagccccgaggacattcattctcgggtcatctgcgaggtagcccacgtcaccttggaaggacgcccgcttaatgggaccgctaacttttctaacatcatccgagtttcacccaccttgaagatcacccaacagcccctgacgcccgcgagccaggtgaacctcacctgccaggtgcagaagttctaccccaaggctctccagctgaactggctggagaatggaaacttatcacggacggacaagcccgagcatttcacagacaacagggatgggacctataattacacaagcctgttcctggtgaactcatctgctcacagagaggatgtggtattcacgtgccaggtggagcatgacagtcagccagcgatcaccgaaaaccataccgtgcgggcatttgcccactcgagtagtggaggcagcatggaaaccatccctgataataatgcttactacaactggaacgtcttcatcggtgtgggtgtggcgtgtgctttgctagtagtcctgctgatggctgccctctacctcctccgaatcaaacagaagaaagccaagggctcaacttcttccacacggttgcacgagcccgagaagaatgccagggaaataacccagatccaggacacaaatgacatcaacgacatcacatacgcagacctgaatctgcccaaagagaagaagcccgccccccgggtccccgagcccaacaaccacacagaatatgcaagcattgagacaggcaaactgcctaggccagaggataccctcacctatgctgacctggacatggtccacctcaaccgggcacagccaacccccaagcctgagccatccttctcagagtatgccagtgtccaagtccagaggaagtgaatggggctgtggttggctctaggccccatccccacaagttttcttgtcctacatggagtggccatgatgaggacaaccagccagccagccctgtctccagaaggccaggtggcacaggtcctaggaccaggggtaagggtggcttctgtcttccctccgtggctctccaacacctcttgacacccatgtccccttcttctggagctgggtgttgcagaaccagagggggaactggagaaagctgcctagaatccaagaagcgttgtgcctcagcccatcacactgggtctggatcctggtcttggcaacccccaggttgcttccttgatgctccagcgcctggtcttctgtgtggagaagagttcaccatctccatccaacttgagcttcggggccagactccctttagatcagaccgccccatgtgtggaagaactacaccaggagtcaacaagttttcagccaacagtgctagcctccccacctcccaggctgacgagccctgaggagaaggaaccctcttcccctagaccagct

SEQ ID NO: 10717 - protein, 510 aa, Rattus norvegicus
  misc_feature (1)..(510): Xaa=Unknown amino acid
MEPAGPAPGRLGPLLFCLLLSASCFCAGASGKELKVTQADKSVSVAAGDSATLNCTVSSLTPVGPIKWFKGEGQNRSPIYSFIGGEHFPRITNVSDATKRNNMDFSICISNVTPEDAGTYYCVKFQKGIVEPDTEIKSGGGTTLYVLAKPSSPEVSGPDSRASPGQTVNFTCKSYGFSPRNITLKWLKDGKELSHLETTISSKSNVSYNISSTVSVKLSPEDIHSRVICEVAHVTLEGRPLNGTANFSNIIRVSPTLKITQQPLTPASQVNLTCQVQKFYPKALQLNWLENGNLSRTDKPEHFTDNRDGTYNYTSLFLVNSSAHREDVVFTCQVEHDSQPAITENHTVRAFAHSSSGGSMETIPDNNAYYNWNVFIGVGVACALLVVLLMAALYLLRIKQKKAKGSTSSTRLHEPEKNAREITQIQDTNDINDITYADLNLPKEKKPAPRVPEPNNHTEYASIETGKLPRPEDTLTYADLDMVHLNRAQPTPKPEPSFSEYASVQVQRKX

SEQ ID NO: 10718 - DNA, 1977 bp, Homo sapiens
  ref <308>: DATABASE ACCESSION NUMBER: EMBL / D86043
  ref <309>: DATABASE ENTRY DATE: 1999-01-21
ccatggagcccgccggcccggcccccggccgcctcgggccgctgctctgcctgctgctcgccgcgtcctgcgcctggtcaggagtggcgggtgaggaggagctgcaggtgattcagcctgacaagtccgtatcagttgcagctggagagtcggccattctgcactgcactgtgacctccctgatccctgtggggcccatccagtggttcagaggagctggaccagcccgggaattaatctacaatcaaaaagaaggccacttcccccgggtaacaactgtttcagagtccacaaagagagaaaacatggacttttccatcagcatcagtaacatcaccccagcagatgccggcacctactactgtgtgaagttccggaaagggagccctgacacggagtttaagtctggagcaggcactgagctgtctgtgcgtgccaaaccctctgcccccgtggtatcgggccctgcggcgagggccacacctcagcacacagtgagcttcacctgcgagtcccacggcttctcacccagagacatcaccctgaaatggttcaaaaatgggaatgagctctcagacttccagaccaacgtggaccccgtaggagagagcgtgtcctacagcatccacagcacagccaaggtggtgctgacccgcgaggacgttcactctcaagtcatctgcgaggtggcccacgtcaccttgcagggggaccctcttcgtgggactgccaacttgtctgagaccatccgagttccacccaccttggaggttactcaacagcccgtgagggcagagaaccaggtgaatgtcacctgccaggtgaggaagttctacccccagagactacagctgacctggttggagaatggaaacgtgtcccggacagaaacggcctcaaccgttacagagaacaaggatggtacctacaactggatgagctggctcctggtgaatgtatctgcccacagggatgatgtgaagctcacctgccaggtggagcatgacgggcagccagcggtcagcaaaagccatgacctgaaggtctcagcccacccgaaggagcagggctcaaataccgccgctgagaacactggatctaatgaacggaacatctatattgtggtgggtgtggtgtgcaccttgctggtggccctactgatggcggccctctacctcgtccgaatcagacagaagaaagcccagggctccacttcttctacaaggttgcatgagcccgagaagaatgccagagaaataacacaggacacaaatgatatcacatatgcagacctgaacctgcccaaggggaagaagcctgctccccaggctgcggagcccaacaaccacacggagtatgccagcattcagaccagcccgcagcccgcgtcggaggacaccctcacctatgctgacctggacatggtccacctcaaccggacccccaagcagccggcccccaagcctgagccgtccttctcagagtacgccagcgtccaggtcccgaggaagtgaatgggaccgtggtttgctctagcacccatctctacgcgctttcttgtcccacagggagccgccgtgatgagcacagccaacccagttcccggagggctggggcggtgcaggctctgggacccaggggccagggtggctcttctctccccacccctccttggctctccagcacttcctgggcagccacggccccctccccccacattgccacatacctggaggctgacgttgccaaaccagccagggaaccaacctgggaagtggccagaactgcctggggtccaagaactcttgtgcctccgtccatcaccatgtgggttttgaagaccctcgactgcctccccgatgctccgaagcctgatcttccagggtggggaggagaaaatcccacctcccctgacctccaccacctccaccaccaccaccaccaccaccaccaccactaccaccaccacccaactgg

SEQ ID NO: 10719 - protein, 504 aa, Homo sapiens
  misc_feature (1)..(504): Xaa=Unknown amino acid
MEPAGPAPGRLGPLLCLLLAASCAWSGVAGEEELQVIQPDKSVSVAAGESAILHCTVTSLIPVGPIQWFRGAGPARELIYNQKEGHFPRVTTVSESTKRENMDFSISISNITPADAGTYYCVKFRKGSPDTEFKSGAGTELSVRAKPSAPVVSGPAARATPQHTVSFTCESHGFSPRDITLKWFKNGNELSDFQTNVDPVGESVSYSIHSTAKVVLTREDVHSQVICEVAHVTLQGDPLRGTANLSETIRVPPTLEVTQQPVRAENQVNVTCQVRKFYPQRLQLTWLENGNVSRTETASTVTENKDGTYNWMSWLLVNVSAHRDDVKLTCQVEHDGQPAVSKSHDLKVSAHPKEQGSNTAAENTGSNERNIYIVVGVVCTLLVALLMAALYLVRIRQKKAQGSTSSTRLHEPEKNAREITQDTNDITYADLNLPKGKKPAPQAAEPNNHTEYASIQTSPQPASEDTLTYADLDMVHLNRTPKQPAPKPEPSFSEYASVQVPRKX

SEQ ID NO: 10720 - DNA, 921 bp, Rattus norvegicus; identical to SEQ ID NO: 2041
  ref <308>: DATABASE ACCESSION NUMBER: EMBL / D45249
  ref <309>: DATABASE ENTRY DATE: 1999-01-21

SEQ ID NO: 10721 - protein, 249 aa, Rattus norvegicus; identical to SEQ ID NO: 2042
  ref <308>: DATABASE ACCESSION NUMBER: SWISS-Prot / BAA08206
  ref <309>: DATABASE ENTRY DATE: 2001-10-16

SEQ ID NO: 10722 - DNA, 985 bp, Homo sapiens; identical to SEQ ID NO: 2043
  ref <308>: DATABASE ACCESSION NUMBER: Refseq / NM_006263
  ref <309>: DATABASE ENTRY DATE: 2000-11-01

SEQ ID NO: 10723 - protein, 249 aa, Homo sapiens; identical to SEQ ID NO: 2044
  ref <308>: DATABASE ACCESSION NUMBER: SWISS-Prot / Q06323
  ref <309>: DATABASE ENTRY DATE: 2001-10-16

SEQ ID NO: 10724 - DNA, 869 bp, Rattus norvegicus; identical to SEQ ID NO: 2083
  ref <308>: DATABASE ACCESSION NUMBER: EMBL / D49363
  ref <309>: DATABASE ENTRY DATE: 1999-01-21

SEQ ID NO: 10725 - protein, 136 aa, Rattus norvegicus; identical to SEQ ID NO: 2084
  ref <308>: DATABASE ACCESSION NUMBER: SWISS-Prot / BAA08359
  ref <309>: DATABASE ENTRY DATE: 2002-06-15

SEQ ID NO: 10726 - DNA, 5956 bp, Homo sapiens; identical to SEQ ID NO: 2085
  misc_feature (1)..(5956): n=a, c, g or t
  ref <308>: DATABASE ACCESSION NUMBER: EMBL / AY026764
  ref <309>: DATABASE ENTRY DATE: 2001-02-14

SEQ ID NO: 10727 - protein, 137 aa, Homo sapiens; identical to SEQ ID NO: 2086
  ref <308>: DATABASE ACCESSION NUMBER: SWISS-Prot / AAK01939
  ref <309>: DATABASE ENTRY DATE: 2002-06-15

SEQ ID NO: 10728 - DNA, 1739 bp, Rattus norvegicus; identical to SEQ ID NO: 2111
  ref <308>: DATABASE ACCESSION NUMBER: EMBL / D49847
  ref <309>: DATABASE ENTRY DATE: 1999-01-21

SEQ ID NO: 10729 - protein, 217 aa, Rattus norvegicus [sequence omitted]

SEQ ID NO: 10730 - DNA, 1356 bp, Homo sapiens; identical to SEQ ID NO: 2113
  ref <308>: DATABASE ACCESSION NUMBER: EMBL / BC000631
  ref <309>: DATABASE ENTRY DATE: 2001-07-13

SEQ ID NO: 10731 - protein, 217 aa, Homo sapiens [sequence omitted]

SEQ ID NO: 10732 - DNA, 942 bp, Rattus norvegicus
  ref <308>: DATABASE ACCESSION NUMBER: EMBL / D50558
  ref <309>: DATABASE ENTRY DATE: 2000-04-25
atgtatgtcgtcaagacatgtgtaacctgcaccatgtacttgggaatccttttctcggtgttggcctatctgctctcagatgctgttcctgtgaagaggcaagcttacttcaatagcactgcatacctgccgtgcccgttcacaaaggctcaaaacataagcccgagtgagctcgtagtattttggcaggaccggaaaaagtcggttctgtacgaacactatttgggcgcagagaaacttgataacgtgaatgccaagtacctgggccgcacaagctttgatagggataaccaggctctacgacttcacaatgttcagatcaaggacacgggcttgtatgattgttttatacagcaaaagacacccacgggatcaattatcctccagcagtgggaaacagagctctcagtgatcgccaacttcagtgaacctgaaatagaggaggctcagaatgaaacaagaaacactggcataaatttgacctgctcatctaagcaaggatacccgaaacctacaaagatgtattttttgataactaattcaactaatgagtatggcgacaacatgcagatatcacaagacaatgtcacaaagctgttcagtgtctccatcagcctatctcttccattcccggatggggtgtacaatatgaccattgtgtgtattctggaaacggagtcaatgaatatttcctccaaacctcacaatatggttttttcgcagccccagtttgatcgaaagacttggatccagattgcaggtcccagttcacttctgtgctgtctctttctgctggtcgtctacaaagcagtcaaaaagtgtttgaagatgcagaaccagcccggcagacccagcagaaagacttgtgagtccaagcaggacagtggtgttgacgagtcgatcaacctggaggaagttgaaccccaattgcatcagcagtaa

SEQ ID NO: 10733 - protein, 313 aa, Rattus norvegicus
  ref <308>: DATABASE ACCESSION NUMBER: SWISS-Prot / BAA23470
  ref <309>: DATABASE ENTRY DATE: 2003-02-01
MYVVKTCVTCTMYLGILFSVLAYLLSDAVPVKRQAYFNSTAYLPCPFTKAQNISPSELVVFWQDRKKSVLYEHYLGAEKLDNVNAKYLGRTSFDRDNQALRLHNVQIKDTGLYDCFIQQKTPTGSIILQQWETELSVIANFSEPEIEEAQNETRNTGINLTCSSKQGYPKPTKMYFLITNSTNEYGDNMQISQDNVTKLFSVSISLSLPFPDGVYNMTIVCILETESMNISSKPHNMVFSQPQFDRKTWIQIAGPSSLLCCLFLLVVYKAVKKCLKMQNQPGRPSRKTCESKQDSGVDESINLEEVEPQLHQQ

SEQ ID NO: 10734 - DNA, 1424 bp, Homo sapiens
  ref <308>: DATABASE ACCESSION NUMBER: EMBL / U04343
  ref <309>: DATABASE ENTRY DATE: 1999-07-02
aggagccttaggaggtacggggagctcgcaaatactccttttggtttattcttaccaccttgcttctgtgttccttgggaatgctgctgtgcttatgcatctggtctctttttggagctacagtggacaggcatttgtgacagcactatgggactgagtaacattctctttgtgatggccttcctgctctctggtgctgctcctctgaagattcaagcttatttcaatgagactgcagacctgccatgccaatttgcaaactctcaaaaccaaagcctgagtgagctagtagtattttggcaggaccaggaaaacttggttctgaatgaggtatacttaggcaaagagaaatttgacagtgttcattccaagtatatgggccgcacaagttttgattcggacagttggaccctgagacttcacaatcttcagatcaaggacaagggcttgtatcaatgtatcatccatcacaaaaagcccacaggaatgattcgcatccaccagatgaattctgaactgtcagtgcttgctaacttcagtcaacctgaaatagtaccaatttctaatataacagaaaatgtgtacataaatttgacctgctcatctatacacggttacccagaacctaagaagatgagtgttttgctaagaaccaagaattcaactatcgagtatgatggtattatgcagaaatctcaagataatgtcacagaactgtacgacgtttccatcagcttgtctgtttcattccctgatgttacgagcaatatgaccatcttctgtattctggaaactgacaagacgcggcttttatcttcacctttctctatagagcttgaggaccctcagcctcccccagaccacattccttggattacagctgtacttccaacagttattatatgtgtgatggttttctgtctaattctatggaaatggaagaagaagaagcggcctcgcaactcttataaatgtggaaccaacacaatggagagggaagagagtgaacagaccaagaaaagagaaaaaatccatatacctgaaagatctgatgaagcccagcgtgtttttaaaagttcgaagacatcttcatgcgacaaaagtgatacatgtttttaattaaagagtaaagcccatacaagtattcattttttctaccctttcctttgtaagttcctgggcaacctttttgatttcttccagaaggcaaaaagacattaccatgagtaataagggggctccaggactccctctaagtggaatagcctccctgtaactccagctctgctccgtatgccaagaggagactttaattctcttactgcttcttttcacttcagagcacacttatgggccaagcccagcttaatggctcatgacctggaaataaaatttaggaccaataaaaaaaaaaaaaaaaaaaa

SEQ ID NO: 10735 - protein, 329 aa, Homo sapiens
  ref <308>: DATABASE ACCESSION NUMBER: SWISS-Prot / P42081
  ref <309>: DATABASE ENTRY DATE: 2002-06-15
MDPQCTMGLSNILFVMAFLLSGAAPLKIQAYFNETADLPCQFANSQNQSLSELVVFWQDQENLVLNEVYLGKEKFDSVHSKYMGRTSFDSDSWTLRLHNLQIKDKGLYQCIIHHKKPTGMIRIHQMNSELSVLANFSQPEIVPISNITENVYINLTCSSIHGYPEPKKMSVLLRTKNSTIEYDGIMQKSQDNVTELYDVSISLSVSFPDVTSNMTIFCILETDKTRLLSSPFSIELEDPQPPPDHIPWITAVLPTVIICVMVFCLILWKWKKKKRPRNSYKCGTNTMEREESEQTKKREKIHIPERSDEAQRVFKSSKTSSCDKSDTCF

SEQ ID NO: 10736 - DNA, 1922 bp, Rattus norvegicus
  ref <308>: DATABASE ACCESSION NUMBER: EMBL / D63665
  ref <309>: DATABASE ENTRY DATE: 1999-01-21
tggaactcttggaaccagagctgaacagcttgaccgcagggaccgcaaggctggtgctgcgcagggcagaacgccatcaaccaagcccaagaccagccccagccacacggcgagaccttgtctccagcacgagagactctgtactcaggaagccatggttgctcactcccctcccagcccctgcttgtctattctgtctctggataagttcttcctataaactctgactgaaagaacatggctctcgaaggtggaattcaggctgaggacggtggtgcttctctcagagaactctgtgtgtgtgcactgtccacaggggtaaactaagacccaacctgccttgacaacgaggaacaccagagctggtacatcctcctaagacatcgtccatcttgcatgagacagattctccaagcataggaaaagcaggccgccagttatggagcgggacaatggcaccatccaggctccaggcttgccgcccaccacctgcgtctaccgtgaggatttcaagcgactgctgctacccccagtttactcagtggtgctggtggtcggcctgccactgaacgtctgtgtcatcgcccagatatgcgcatcccgccggaccctgacccgttccgctgtgtacaccctgaacttggcactggcggacctgctgtatgcctgttcactgcccctacttatctataactacgccagaggggaccactggcccttcggagaccttgcctgccgcctggtacgcttcctcttctatgccaacctacacggcagcatcctgttcctcacctgcattagcttccagcgatacctaggcatctgccatcccctggccccctggcacaagcgtggaggtcgccgtgctgcttgggtggtatgtggagtcgtttggctggttgtgacagcccagtgcctgcccacagcagtctttgccgccacgggcatccagcgcaaccgcactgtctgctacgacctgagcccacccatcctgtccacccgctacctgccgtatggcatggccctcacggtcatcggcttcttgcttcccttcacagccttactggcctgctactgtcgcatggcccgccgcctgtgtcgccaggatggcccagcaggtcctgtggcccaagagcgtcgcagcaaggcggcccgtatggctgtcgtggtagcagctgtctttgttatcagcttcctgcctttccacatcaccaagacagcctacttggctgtgcgctccacgcccggcgtctcttgcccggtactggagaccttcgctgcagcctacaaaggcacccggcccttcgccagtgctaacagcgttctggaccctatcctcttctacttcacacaacagaagttccggcggcaaccacacgatctcctacagaagctcacagccaagtggcagaggcagagagtctgagaccccaggggaggccctgaagcactggctgcaatgtgtttgcccactggggtcatggtgcctgaagctttctcccaatcggaaaccataccgagaagaagcaaaacttggcccaacatgcctggccctccaaaatttctatgtcaaccacaaaactaagacacctgtgtttcggggactggtcagttcatgcttgttataccagaattcaggatgtcatgacaggataacaagctctaagccagcctggtctacatggtgaaaccccatctcagacaatcaagggttgagctaggtcctggaatagcactgcaaattctaacaaaggtcttcccgcctgaccgttcttgtgtttacaaggtagaggggaccactggtacaccatcacgaacgtgaggcaaggcccctcctgtagaggaagaagctgggaaagctcacattcccatccatttgccaagacttttgcacaggagagagaaataaatgtgttcttgtg

SEQ ID NO: 10737 - protein, 328 aa, Rattus norvegicus
  ref <308>: DATABASE ACCESSION NUMBER: SWISS-Prot / Q63371
  ref <309>: DATABASE ENTRY DATE: 1997-11-01
MERDNGTIQAPGLPPTTCVYREDFKRLLLPPVYSVVLVVGLPLNVCVIAQICASRRTLTRSAVYTLNLALADLLYACSLPLLIYNYARGDHWPFGDLACRLVRFLFYANLHGSILFLTCISFQRYLGICHPLAPWHKRGGRRAAWVVCGVVWLVVTAQCLPTAVFAATGIQRNRTVCYDLSPPILSTRYLPYGMALTVIGFLLPFTALLACYCRMARRLCRQDGPAGPVAQERRSKAARMAVVVAAVFVISFLPFHITKTAYLAVRSTPGVSCPVLETFAAAYKGTRPFASANSVLDPILFYFTQQKFRRQPHDLLQKLTAKWQRQRV

SEQ ID NO: 10738 - DNA, 1571 bp, Homo sapiens
  ref <308>: DATABASE ACCESSION NUMBER: EMBL / X97058
  ref <309>: DATABASE ENTRY DATE: 1996-05-03
ctcagtttcctcatctgctgcctctccagacttctgccagaacattgcacgcgacagtttcaggcacagaactgactggcagcaggggctgctccacgagtgggaatttgctccagcacttcacggactgcaagcgaggcacttgctaactcttggataacaagacctctgccagaagaaccatggctttggaaggcggagttcaggctgaggagatgggtgcggtcctcagtgagcccctgcctccctgaacataggaaacccacctgggcagccatggaatgggacaatggcacaggccaggctctgggcttgccacccaccacctgtgtctaccgcgagaacttcaagcaactgctgctgccacctgtgtattcggcggtgctggcggctggcctgccgctgaacatctgtgtcattacccagatctgcacgtcccgccgggccctgacccgcacggccgtgtacaccctaaaccttgctctggctgacctgctatatgcctgctccctgcccctgctcatctacaactatgcccaaggtgatcactggccctttggcgacttcgcctgccgcctggtccgcttcctcttctatgccaacctgcacggcagcatcctcttcctcacctgcatcagcttccagcgctacctgggcatctgccacccgctggccccctggcacaaacgtgggggccgccgggctgcctggctagtgtgtgtagccgtgtggctggccgtgacaacccagtgcctgcccacagccatcttcgctgccacaggcatccagcgtaaccgcactgtctgctatgacctcagcccgcctgccctggccacccactatatgccctatggcatggctctcactgtcatcggcttcctgctgccctttgctgccctgctggcctgctactgtctcctggcctgccgcctgtgccgccaggatggcccggcagagcctgtggcccaggagcggcgtggcaaggcggcccgcatggccgtggtggtggctgctgcctttgccatcagcttcctgccttttcacatcaccaagacagcctacctggcagtgcgctcgacgccgggcgtcccctgcactgtattggaggcctttgcagcggcctacaaaggcacgcggccgtttgccagtgccaacagcgtgctggaccccatcctcttctacttcacccagaagaagttccgccggcgaccacatgagctcctacagaaactcacagccaaatggcagaggcagggtcgctgagtcctccaggtcctgggcagccttcatatttgccattgtgtccggggcaccaggagccccaccaaccccaaaccatgcggagaattagagttcagctcagctgggcatggagttaagatccctcacaggacccagaagctcaccaaaaactatttcttcagccccttctctggcccagaccctgtgggcatggagatggacagacctgggcctggctcttgagaggtcccagtcagccatggagagctggggaaaccacattaaggtgctcacaaaaatacagtgtgacgtgtactgtcaaaaaaaaa

SEQ ID NO: 10739 - protein, 328 aa, Homo sapiens
  ref <308>: DATABASE ACCESSION NUMBER: SWISS-Prot / Q15077
  ref <309>: DATABASE ENTRY DATE: 2001-10-16
MEWDNGTGQALGLPPTTCVYRENFKQLLLPPVYSAVLAAGLPLNICVITQICTSRRALTRTAVYTLNLALADLLYACSLPLLIYNYAQGDHWPFGDFACRLVRFLFYANLHGSILFLTCISFQRYLGICHPLAPWHKRGGRRAAWLVCVAVWLAVTTQCLPTAIFAATGIQRNRTVCYDLSPPALATHYMPYGMALTVIGFLLPFAALLACYCLLACRLCRQDGPAEPVAQERRGKAARMAVVVAAAFAISFLPFHITKTAYLAVRSTPGVPCTVLEAFAAAYKGTRPFASANSVLDPILFYFTQKKFRRRPHELLQKLTAKWQRQGR

SEQ ID NO: 10740 - DNA, 3519 bp, Rattus norvegicus; identical to SEQ ID NO: 2135
  ref <308>: DATABASE ACCESSION NUMBER: EMBL / D63886
  ref <309>: DATABASE ENTRY DATE: 1997-09-16

SEQ ID NO: 10741 - protein, 607 aa, Rattus norvegicus; identical to SEQ ID NO: 2136
  ref <308>: DATABASE ACCESSION NUMBER: SWISS-Prot / BAA22223
  ref <309>: DATABASE ENTRY DATE: 2002-06-15

SEQ ID NO: 10742 - DNA, 2589 bp, Homo sapiens; identical to SEQ ID NO: 2137
  ref <308>: DATABASE ACCESSION NUMBER: Refseq / NM_005941
  ref <309>: DATABASE ENTRY DATE: 2002-11-05

SEQ ID NO: 10743 - protein, 607 aa, Homo sapiens; identical to SEQ ID NO: 2138
  ref <308>: DATABASE ACCESSION NUMBER: SWISS-Prot / P51512
  ref <309>: DATABASE ENTRY DATE: 2002-06-15

SEQ ID NO: 10744 - DNA, 892 bp, Rattus norvegicus; identical to SEQ ID NO: 2173
  ref <308>: DATABASE ACCESSION NUMBER: EMBL / D78613
  ref <309>: DATABASE ENTRY DATE: 1999-01-21

SEQ ID NO: 10745 - protein, 297 aa, Rattus norvegicus; identical to SEQ ID NO: 2174
  ref <308>: DATABASE ACCESSION NUMBER: SWISS-Prot / BAA11433
  ref <309>: DATABASE ENTRY DATE: 2002-03-01

SEQ ID NO: 10746 - DNA, 1952 bp, Rattus norvegicus; identical to SEQ ID NO: 2175
  ref <308>: DATABASE ACCESSION NUMBER: EMBL / D82074
  ref <309>: DATABASE ENTRY DATE: 1999-01-21

SEQ ID NO: 10747 - protein, 357 aa, Rattus norvegicus; identical to SEQ ID NO: 2176
  ref <308>: DATABASE ACCESSION NUMBER: SWISS-Prot / BAA11535
  ref <309>: DATABASE ENTRY DATE: 2002-06-15

SEQ ID NO: 10748 - DNA, 2502 bp, Homo sapiens; identical to SEQ ID NO: 2177

SEQ ID NO: 10749 - protein, 356 aa, Homo sapiens; identical to SEQ ID NO: 2178

SEQ ID NO: 10750 - DNA, 3123 bp, Rattus norvegicus; identical to SEQ ID NO: 2203
  ref <308>: DATABASE ACCESSION NUMBER: EMBL / D83948
  ref <309>: DATABASE ENTRY DATE: 1998-05-29

SEQ ID NO: 10751 - protein, 852 aa, Rattus norvegicus; identical to SEQ ID NO: 2204
  ref <308>: DATABASE ACCESSION NUMBER: SWISS-Prot / P70501
  ref <309>: DATABASE ENTRY DATE: 2002-06-15

SEQ ID NO: 10752 - DNA, 1451 bp, Homo sapiens; identical to SEQ ID NO: 2205
  ref <308>: DATABASE ACCESSION NUMBER: EMBL / AK000962
  ref <309>: DATABASE ENTRY DATE: 2002-08-06

SEQ ID NO: 10753 - protein, 173 aa, Homo sapiens; identical to SEQ ID NO: 2206
  misc_feature (1)..(173): Xaa=Unknown amino acid

SEQ ID NO: 10754 - DNA, 4862 bp, Rattus norvegicus; identical to SEQ ID NO: 2222
  ref <308>: DATABASE ACCESSION NUMBER: EMBL / D85189
  ref <309>: DATABASE ENTRY DATE: 1997-09-11

SEQ ID NO: 10755 - protein, 670 aa, Rattus norvegicus; identical to SEQ ID NO: 2223
  ref <308>: DATABASE ACCESSION NUMBER: SWISS-Prot / O35547
  ref <309>: DATABASE ENTRY DATE: 2001-10-16

SEQ ID NO: 10756 - DNA, 5356 bp, Homo sapiens; identical to SEQ ID NO: 2224
  ref <308>: DATABASE ACCESSION NUMBER: Refseq / NM_022977
  ref <309>: DATABASE ENTRY DATE: 2001-02-06

SEQ ID NO: 10757 - protein, 711 aa, Homo sapiens; identical to SEQ ID NO: 2225
  ref <308>: DATABASE ACCESSION NUMBER: SWISS-Prot / O60488
  ref <309>: DATABASE ENTRY DATE: 2002-06-15

SEQ ID NO: 10758 - DNA, 1013 bp, Rattus norvegicus; identical to SEQ ID NO: 2236
  ref <308>: DATABASE ACCESSION NUMBER: EMBL / D86557
  ref <309>: DATABASE ENTRY DATE: 1997-05-14

SEQ ID NO: 10759 - protein, 309 aa, Rattus norvegicus; identical to SEQ ID NO: 2237
  ref <308>: DATABASE ACCESSION NUMBER: SWISS-Prot / BAA19880
  ref <309>: DATABASE ENTRY DATE: 2003-02-01

SEQ ID NO: 10760 - DNA, 1750 bp, Homo sapiens; identical to SEQ ID NO: 2238
  ref <308>: DATABASE ACCESSION NUMBER: Refseq / NM_020439
  ref <309>: DATABASE ENTRY DATE: 2001-11-10

SEQ ID NO: 10761 - protein, 476 aa, Homo sapiens [sequence omitted]

SEQ ID NO: 10762 - DNA, 2148 bp, Rattus norvegicus; identical to SEQ ID NO: 2250
  ref <308>: DATABASE ACCESSION NUMBER: EMBL / D87240
  ref <309>: DATABASE ENTRY DATE: 1997-08-15

SEQ ID NO: 10763 - protein, 555 aa, Rattus norvegicus; identical to SEQ ID NO: 2251
  ref <308>: DATABASE ACCESSION NUMBER: SWISS-Prot / O35096
  ref <309>: DATABASE ENTRY DATE: 2001-10-16

SEQ ID NO: 10764 - DNA, 513 bp, Homo sapiens; identical to SEQ ID NO: 2252
  ref <308>: DATABASE ACCESSION NUMBER: EMBL / AJ295747
  ref <309>: DATABASE ENTRY DATE: 2001-03-17

SEQ ID NO: 10765 - protein, 520 aa, Homo sapiens; identical to SEQ ID NO: 2253
  ref <308>: DATABASE ACCESSION NUMBER: SWISS-Prot / Q16875
  ref <309>: DATABASE ENTRY DATE: 2002-06-15

SEQ ID NO: 10766 - DNA, 2192 bp, Rattus norvegicus
  ref <308>: DATABASE ACCESSION NUMBER: EMBL / D87515
  ref <309>: DATABASE ENTRY DATE: 1999-07-09
gagccatggagagcagcggacccagcagctgccacagcgcggcccggcggccacttcactcggcacaagccgtggacgtggcctcggcctccagtttccgcgccttcgagatcctgcacctgcacctggacctgcgggccgagttcgggcctccgggcccgggtccggggagccgcggactgaacggcaaggcgacgctggaactgcgctgcttgctgccggaggcctcggagctgcggctcgattcgcacagttgcctggaggtgatggcggcgaccctgctgcgggggcagcccggagaccagcagcagctcacggagcccgtgcctttccacacacagcccttctcgcactatggccaggccctgtgcgtggtctttccgaagccctgctgtgccgccgagcgcttccggctggagctcacctaccgcgtcggagagggaccaggggtttgctggttagctcctgagcagacagcaggaaagaagaaaccctttgtgtatacccagggtcaggcagtcttaaaccgagcctttttcccttgcttcgacaccccagccgtgaaatgcacgtattcggctcttgttgaggttccagatggcttcacagctgtgatgagtgcaagcacatgggagaggagaggaccaaataagttcttcttccagatgagccagcccatcccctcctatctgatagctttggccattggagatctggcttcagctgaggttggacccaggagccgggtgtgggcagagccctgcctgattgaagccgccaaggaggaatacaatggggtcatagaagaatttctggcaacaggagagaagcttttcggaccctatgtttggggaagatatgatttactctttatgccaccatctttcccgtttggaggaatggagaatccctgcctgacctttgtcaccccgtgcctgctagcaggggaccgctccttagccgacgtcatcatccacgagatctcccacagttggtttgggaacctggtcaccaatgccaactggggggaattctggctcaatgaaggcttcaccatgtatgcccagaggaggatctccaccatcctgttcggagctgcttacacttgcttggaggccgcaacggggagggctctgctacggcagcacatggatgtgtctggagaggaaaacccactcaacaagcttcgggtgaagattgaaccaggtgttgacccagatgacacctacaatgaaaccccctacgagaaaggttactgctttgtctcatacctggcccatctggtgggtgatcaggaacagtttgacaagtttctcaaggcctatgtagatgagtttaagttccaaagtatcttggctgaagactttctggaattctacctggagtatttccctgagctgaagaagaagggagtggattccatcccaggttttgagttcaaccgatggctgaacacccctggctggcccccctacctccccgacctctcccctggggactcactcatgaagccagctgaagagctggcggagctgtgggcagcctcagagccagacatgcaagccatcgaggctgtggccatctctacctggaagacctaccagcttgtctacttcctagataagatcctgcagaagtctcctctccctcctgggaacgtgaaaaaacttggggagacatacccaaagatttccaatgctcagaatgctgagttacggctaagatggggccaaatcatccttaagaatgaccaccaagaagagttctggaaagtgaaggacttcctgcagagtcagggaaagcagaagtacactctgccactgtaccatgccatgatgggtggcagcgagatggcccggaccctcgccaaggagacctttgcagccaccgcttcccagctccacagtaacgtggtcaactatgtccagcagatcctggcgcccaagggcagttagaggctcacctgggtggtccctgcctttctgaagaattgttccttcccaaattcatgttctcaagtcagcgtcccggagtttctgttctctgggtttgggtctctgccgtggtggcagcttctggtctagagagtcctgagagtcctaaaagggcctcccatgctccccttagaccaggctgcagagcataaaatgtcattctttttctcttcgaataaatgtttttaagcaagaagt

SEQ ID NO: 10767 - protein, 650 aa, Rattus norvegicus
  ref <308>: DATABASE ACCESSION NUMBER: SWISS-Prot / O09175
  ref <309>: DATABASE ENTRY DATE: 2002-06-15
MESSGPSSCHSAARRPLHSAQAVDVASASSFRAFEILHLHLDLRAEFGPPGPGPGSRGLNGKATLELRCLLPEGASELRLDSHSCLEVMAATLLRGQPGDQQQLTEPVPFHTQPFSHYGQALCVVFPKPCCAAERFRLELTYRVGEGPGVCWLAPEQTAGKKKPFVYTQGQAVLNRAFFPCFDTPAVKCTYSALVEVPDGFTAVMSASTWERRGPNKFFFQMSQPIPSYLIALAIGDLASAEVGPRSRVWAEPCLIEAAKEEYNGVIEEFLATGEKLFGPYVWGRYDLLFMPPSFPFGGMENPCLTFVTPCLLAGDRSLADVIIHEISHSWFGNLVTNANWGEFWLNEGFTMYAQRRISTILFGAAYTCLEAATGRALLRQHMDVSGEENPLNKLRVKIEPGVDPDDTYNETPYEKGYCFVSYLAHLVGDQEQFDKFLKAYVDEFKFQSILAEDFLEFYLEYFPELKKKGVDSIPGFEFNRWLNTPGWPPYLPDLSPGDSLMKPAEELAELWAASEPDMQAIEAVAISTWKTYQLVYFLDKILQKSPLPPGNVKKLGETYPKISNAQNAELRLRWGQIILKNDHQEEFWKVKDFLQSQGKQKYTLPLYHAMMGGSEMARTLAKETFSATASQLHSNVVNYVQQILAPKGS

SEQ ID NO: 10768 - DNA, 2139 bp, Homo sapiens
  ref <308>: DATABASE ACCESSION NUMBER: EMBL / AL390139
  ref <309>: DATABASE ENTRY DATE: 2000-07-20
cggcccggctcggaggagccgcctgcggagcccgtgagcttctacacgcagcccttctcgcactatggccaggccctgtgcgtgtccttcccgcagccctgccgcgccgccgagcgcctccaggtgctgctcacctaccgcgtcggggagggacccggggtttgctggttggctcccgagcagacagcaggaaagaagaagcccttcgtgtacacccagggccaggctgtcctaaaccgggccttcttcccttgcttcgacacgcctgctgttaaatacaagtattcagctcttattgaggagccgggtgtgggctgagccctgcctgattgatgctgccaaggaggagtacaacggggtgatagaagaatttttggcaacaggagagaagctttttggaccttatgtttggggaaggtgtggtatcacattgactctagtgtctcctgttaaactgagtcactggcttccattcttcctcttcgtgtggcttttccacctcctgcctcccagagcaaagtttccctgatcccagaagtgaaggagaggaggaagagaggagggtatgacttgctcttcatgccaccgtcctttccatttggaggaatggagaacccttgtctgacctttgtcaccccctgcctgctagctggggaccgctccttggcagatgtcatcatccatgagatctcccacagttggtttgggaacctggtcaccaacgccaactggggtgaattctggctcaatgaaggtttcaccatgtacgcccagaggaggatctccaccatcctctttggcgctgcgtacacctgcttggaggctgcaacggggcgggctctgctgcgtcaacacatggacatcactggagaggaaaacccactcaacaagctccgcgtgaagattgaaccaggcgttgacccggacgacacctataatgagaccccctacgagaaaggtttctgctttgtctcatacctggcccacttggtgggtgatcaggatcagtttgacagttttctcaaggcctatgtgcatgaattcaaattccgaagcatcttagccgatgactttctggacttctacttggaatatttccctgagcttaagaaaaagagagtggatatcattccaggttttgagtttgatcgatggctgaatacccccggctggcccccgtacctccctgatctctcccctggggactcactcatgaagcctgctgaagagctagcccaactgtgggcagccgaggagctggacatgaaggccattgaagccgtggccatctctccctggaagacctaccagctggtctacttcctggataagatcctccagaaatcccctctccctcctgggaatgtgaaaaaacttggagacacatacccaagtatctcaaatgcccggaatgcagagctccggctgcgatggggccaaatcgtccttaagaacgaccaccaggaagatttctggaaagtgaaggagttcctgcataaccaggggaagcagaagtatacacttccgctgtaccacgcaatgatgggtggcagtgaggtggcccagaccctcgccaaggagacttttgcatccaccgcctcccagctccacagcaatgttgtcaactatgtccagcagatcgtggcacccaagggcagttagaggctcgtgtgcatggcccctgcctcttcaggctctccaggctttcagaataattgtttgttcccaaattcctgttccctgatcaacttcctggagtttatatcccctcaggataatctattctctagcttaggtatctgtgactcttgggcctctgctctggtgggaacttacttctctatagcccactgagccccgagacagagaacctgcccacagctctccccgctacaggctgcaggcactgcagggcagcgggtattctcctccccacctaagtctctgggaagaagtggagaggactgatgctcttcttttttctctttctgtcctttttcttgctgattttatgcaaagggctggcattctgattgttcttttttcaggtttaatccttattttaataaagttttcaagcaaaaattaaaaaaaaaaaaaaaaaaaaaaaaaaaaaaaaaaaaaaaaaaaaaaaaaaaa

SEQ ID NO: 10769 - protein, 650 aa, Homo sapiens
  ref <308>: DATABASE ACCESSION NUMBER: SWISS-Prot / Q9H4A4
  ref <309>: DATABASE ENTRY DATE: 2002-06-15
MASGEHSPGSGAARRPLHSAQAVDVASASNFRAFELLHLHLDLRAEFGPPGPGAGSRGLSGTAVLDLRCLEPEGAAELRLDSHPCLEVTAAALRRERPGSEEPPAEPVSFYTQPFSHYGQALCVSFPQPCRAAERLQVLLTYRVGEGPGVCWLAPEQTAGKKKPFVYTQGQAVLNRAFFPCFDTPAVKYKYSALIEVPDGFTAVMSASTWEKRGPNKFFFQMCQPIPSYLIALAIGDLVSAEVGPRSRVWAEPCLIDAAKEEYNGVIEEFLATGEKLFGPYVWGRYDLLFMPPSFPFGGMENPCLTFVTPCLLAGDRSLADVIIHEISHSWFGNLVTNANWGEFWLNEGFTMYAQRRISTILFGAAYTCLEAATGRALLRQHMDITGEENPLNKLRVKIEPGVDPDDTYNETPYEKGFCFVSYLAHLVGDQDQFDSFLKAYVHEFKFRSILADDFLDFYLEYFPELKKKRVDIIPGFEFDRWLNTPGWPPYLPDLSPGDSLMKPAEELAQLWAAEELDMKAIEAVAISPWKTYQLVYFLDKILQKSPLPPGNVKKLGDTYPSISNARNAELRLRWGQIVLKNDHQEDFWKVKEFLHNQGKQKYTLPLYHAMMGGSEVAQTLAKETFASTASQLHSNVVNYVQQIVAPKGS

SEQ ID NO: 10770 - DNA, 2908 bp, Rattus norvegicus; identical to SEQ ID NO: 2270
  ref <308>: DATABASE ACCESSION NUMBER: EMBL / D88250
  ref <309>: DATABASE ENTRY DATE: 1998-04-27

SEQ ID NO: 10771 - protein, 695 aa, Rattus norvegicus; identical to SEQ ID NO: 2271
  misc_feature (1)..(695): Xaa=Unknown amino acid

SEQ ID NO: 10772 - DNA, 2647 bp, Homo sapiens; identical to SEQ ID NO: 2272
  ref <308>: DATABASE ACCESSION NUMBER: EMBL / J04080
  ref <309>: DATABASE ENTRY DATE: 2000-03-04

SEQ ID NO: 10773 - protein, 688 aa, Homo sapiens; identical to SEQ ID NO: 2273
  ref <308>: DATABASE ACCESSION NUMBER: SWISS-Prot / Q9UCV3
  ref <309>: DATABASE ENTRY DATE: 2002-06-15

SEQ ID NO: 10774 - DNA, 4562 bp, Rattus norvegicus; identical to SEQ ID NO: 2280
  ref <308>: DATABASE ACCESSION NUMBER: EMBL / D88672
  ref <309>: DATABASE ENTRY DATE: 1997-05-15

SEQ ID NO: 10775 - protein, 933 aa, Rattus norvegicus; identical to SEQ ID NO: 2281
  ref <308>: DATABASE ACCESSION NUMBER: SWISS-Prot / P70498
  ref <309>: DATABASE ENTRY DATE: 2002-06-15

SEQ ID NO: 10776 - DNA, 3450 bp, Homo sapiens; identical to SEQ ID NO: 2282
  ref <308>: DATABASE ACCESSION NUMBER: EMBL / AF038441
  ref <309>: DATABASE ENTRY DATE: 2000-03-03

SEQ ID NO: 10777 - protein, 933 aa, Homo sapiens; identical to SEQ ID NO: 2283
  ref <308>: DATABASE ACCESSION NUMBER: SWISS-Prot / O14939
  ref <309>: DATABASE ENTRY DATE: 2002-06-15

SEQ ID NO: 10778 - DNA, 2632 bp, Rattus norvegicus; identical to SEQ ID NO: 2290
  ref <308>: DATABASE ACCESSION NUMBER: EMBL / D89340
  ref <309>: DATABASE ENTRY DATE: 2000-03-13

SEQ ID NO: 10779 - protein, 738 aa, Rattus norvegicus; identical to SEQ ID NO: 2291
  ref <308>: DATABASE ACCESSION NUMBER: SWISS-Prot / O55096
  ref <309>: DATABASE ENTRY DATE: 2002-06-15

SEQ ID NO: 10780 - DNA, 1292 bp, Homo sapiens; identical to SEQ ID NO: 2292
  ref <308>: DATABASE ACCESSION NUMBER: EMBL / AK021449
  ref <309>: DATABASE ENTRY DATE: 2002-08-06

SEQ ID NO: 10781 - protein, 737 aa, Homo sapiens; identical to SEQ ID NO: 2293
  ref <308>: DATABASE ACCESSION NUMBER: SWISS-Prot / Q9NY33
  ref <309>: DATABASE ENTRY DATE: 2002-06-15

SEQ ID NO: 10782 - DNA, 1850 bp, Rattus norvegicus; identical to SEQ ID NO: 2342
  ref <308>: DATABASE ACCESSION NUMBER: EMBL / D90404
  ref <309>: DATABASE ENTRY DATE: 2000-04-14

SEQ ID NO: 10783 - protein, 462 aa, Rattus norvegicus; identical to SEQ ID NO: 2343
  ref <308>: DATABASE ACCESSION NUMBER: SWISS-Prot / P80067
  ref <309>: DATABASE ENTRY DATE: 2002-06-15

SEQ ID NO: 10784 - DNA, 304 bp, Homo sapiens; identical to SEQ ID NO: 2344
  misc_feature (1)..(304): n=a, c, g or t
  ref <308>: DATABASE ACCESSION NUMBER: EMBL / AA296068
  ref <309>: DATABASE ENTRY DATE: 2000-03-08

SEQ ID NO: 10785 - DNA, 1213 bp, Rattus norvegicus
  ref <308>: DATABASE ACCESSION NUMBER: EMBL / E00444
  ref <309>: DATABASE ENTRY DATE: 2000-09-02
tgaagatcagctattagaagagaaagatcagttaagtcctttggacctgatcagcttgatacaagaactactgatttcaacttctttggcttaattctctcggaaacgatgaaatatacaagttatatcttggcttttcagctctgcatcgttttgggttctcttggctgttactgccaggacccatatgtaaaagaagcagaaaaccttaagaaatattttaatgcaggtcattcagatgtagcggataatggaactcttttcttaggcattttgaagaattggaaagaggagagtgacagaaaaataatgcagagccaaattgtctccttttacttcaaactttttaaaaactttaaagatgaccagagcatccaaaagagtgtggagaccatcaaggaagacatgaatgtcaagtttttcaatagcaacaaaaagaaacgagatgacttcgaaaagctgactaattattcggtaactgacttgaatgtccaacgcaaagcaatacatgaactcatccaagtgatggctgaactgtcgccagcagctaaaacagggaagcgaaaaaggagtcagatgctgtttcgaggtcgaagagcatcccagtaatggttgtcctgcctgcaatatttgaattttaaatctaaatctatttattaatatttaacattatttatatggggaatatatttttagactgtcatcaatcaaataagtatttataatagcaacttttgtgtaatgaaaatgaatatctattaatatatgtattatttataattcctatatcctgtgactgtctcacttaatcctttgttttctgactaattaggcaaggctatgtgattacaaggctttatctcaggggccaactaggcagccaacctaagcaagatcccatggttgtgtgtttatttcacttgatgatacaatgaacacttataagtgaagtgatactatccagttactgccggtttgaaaatatgcctgcaatctgagccagtgctttaatggcatgtcagacagaacttgaatgtgtcaggtgaccctgatgaaaacatagcatctcaggagatttcatgcctggtgcttccaaatattgttgacaactgtgactgtacccaaatggaaagtaactcatttgttaaaattatcaatatctaatatatatgaataaagtgtaagttcacaactaaaaaaaaaaaaaaaaaaa

SEQ ID NO: 10786 - DNA, 1032 bp, Homo sapiens
  ref <308>: DATABASE ACCESSION NUMBER: EMBL / J03909
  ref <309>: DATABASE ENTRY DATE: 1999-07-02
ggagggtgggcagcactcgctttattgtccagcattccacatggatagtcgccacacctttgcccctgctgcgatgaccctgtcgccacttctgctgttcctgccaccgctgctgctgctgctggacgtccccacggcggcggtgcaggcgtcccctctgcaagcgttagacttctttgggaatgggccaccagttaactacaagacaggcaatctatacctgcgggggcccctgaagaagtccaatgcaccgcttgtcaatgtgaccctctactatgaagcactgtgcggtggctgccgagccttcctgatccgggagctcttcccaacatggctgttggtcatggagatcctcaatgtcacgtcggtgccctacggaaacgcacaggaacaaaatgtcagtggcaggtgggagttcaagtgccagcttggagaagaggagtgcaaattcaacaaggtggaggcctgcgtgttggatgaacttgacatggagctagccttcctgaccatgtctggcatggcatggaagagtttgaggacatggagagaagtctgccactatgcctgcagctctacgccccagggctgtcgccagaactatcatggagtgtgcaatgggggaccgcggcatgcagctcatgcacgccaacgcccagcggacagatgctctccagccaccgcacgagtatgtgccctgggtcaccgtcaatgggaaacccttggaagatcagacccagctccttacccttgtctgccagttgtaccagggcaagaagccggatgtctgcccttcctcaaccagctccctccggagtgtttgcttcgagtgttggccggtgggctgcggagagctcatggaaggcgagtgggaactcggctgcctgcctttttttctgatccagaccctcggcacctgctacttaccaactggaaaattttatgcatcccatgaagcccagatacacaaaattccacccctagatcaagaatcctgctccactaagaatggtgctaaagtaaaactagtttaat

SEQ ID NO: 10787 - protein, 261 aa, Homo sapiens [sequence omitted]

SEQ ID NO: 10788 - DNA, 3417 bp, Rattus norvegicus
  ref <308>: DATABASE ACCESSION NUMBER: EMBL / E01789
  ref <309>: DATABASE ENTRY DATE: 2000-09-02
aggctctctcaaacttctgccgcagctcttcattgccctcgcttccttccggcggcaccggcacattaaagtactcgccttcttcctggcttagtaacttgaaccctcatctccttgaaccttcgggtacttaggcgttcaatcctttcttgggcacccgaggtgctcatcttaacgcaccccagggcctaggacagggtgccaggggcgcggctcagatctgtccagcgcagtctgcggtcctcgcgccgcagcgtgcggctaagaacacttggctggggggcctgcgggttgcggtgtgtgtgtatatgtgtgtgtgtctgagtctgtgtgtgcgtttgctggtggtgccgatatgtaaagcagctggcggctctgggcggggcctgggttccatgcaaatgaaggaggaggggctaccctggggctccgcctccctcccccgcagctggggccagcggtgccaagcacagctggaccagcggcagcagctgggcgagtgacagcccagcaacgcgcgcgcggccgccgccagagccggcgcgaaggggcagcgcggccctgcggtccccgggcggcagcagcggccgcctagtcccgcgcctctccgggcttacagcccccggtcccgccgccccggggccgccacctctcggggctccccccagtccccgcgcgcgcaagatggctgacccggctgcggggccgccgccgagcgagggcgaggagagcacggtgcgcttcgcccgcaaaggcgccctccggcagaagaacgtgcacgaggtgaagaaccacaaattcaccgcccgcttcttcaagcagcccaccttctgcagccactgcaccgacttcatttggggcttcgggaaacagggattccagtgtcaagtctgctgctttgttgtacacaagcgctgccatgaattcgtcacgttctcctgccctggtgcagacaagggcccggcctctgatgacccacggagcaaacacaagtttaagatccacacctactccagccctaccttctgtgaccactgtggatcactgctgtatgggctcatccaccaggggatgaaatgcgacacctgtatgatgaatgtccacaagcgctgcgtgatgaacgtccccagcctctgtggcaccgaccacacagaacgccgtggccgcatctacatccaggcccacatcgacagggaggtcctcatcgttgttgtaagagatgctaaaaatctggtacctatggaccccaacggcttgtcagatccctacgtaaaactgaaactgatccctgatcccaaaagtgagagcaagcagaagaccaagactatcaaatgctccctcaacccggagtggaacgaaaccttcagatttcagctgaaggaatcagacaaagacagaagactgtccgtagagatctgggattgggacctgaccagcaggaatgacttcatgggatctctgtcgtttgggatttcagaactacagaaagccggagtggatggctggttcaagttactaagccaggaagaaggcgagtactttaatgtgccggtgccgccggaaggaagcgagggcaatgaagagctgcggcagaagtttgagagagccaagattggccaaggtaccaaggctccagaagaaaagacagcgaacactatatccaaatttgacaacaatggcaacagggaccggatgaaactgaccgattttaacttcctgatggtgctggggaaaggcagctttggcaaggtcatgctctcagagcggaagggtacagatgaactctatgccgtgaagatcctgaagaaagatgtggtgatccaagatgacgatgtggagtgcacaatggtggagaagagggtgctggccctgcctgggaagcccccattcctgactcagctccattcctgcttccagaccatggaccgcctctactttatgatggagtatgtgaacgggggtgacctcatgtaccacatccaacaagttggccgtttcaaggagccccatgctgtattttacgctgcagagattgccatcggtcttttcttcttgcagagcaagggcatcatttaccgtgacctgaaacttgacaacgtgatgctggattccgaggggcacatcaaaatcgctgactttggcatgtgtaaagagaatatctgggatggggtgacaaccaagacattctgtggcactccagactacattgccccagagatcattgcttatcagccctacgggaagtctgtggactggtgggcgtttggagtcctgctgtatgaaatgttggctggccaggcaccttttgaaggggaggatgaggatgaactcttccagtcaatcatggagcacaacgtggcgtatcccaagtccatgtctaaggaagctgtggcaatctgcaaagggctaatgaccaaacacccaggcaagcgcctgggttgtgggcctgaaggggaacgagacattaaggagcatgcatttttccggtatatcgactgggagaaactcgaacgcaaggagattcagccaccttataaaccaaaagcttgtgggcgaaacgctgaaaacttcgaccggtttttcacccgccatccaccagtcctaacacctcctgaccaggaagtcatcaggaatattgaccaatcagaattcgaaggattttcctttgttaactctgaatttttaaaacccgaagtcaagagctaagtagatctgtagacctccgtccttcatttctgtcattcaagctcaacagctatcatgagagacaagcgagacacctccaacttcgacaaagagttcaccaggcagcctgtggaactgactcccactgacaaactcttcatcatgaacttggaccaaaatgaatttgctggcttctcgtatactaacccagagtttgtcattaatgtgtaggtgaatgcagattccatcgctgagcctgtgtgtaaggctgcaggctgaatgtctattatcaattccagtcttccaggattcatggtgcctctgttggcatccgtcatgtggagagcttgtcttagagggcttttctttgtatgtatagcttgctagtttgttttctacatttcaaaatgtttagtttagaataagtgcattgcccactgatagaggtacaattttccagacttccagaaactcatccaatgaaccaacagtgtcaaaacttaactgtgtccgataccaaaatgcttcagtatttgtaatttttaaagtcagatgctgatgttcctggtcaaagtttttacagttactctcgaatatctcctttgaatgctacctaagcatgaccggtatttttaaaagttgtgagtaagctttgcagttactgtgaactcttgtctcttggaggaaactttttgtttaagaattggtatgattaaatgaattcatatatgc

SEQ ID NO: 10789 - protein, 671 aa, Rattus norvegicus; identical to SEQ ID NO: 2721
  ref <308>: DATABASE ACCESSION NUMBER: SWISS-Prot / CAA28035
  ref <309>: DATABASE ENTRY DATE: 2002-06-15

SEQ ID NO: 10790 - DNA, 2955 bp, Homo sapiens
  ref <308>: DATABASE ACCESSION NUMBER: EMBL / M13975
  ref <309>: DATABASE ENTRY DATE: 1999-08-13
cgcagcccgcggtcccgccgccccggggccggcacctctcgggctccggctccccgcgcgcaagatggctgacccggctgcggggccgccgccgagcgagggcgaggagagcaccgtgcgcttcgcccgcaaaggcgccctcaggcagaagaacgtgcatgaggtcaagaaccacaaattcaccgcccgcttcttcaagcagcccaccttctgcagccactgcaccgacttcatctggggcttcgggaagcagggattccagtgccaagtttgctgctttgtggtgcacaagcggtgccatgaatttgtcacattctcctgccctggcgctgacaagggtccagcctccgatgacccccgcagcaaacacaagtttaagatccacacgtactccagccccacgttttgtgaccactgtgggtcactgctgtatggactcatccaccaggggatgaaatgtgacacctgcatgatgaacgtgcacaagcgctgcgtgatgaatgttcccagcctgtgtggcacggaccacacggagcgccgcggccgcatctacatccaggcccacatcgacagggacgtcctcattgtcctcgtaagagatgctaaaaaccttgtacctatggaccccaatggcctgtcagatccctacgtaaaactgaaactgattcccgatcccaaaagtgagagcaaacagaagaccaaaaccatcaaatgctccctcaaccctgagtggaatgagacatttagatttcagctgaaagaatcggacaaagacagaagactgtcagtagagatttgggattgggatttgaccagcaggaatgacttcatgggatctttgtcctttgggatttctgaacttcagaaagccagtgttgatggctggtttaagttactgagccaggaggaaggcgagtacttcaatgtgcctgtgccaccagaaggaagtgaggccaatgaagaactgcggcagaaatttgagagggccaagatcagtcagggaaccaaggtcccggaagaaaagacgaccaacactgtctccaaatttgacaacaatggcaacagagaccggatgaaactgaccgattttaacttcctaatggtgctggggaaaggcagctttggcaaggtcatgctttcagaacgaaaaggcacagatgagctctatgctgtgaagatcctgaagaaggacgttgtgatccaagatgatgacgtggagtgcactatggtggagaagcgggtgttggccctgcccgggaagccgcccttcctgacccagctccactcctgcttccagaccatggaccgcctgtactttgtgatggagtacgtgaatgggggcgacctcatgtatcacatccagcaagtcggccggttcaaggagccccatgctgtattttacgctgcagaaattgccatcggtctgttcttcttacagagtaagggcatcatttaccgtgacctaaaacttgacaacgtgatgctcgattctgagggacacatcaagattgccgattttggcatgtgtaaggaaaacatctgggatggggtgacaaccaagacattctgtggcactccagactacatcgcccccgagataattgcttatcagccctatgggaagtccgtggattggtgggcatttggagtcctgctgtatgaaatgttggctgggcaggcaccctttgaaggggaggatgaggatgaactcttccaatccatcatggaacacaacgtagcctatcccaagtctatgtccaaggaagctgtggccatctgcaaagggctgatgaccaaacacccaggcaaacgtctgggttgtggacctgaaggtgaacgtgatatcaaagagcatgcatttttccggtatattgattgggagaaacttgaacgcaaagagattcagcccccttataagccaaaagcttgtgggcgaaatgctgaaaacttcgaccgatttttcacccgccatccaccagtcctaacacctcctgaccaggaagtcatcaggaatattgaccaatcagaattcgaaggattttcctttgttaactctgaatttttaaaacccgaagtcaagagctaagtagatgtgtagatctccgtccttcatttctgtcattcaagctcaacggctattgtggtgacatttttatgttttcattgccaagttgcatccatgtttgattttctgatgagactagagtgacagtgtttcagaacccaaatgtcctcaggtagttttggagcatctctatgagatgggattatgcagatggcctatggaaaatgcagctgcataattaacacattatcaaagtcctcttacaatttattttccgcagcatgtcagctaagtagacccaatggggagagaaaatgcctgctttctttcccttttttctgcactgccatattcacccccaaccatccaatctgtggataattggatgttagcggtactcttccacttccgggcctggagcttggcttgtatccaagtgtatggttgctttgcctaagaggaatccctctatttcacctgttctggaggcaccagaccttgaaaagaacatgctcaaaataaaatgttatctgttatttttgtaaactcaaagttaagatgatcaaagttctaaaattccaagaatgtgcttttagacggtctcaatctaaaagcacttcaaggggtcaaagggcaaccagcttgggtgctacctcagtgttgtagtttctgatactttatgtctttgctcaccctcatccccaaactacttgaaaagggcatttggcaccactctctgaaacaacacagtcactctagcaaggcccccaaagggccctggttttacattacatttcaaactttatttgctttggggttttgtttctgttgttgttcaaatgcaaaaaaaaattatttgctttggggttttatttctgttgttcaaatgc

SEQ ID NO: 10791 - protein, 671 aa, Homo sapiens
  ref <308>: DATABASE ACCESSION NUMBER: SWISS-Prot / Q9UE49
  ref <309>: DATABASE ENTRY DATE: 2002-06-15
MADPAAGPPPSEGEESTVRFARKGALRQKNVHEVKNHKFTARFFKQPTFCSHCTDFIWGFGKQGFQCQVCCFVVHKRCHEFVTFSCPGADKGPASDDPRSKHKFKIHTYSSPTFCDHCGSLLYGLIHQGMKCDTCMMNVHKRCVMNVPSLCGTDHTERRGRIYIQAHIDRDVLIVLVRDAKNLVPMDPNGLSDPYVKLKLIPDPKSESKQKTKTIKCSLNPEWNETFRFQLKESDKDRRLSVEIWDWDLTSRNDFMGSLSFGISELQKASVDGWFKLLSQEEGEYFNVPVPPEGSEANEELRQKFERAKISQGTKVPEEKTTNTVSKFDNNGNRDRMKLTDFNFLMVLGKGSFGKVMLSERKGTDELYAVKILKKDVVIQDDDVECTMVEKRVLALPGKPPFLTQLHSCFQTMDRLYFVMEYVNGGDLMYHIQQVGRFKEPHAVFYAAEIAIGLFFLQSKGIIYRDLKLDNVMLDSEGHIKIADFGMCKENIWDGVTTKTFCGTPDYIAPEIIAYQPYGKSVDWWAFGVLLYEMLAGQAPFEGEDEDELFQSIMEHNVAYPKSMSKEAVAICKGLMTKHPGKRLGCGPEGERDIKEHAFFRYIDWEKLERKEIQPPYKPKARDKRDTSNFDKEFTRQPVELTPTDKLFIMNLDQNEFAGFSYTNPEFVINV

SEQ ID NO: 10792 - DNA, 1544 bp, Rattus norvegicus
  ref <308>: DATABASE ACCESSION NUMBER: EMBL / E13732
  ref <309>: DATABASE ENTRY DATE: 2000-09-02
gctattgttcctgaccagttcctcatcaaaggatggagatttcaaatatcacagaaacctaccccacaaccacagaatatgactatggggactctactccatgccaaaaaactgatgtaagagccttcggggctggactcctgccccccctgtactctttcgtgtttatcattggagtggtaggcaatatcctggtgattctggtgctcatgcagcataggaggcttcaaagcatgaccagcatatacctgttcaacctggctgtctctgatctggtcttccttttcactttacctttctggattgactacaagctgaaagacaactgggtttttggtgatgccatgtgtaagcttctctctgggttttattacctgggcttatacagtgagatcttctttatcatcctgctgacaattgacaggtacctggccattgtccatgcagtgttttccctgagggcccgaactgtcacttttggcatcatcaccagtattattatttgggccctagccatcttagcttctattcctgccttatgctttttcaaggcccagtgggagttcactcaccatacctgtagccctcatttccccgatgagagcctgaagacgtggaagaggtttcaggctctaaagctaaacctccttggactaattttacctctgttagtcatgataatttgctacgcagggatcatcagaattctgctcagacgacccaatgagaagaaggcgaaagccgtgcgtctgatatttgctattacgcttctattcttcctcctctggaccccctacaatctgactgtatttgtttctgctttccaagatgttctattcaccaatcagtgtgagcagagcaagcagctggacctggccatacaggtgactgaagtgattgcctacacccactgttgtgtcaatccaatcatttatgtctttgtgggtgagcggttccggaagtaccttcggcagctgtttcaaaggcatgtggctataccgctggcaaaatggctgcccttcttctctgtggaccaactagaaaggaccagttccttaactccatccacaggagaacatgaactttctgggggcttctgattcagaccctaggtgtcaaccaaggtctagaggagaatgagggggatagtatatagctctccaaggcagatactgacagctattacagcggggattcccagtcttgttgggtcaaagggaactttgaggtcgcttaggtacaagtcacctattcaatggtttccttgaactctctctgttaaaaatgagatgaatacaaaaagtgggacattattgaaatggggataatcagtggcttgggcccaacaagtgatggatcttgtagatagtaacctaaaaactgaaccacaacttttactgaaaacgacacctaatgatgtaatattctgagaaaaatttaaagcattgtaaaagaggattttgtgtattttcatattgacatatatataaagtagatattatgtccaaattaaaactgtagcaaactaaaaaaaaaaaaaaccg

SEQ ID NO: 10793 - protein, 355 aa, Rattus norvegicus
  ref <308>: DATABASE ACCESSION NUMBER: Refseq / NP_065417
  ref <309>: DATABASE ENTRY DATE: 2000-11-01
MEISNITETYPTTTEYDYGDSTPCQKTDVRAFGAGLLPPLYSFVFIIGVVGNILVILVLMQHRRLQSMTSIYLFNLAVSDLVFLFTLPFWIDYKLKDNWVFGDAMCKLLSGFYYLGLYSEIFFIILLTIDRYLAIVHAVFSLRARTVTFGIITSIIIWALAILASIPALCFFKAQWEFTHHTCSPHFPDESLKTWKRFQALKLNLLGLILPLLVMIICYAGIIRILLRRPNEKKAKAVRLIFAITLLFFLLWTPYNLTVFVSAFQDVLFTNQCEQSKQLDLAIQVTEVIAYTHCCVNPIIYVFVGERFRKYLRQLFQRHVAIPLAKWLPFFSVDQLERTSSLTPSTGEHELSGGF

SEQ ID NO: 10794 - DNA, 950 bp, Rattus norvegicus
  ref <308>: DATABASE ACCESSION NUMBER: EMBL / J00735
  ref <309>: DATABASE ENTRY DATE: 2000-03-04
tggatgaacaagtgtcacgctggccacctcaatggaggttattaccaaggtggcacttactccaagtcatctactcctaacggttatgacaatggcattatttgggccacttggaaaaccagctggtattccatgaaggaaaccaccatgaagataattcccttcaacagactctccattggagatgggcagcaacatcacatgggaggatccaaacaggtcagcgtggagcatgaagtggatgttgaatacccgtaaatcctctgcctagacattttaaattagacacaaagaatcaactataacttctattagcctgtaccaagttccaatattttcctcaaattttcttctatacctctatattcgagttattaattttggtctctcttaaaatgatatttagccataaatggacattaaaccccacgtgaaccatgtttctaagttacttgaatcaaagttattaaaatttgtttgtttgaatggtcaacattttgtttgacctttcccctaaatattaaaagtaaaactactgtattttattttatgatcagctgtaattattgtttttgttgttgttgtttcctgagtatttttagtatgcactaataaaataggagaaattttagaacttcacctgtatattttccatgtattttacctctacatcattagtatttaattcttctttttaaatgaaaagttatattttttaatataccttttgttttattgtgtattcataggttggagacatgtaaagaacatttccaaggtgatttgctcttttaacggactttatccaagcagagagatatatttttcctatgagaccatggaacccacttcctttacagagttaatgggatccatgatgcaaactccattagcagttttatgctggcgataatttatctacatgcatttcaataaacattttgtttcct

SEQ ID NO: 10795 - protein, 437 aa, Rattus norvegicus
  ref <308>: DATABASE ACCESSION NUMBER: Refseq / NP_036691
  ref <309>: DATABASE ENTRY DATE: 2000-11-01
MNWSLQLRSFILCWALLLLSPTGLAQYTATRDNCCILDERFGSYCPTTCGISDFLNSYQTDVDTDLQTLENILQRAENRTTEAKELIKAIQVYYNPDQPPKPGMIEGATQKSKKMVEEILKYEALLLTHESSIRYLQDIYTSNKQKITNLKQKVAQLEALCQEPCKDSVRIYDITGKDCQDTANKGAKESGLYSIRPLKATEQFLVYCETDGPGNGWTEFKKRLDGSVDFLKNWIQYKEGFGHLSPTGTTEFWLGNEKNHLISMQSTIPYALRIQLKDWSGRTSTADYAMFRVGPESDKYRLTYAYFIGGDAGDAFDGYDFGDDPSDKFFTSHNGMHFSTWDNDNDKFEGNCAEQDGSGWWMNKCHAGHLNGVYYQGGTYSKSSTPNGYDNGIIWATWKTRWYSMKETTMKIIPFNRLSIGDGQQHHMGGSKQVGDM

SEQ ID NO: 10796 - DNA, 1655 bp, Homo sapiens
  ref <308>: DATABASE ACCESSION NUMBER: Refseq / NM_021870
  ref <309>: DATABASE ENTRY DATE: 2001-02-03
tgctgacactacaaggctcggagctccgggcactcagacatcatgagttggtccttgcacccccggaatttaattctctacttctatgctcttttatttctctcttcaacatgtgtagcatatgttgctaccagagacaactgctgcatcttagatgaaagattcggtagttattgtccaactacctgtggcattgcagatttcctgtctacttatcaaaccaaagtagacaaggatctacagtctttggaagacatcttacatcaagttgaaaacaaaacatcagaagtcaaacagctgataaaagcaatccaactcacttataatcctgatgaatcatcaaaaccaaatatgatagacgctgctactttgaagtccaggataatgttagaagaaattatgaaatatgaagcatcgattttaacacatgactcaagtattcgatatttgcaggaaatatataattcaaataatcaaaagattgttaacctgaaagagaaggtagcccagcttgaagcacagtgccaggaaccttgcaaagacacggtgcaaatccatgatatcactgggaaagattgtcaagacattgccaataagggagctaaacagagcgggctttactttattaaacctctgaaagctaaccagcaattcttagtctactgtgaaatcgatgggtctggaaatggatggactgtgtttcagaagagacttgatggcagtgtagatttcaagaaaaactggattcaatataaagaaggatttggacatctgtctcctactggcacaacagaattttggctgggaaatgagaagattcatttgataagcacacagtctgccatcccatatgcattaagagtggaactggaagactggaatggcagaaccagtactgcagactatgccatgttcaaggtgggacctgaagctgacaagtaccgcctaacatatgcctacttcgctggtggggatgctggagatgcctttgatggctttgattttggcgatgatcctagtgacaagtttttcacatcccataatggcatgcagttcagtacctgggacaatgacaatgataagtttgaaggcaactgtgctgaacaggatggatctggttggtggatgaacaagtgtcacgctggccatctcaatggagtttattaccaaggtggcacttactcaaaagcatctactcctaatggttatgataatggcattatttgggccacttggaaaacccggtggtattccatgaagaaaaccactatgaagataatcccattcaacagactcacaattggagaaggacagcaacaccacctggggggagccaaacaggtcagaccagagcaccctgcggaaacagaatatgactcactttaccctgaggatgatttgtagaaaattaactgctaacttctattgacccacaaagtttcagaaattctctgaaagtttcttccctttttctcttactatatttattgatttcaagtcttctattaaggacatttagccttcaatggaaattaaaactcatttaggactgtatttccaaattactgatatcagagttatttaaaaattgtttatttgaggagataacatttcaactttgttcctaaatatataataataaaatgattgacttt

SEQ ID NO: 10797 - protein, 453 aa, Homo sapiens
  ref <308>: DATABASE ACCESSION NUMBER: SWISS-Prot / P02679
  ref <309>: DATABASE ENTRY DATE: 2002-06-15
MSWSLHPRNLILYFYALLFLSSTCVAYVATRDNCCILDERFGSYCPTTCGIADFLSTYQTKVDKDLQSLEDILHQVENKTSEVKQLIKAIQLTYNPDESSKPNMIDAATLKSRKMLEEIMKYEASILTHDSSIRYLQEIYNSNNQKIVNLKEKVAQLEAQCQEPCKDTVQIHDITGKDCQDIANKGAKQSGLYFIKPLKANQQFLVYCEIDGSGNGWTVFQKRLDGSVDFKKNWIQYKEGFGHLSPTGTTEFWLGNEKIHLISTQSAIPYALRVELEDWNGRTSTADYAMFKVGPEADKYRLTYAYFAGGDAGDAFDGFDFGDDPSDKFFTSHNGMQFSTWDNDNDKFEGNCAEQDGSGWWMNKCHAGHLNGVYYQGGTYSKASTPNGYDNGIIWATWKTRWYSMKKTTMKIIPFNRLTIGEGQQHHLGGAKQVRPEHPAETEYDSLYPEDDL

SEQ ID NO: 10798 - DNA, 1927 bp, Rattus norvegicus; identical to SEQ ID NO: 2395
  ref <308>: DATABASE ACCESSION NUMBER: EMBL / J02612
  ref <309>: DATABASE ENTRY DATE: 2000-03-04

SEQ ID NO: 10799 - protein, 529 aa, Rattus norvegicus; identical to SEQ ID NO: 2396
  ref <308>: DATABASE ACCESSION NUMBER: SWISS-Prot / P08430
  ref <309>: DATABASE ENTRY DATE: 2001-10-16

SEQ ID NO: 10800 - DNA, 367 bp, Homo sapiens; identical to SEQ ID NO: 2397
  ref <308>: DATABASE ACCESSION NUMBER: EMBL / AV683870
  ref <309>: DATABASE ENTRY DATE: 2002-01-11

SEQ ID NO: 10801 - protein, 534 aa, Homo sapiens; identical to SEQ ID NO: 2398
  ref <308>: DATABASE ACCESSION NUMBER: SWISS-Prot / P22310
  ref <309>: DATABASE ENTRY DATE: 2002-06-15

SEQ ID NO: 10802 - DNA, 1396 bp, Rattus norvegicus
  ref <308>: DATABASE ACCESSION NUMBER: Refseq / NM_017000
  ref <309>: DATABASE ENTRY DATE: 2000-11-01
tgggccaatacaatcagggctcttctcaccgccatggctccagaagttgggggcggatcgtagtgtcaagcgctgattggctgagcagagaggacatcattcaactatgccatgaaggaggctgctgtggaggctctgaagaagaaaggatgggaggtggtcgaatctgacctctatgctatgaactttaaccccctcatttccagaaacgacatcacaggggagccgaaggactcggagaactttcagtaccctgttgagtcatctctggcgtataaggaaggccgcctgagcccggatattgtagctgaacagaaaaagctggaagctgcagacctagtgatatttcagttcccattgtattggtttggggtgcccgccattctgaaaggctggtttgagagagtgcttgtagcaggattcgcctacacgtatgccaccatgtatgaccaaggtcctttccagaataagaagaccttgctttccatcaccaccgggggcagcggctccatgtactctctgcagggtgtccacggggacatgaacgtcattctctggccaattcagagtggcattctgcgcttctgtggcttccaggtcttagaacctcaactggtgtacagcattggccacaccccacccgatgcccgcgtgcaggtcctggaagggtggaagaagcgtctggagaccgtctgggaggagtcaccactctactttgctccaagcagcttgtttgacctaaacttccaggcaggattcttactgaaaaaagaggttcaagaggagcagaaaaagaacaagtttggcctttctgtgggccatcatttgggcaagtccattccagccgacaaccagatcaaagctagaaaataaggttttccataccatgtagttagacccaggtttctttttccccagtttgcctggcttgctttcagttttcgcctttgttccacaaggataggaaaaggaggaggctcgcctcatgcgtttttggatagttctgccacggctgtgacagcaaaatgaacgaggtcagattaggggcctcaggtggcctgggatatgaatcagggagaggtgtagccgcgagcggggaaaatactcttctaggtcttttgtacactataagcttttttcttcgggctagccttggctaaatggcatccaatcctccacccacttgttgctattagttacctctctgtggtttagggcaggagggaattgctcaaacaatggctgagggactaacttgtttagcagttagctaaagcctgtttatgatccatcctggtttcaattactgtgcagtgactgacaagcctcgggggattgctctccagctcttctctgccttgtacatagcacacccaggtcctgggaaatgaataca

SEQ ID NO: 10803 - protein, 273 aa, Rattus norvegicus
  ref <308>: DATABASE ACCESSION NUMBER: SWISS-Prot / P05982
  ref <309>: DATABASE ENTRY DATE: 2002-06-15
AVRRALIVLAHAERTSFNYAMKEAAVEALKKKGWEVVESDLYAMNFNPLISRNDITGEPKDSENFQYPVESSLAYKEGRLSPDIVAEQKKLEAADLVIFQFPLYWFGVPAILKGWFERVLVAGFAYTYATMYDKGPFQNKKTLLSITTGGSGSMYSLQGVHGDMNVILWPIQSGILRFCGFQVLEPQLVYSIGHTPPDARVQVLEGWKKRLETVWEESPLYFAPSSLFDLNFQAGFLLKKEVQEEQKKNKFGLSVGHHLGKSIPADNQIKARK

SEQ ID NO: 10804 - DNA, 2447 bp, Homo sapiens
  ref <308>: DATABASE ACCESSION NUMBER: Refseq / NM_000903
  ref <309>: DATABASE ENTRY DATE: 2002-11-05
cccggcaaccacgagcccagccaatcagcgccccggactgcaccagagccatggtcggcagaagagcactgatcgtactggctcactcagagaggacctccttcaactatgccatgaaggaggctgctgcagcggctttgaagaagaaaggatgggaggtggtggagtcggacctctatgccatgaacttcaatcccatcatttccagaaaggacatcacaggtaaactgaaggaccctgcgaactttcagtatcctgccgagtctgttctggcttataaagaaggccatctgagcccagatattgtggctgaacaaaagaagctggaagccgcagaccttgtgatattccagttccccctgcagtggtttggagtccctgccattctgaaaggctggtttgagcgagtgttcataggagagtttgcttacacttacgctgccatgtatgacaaaggacccttccggagtaagaaggcagtgctttccatcaccactggtggcagtggctccatgtactctctgcaagggatccacggggacatgaatgtcattctctggccaattcagagtggcattctgcatttctgtggcttccaagtcttagaacctcaactgacatatagcattgggcacactccagcagacgcccgaattcaaatcctggaaggatggaagaaacgcctggagaatatttgggatgagacaccactgtattttgctccaagcagcctctttgacctaaacttccaggcaggattcttaatgaaaaaagaggtacaggatgaggagaaaaacaagaaatttggcctttctgtgggccatcacttgggcaagtccatcccaactgacaaccagatcaaagctagaaaatgagattccttagcctggatttccttctaacatgttatcaaatctgggtatctttccaggcttccctgacttgctttagtttttaagatttgtgtttttctttttccacaaggaataaatgagagggaatcgaccgtattcgtgcatttttggatgcatttttaactgattcttatgattactatcatggcatataaccaaaatccgactgggctcaagaggccacttagggaaagatgtagaaagatgctagaaaaatgttctttaaaggcatctacacaatttaattcctctttttagggtcaaagtttagggtacagttggctaggtatcattcaactctccaatgttctattaatcacctctctgtagtttatggtcagaagggaattgctcagagaaggtaaaagactgaatctacctgcctaagggacttaacttgtttggtagttagccatctaatgcttgtttatgatatttcttgctttcaattacaaagcagttactaatatgcctagcacaagtaccactcttggtcagcttttgttgtttatatacagtacacagataccttgaaaggaagagctaataaatctcttctttgctgcagtcatctactttttttttaattaaaaaaaattttttttgaagcagtcttgctctgttacccaggctggagtgcagtggtgtgatctcggctcactgcaacctctgcctcccaggttccagcaattctcctgcctcagcctccctagtagctgggatgacaggcgcctgccatcatgcctgactaatttttgtatttttagtagagacggcgtttcaccatgttggccaggctggtctcaaactcctgacctcaggtgatccgcctacctcagcctcccaaagtgctgggattacaggcgtgatccaccacacctggcccttgcaatcttctactttaaggtttgcagagataaaccaataaatccacaccgtacatctgcaatatgaattccaagaaaggaaatagtaccttcaatacttaaaaatagtcttccacaaaaaatactttatttctgatctatacaaattttcagaaggttattttctttatcattgctaaactgatgacttaccatgggatggggtccagtcccatgaccttggggtacaattgtaaacctagagttttatcaactttggtgaacagttttggcataatagtcaatttctacttctggaagtcatctcattccactgttggtattatataattcaaggagaatatgataaaacactgccctcttgtggtgcattgaaagaagagatgagaaatgatgaaaaggttgcctgaaaaatgggagacagcctcttacttgccaagaaaatgaagggattggaccgagctggaaaacctcctttaccagatgctgactggcactggtggtttttgctctcgacatatccacaatagctgacggctgggtgtttcagtttgcaaaatattttgttgccttcatcttcactgcaattttgtgtaaatttctcaaagatctaattaaataaataaaattcatttctacagactca

SEQ ID NO: 10805 - protein, 274 aa, Homo sapiens
  ref <308>: DATABASE ACCESSION NUMBER: SWISS-Prot / P15559
  ref <309>: DATABASE ENTRY DATE: 2002-06-15
MVGRRALIVLAHSERTSFNYAMKEAAAAALKKKGWEVVESDLYAMNFNPIISRKDITGKLKDPANFQYPAESVLAYKEGHLSPDIVAEQKKLEAADLVIFQFPLQWFGVPAILKGWFERVFIGEFAYTYAAMYDKGPFRSKKAVLSITTGGSGSMYSLQGIHGDMNVILWPIQSGILHFCGFQVLEPQLTYSIGHTPADARIQILEGWKKRLENIWDETPLYFAPSSLFDLNFQAGFLMKKEVQDEEKNKKFGLSVGHHLGKSIPTDNQIKARK

SEQ ID NO: 10806 - DNA, 1580 bp, Rattus norvegicus; identical to SEQ ID NO: 2407
  ref <308>: DATABASE ACCESSION NUMBER: EMBL / J02749
  ref <309>: DATABASE ENTRY DATE: 2000-03-04

SEQ ID NO: 10807 - protein, 434 aa, Rattus norvegicus; identical to SEQ ID NO: 2408
  ref <308>: DATABASE ACCESSION NUMBER: SWISS-Prot / P21775
  ref <309>: DATABASE ENTRY DATE: 2000-05-30

SEQ ID NO: 10808 - DNA, 1391 bp, Homo sapiens; identical to SEQ ID NO: 2409
  ref <308>: DATABASE ACCESSION NUMBER: EMBL / X12966
  ref <309>: DATABASE ENTRY DATE: 1993-09-12

SEQ ID NO: 10809 - protein, 424 aa, Homo sapiens; identical to SEQ ID NO: 2410
  ref <308>: DATABASE ACCESSION NUMBER: SWISS-Prot / P09110
  ref <309>: DATABASE ENTRY DATE: 2002-06-15

SEQ ID NO: 10810 - DNA, 699 bp, Rattus norvegicus
  ref <308>: DATABASE ACCESSION NUMBER: EMBL / J03624
  ref <309>: DATABASE ENTRY DATE: 2000-03-04
cgagggatcctcgtgcgcttccctacgccgctgatctgcgccatgcagtgagcgaccctcgcgcccgccactctacgccacgcctggacggagacacttggacctgcactaaccagctacgcccggttcccaccactgctcaagatggccaggggcagcgttatcctgctagcctggctcctgttggttgcaaccctgtcagccactctggggctcgggatgccaacaaaggagaagagaggctggaccctgaacagcgctggctaccttctgggcccacatgccattgacaaccacagatcatttagcgacaagcatggcctcacaggcaagagggagttaccactggaagtggaggaagggagactaggaagtgttgctgtgcccctgcctgagagcaatatcgtccgcactataatggagtttctcagtttcttgcaccttaaagaggccggggccctcgacagcctgcctggcatccccttggccacctcctcagaagacctagagcagtcctgagaccacacccactgtgcacctgtgtcctctgctataatttaaagtcattctaggctaaaaagaatcttccgccaactcctcaagccaacactttgttctctgctttgatgctgagttattacaattaagatgttttgattggagtaattatattgtgtgacataataaaaactagcaagt

SEQ ID NO: 10811 - protein, 124 aa, Rattus norvegicus
  ref <308>: DATABASE ACCESSION NUMBER: SWISS-Prot / P10683
  ref <309>: DATABASE ENTRY DATE: 2002-06-15
MARGSVILLAWLLLVATLSATLGLGMPTKEKRGWTLNSAGYLLGPHAIDNHRSFSDKHGLTGKRELPLEVEEGRLGSVAVPLPESNIVRTIMEFLSFLHLKEAGALDSLPGIPLATSSEDLEQS

SEQ ID NO: 10812 - DNA, 512 bp, Homo sapiens
  ref <308>: DATABASE ACCESSION NUMBER: EMBL / M77140
  ref <309>: DATABASE ENTRY DATE: 1999-07-02
gccctttctgcctctgcggggctctggtcgccggccaaggaaaaacgaggctggaccctgaacagcgcgggctacctgctgggcccacatgccgttggcaaccacaggtcattcagcgacaagaatggcctcaccagcaagcgggagctgcggcccgaagatgacatgaaaccaggaagctttgacaggtccatacctgaaaacaatatcatgcgcacaatcattgagtttctgtctttcttgcatctcaaagaggccggtgccctcgaccgcctcctggatctccccgccgcagcctcctcagaagacatcgagcggtcctgagagcctcctgggcacgtttgtctgtgtgctgtaacctgaagtcaaaccttaagataatggataatcttcggccaatttatgcggagtcagccattcctgttctctttgccttgatgttgtgttgttatcatttaagattttttttttttggtaattattttgagtggcaaaataaagaatagcaatta

SEQ ID NO: 10813 - protein, 123 aa, Homo sapiens
  ref <308>: DATABASE ACCESSION NUMBER: SWISS-Prot / P22466
  ref <309>: DATABASE ENTRY DATE: 2002-06-15
MARGSALLLASLLLAAALSASAGLWSPAKEKRGWTLNSAGYLLGPHAVGNHRSFSDKNGLTSKRELRPEDDMKPGSFDRSIPENNIMRTIIEFLSFLHLKEAGALDRLLDLPAAASSEDIERS

SEQ ID NO: 10814 - DNA, 2259 bp, Rattus norvegicus; identical to SEQ ID NO: 2529
  ref <308>: DATABASE ACCESSION NUMBER: EMBL / J04187
  ref <309>: DATABASE ENTRY DATE: 2000-03-04

SEQ ID NO: 10815 - protein, 492 aa, Rattus norvegicus; identical to SEQ ID NO: 2530
  ref <308>: DATABASE ACCESSION NUMBER: SWISS-Prot / P15149
  ref <309>: DATABASE ENTRY DATE: 2002-06-15

SEQ ID NO: 10816 - DNA, 8778 bp, Homo sapiens; identical to SEQ ID NO: 2401
  ref <308>: DATABASE ACCESSION NUMBER: EMBL / U22028
  ref <309>: DATABASE ENTRY DATE: 2000-03-04

SEQ ID NO: 10817 - protein, 494 aa, Homo sapiens; identical to SEQ ID NO: 2402
  ref <308>: DATABASE ACCESSION NUMBER: SWISS-Prot / Q16696
  ref <309>: DATABASE ENTRY DATE: 2002-06-15

SEQ ID NO: 10818 - DNA, 4507 bp, Rattus norvegicus; identical to SEQ ID NO: 2569
  ref <308>: DATABASE ACCESSION NUMBER: EMBL / J05022
  ref <309>: DATABASE ENTRY DATE: 2000-03-04

SEQ ID NO: 10819 - protein, 665 aa, Rattus norvegicus; identical to SEQ ID NO: 2570
  ref <308>: DATABASE ACCESSION NUMBER: SWISS-Prot / P20717
  ref <309>: DATABASE ENTRY DATE: 2002-06-15

SEQ ID NO: 10820 - DNA, 1626 bp, Homo sapiens; identical to SEQ ID NO: 2571
  ref <308>: DATABASE ACCESSION NUMBER: EMBL / BC009701
  ref <309>: DATABASE ENTRY DATE: 2001-10-25

SEQ ID NO: 10821 - protein, 665 aa, Homo sapiens; identical to SEQ ID NO: 2572
  ref <308>: DATABASE ACCESSION NUMBER: SWISS-Prot / Q9Y2J8
  ref <309>: DATABASE ENTRY DATE: 2002-06-15

SEQ ID NO: 10822 - DNA, 781 bp, Rattus norvegicus; identical to SEQ ID NO: 2605
  ref <308>: DATABASE ACCESSION NUMBER: Refseq / NM_012515
  ref <309>: DATABASE ENTRY DATE: 2000-11-01

SEQ ID NO: 10823 - protein, 169 aa, Rattus norvegicus; identical to SEQ ID NO: 2606
  ref <308>: DATABASE ACCESSION NUMBER: SWISS-Prot / P16257
  ref <309>: DATABASE ENTRY DATE: 2001-10-16

SEQ ID NO: 10824 - DNA, 4269 bp, Rattus norvegicus; identical to SEQ ID NO: 2619
  ref <308>: DATABASE ACCESSION NUMBER: EMBL / J05210
  ref <309>: DATABASE ENTRY DATE: 2000-03-04

SEQ ID NO: 10825 - protein, 1100 aa, Rattus norvegicus; identical to SEQ ID NO: 2620
  ref <308>: DATABASE ACCESSION NUMBER: SWISS-Prot / P16638
  ref <309>: DATABASE ENTRY DATE: 2002-06-15

SEQ ID NO: 10826 - DNA, 4297 bp, Homo sapiens; identical to SEQ ID NO: 2621
  ref <308>: DATABASE ACCESSION NUMBER: EMBL / X64330
  ref <309>: DATABASE ENTRY DATE: 1992-03-19

SEQ ID NO: 10827 - protein, 1101 aa, Homo sapiens [sequence omitted]

SEQ ID NO: 10828 - DNA, 2225 bp, Rattus norvegicus
  ref <308>: DATABASE ACCESSION NUMBER: EMBL / J05499
  ref <309>: DATABASE ENTRY DATE: 2000-03-04
accagatggcccaaagaggaggcctaggatgcaccccatgacaggtctgtgttccaggagggggaggaggggcatcctcaggctcctgcttcccatctcttcccccaaacagtgatgcctcgaacagtggcatgttgcctcgacttggtgacctgcttttctacaccattgcagaggggcaggaacgcatccccatccataagttcaccacggccctgaaggccactggactgcagacgtcagacccacggctccaggactgcatgagcaagatgcagcgcatggtccaagagtccagcagtggtggcctcttggaccgagaactcttccaaaagtgtgtgagcagcaacattgtgctcctgactcaggcattccggaagaagtttgtcattcctgactttgaggagttcacaggccatgtggatcgtatatttgaggatgccaaagagctcactggaggcaaagtggcagcctacatccctcacctggccaagtcaaacccagatctttggggcgtctccctgtgcactgtggatgggcagcgacactctgtgggccacacgaagatccctttctgcctacagtcctgtgtcaagccactcacttacgccatctccgtgagcaccttaggcaccgactacgtgcacaagttcgtgggcaaggaacccagtggtctgcgctataacaaactctccctcaacgaggaaggaatccctcataaccccatggtcaatgctggtgctattgtggtcagctccctgatcaagatggactgtaacaaagcagagaagtttgactttgtgttacagtatctgaacaagatggctgggaatgaattcatggggttcagcaatgccacattccagtcagagaaggagactggggatcggaattacgccattggctattacctcaaggagaagaagtgcttccctaacccagtggacatgatggctgcccttgatctctatttccagctgtgctctgtggaggttacctgtgagtcaggcagtgtcatggcggccactcttgccaatggcggcatctgccccatcacaggggagagcgtgctgagtgcggaagccgtgcgcaacaccctcagcctcatgcactcctgtggcatgtatgacttctcgggccagtttgccttccacgtgggcctgccagccaagtcagctgtgtcgggagccatcctcctggttgtacccaatgtcatggggatgatgtgtctgtcacccccgttagacaagctggggaacagccacaggggcatcagcttctgccagaagttggtgtctctgtttaacttccacaactacgacaacctgcggcactgtgctcggaagttagacccacggagggaagggggggaagttcggaacaagaccgtggtgaacctgttatttgctgcatatagtggagatgtctcagctcttcgaaggtttgccttgtctgccgtggatatggagcagaaggactatgattcccgcacagccctacatgtggcggcagcggaaggacacattgacgttgtcaagtttctgatcgaggcttgcaaagtgaatccttttgtcaaggacaggtggggcaacattcccctggatgatgccgtgcagttcaatcacctggaggtggtcaaactgcttcaggattaccatgactcctacatgctgtctgagactcaagctgaggtagcagctgagactctgtcaaaagagaacttagagagcatggtgtgagcacaggccaggggcagcccctgctcaagaaaaagcatgagccggccacacatttaacccaaggccaccaaaaatactattgcaagctgcttcagtggggatcaacacagccatctggtgacacaggccagtgttttctgtgagaatcaaaatgccccattccctcatcggacagcacagagaaaagcttcagtggacacctgagcagagctagccacggagacctcaaggtatagcttaagtgacatcctccaccagaaagtagcccaggcttttacccaggtccccatttcaacttccttggagagcctctagctacatgcatatgtatctgtcacagagcaagagaggtgggtgagagcccaatcacctggctttagaaatctgcagagatctgtccatcttagccaagacatgctgctactgctgacaggagttttatagacaaagtattttgtgttcaaataaactttaattaccggaatt

SEQ ID NO: 10829 - protein, 535 aa, Rattus norvegicus
  ref <308>: DATABASE ACCESSION NUMBER: SWISS-Prot / P28492
  ref <309>: DATABASE ENTRY DATE: 2002-06-15
MLPRLGDLLFYTIAEGQERIPIHKFTTALKATGLQTSDPRLQDCMSKMQRMVQESSSGGLLDRELFQKCVSSNIVLLTQAFRKKFVIPDFEEFTGHVDRIFEDAKELTGGKVAAYIPHLAKSNPDLWGVSLCTVDGQRHSVGHTKIPFCLQSCVKPLTYAISVSTLGTDYVHKFVGKEPSGLRYNKLSLNEEGIPHNPMVNAGAIVVSSLIKMDCNKAEKFDFVLQYLNKMAGNEFMGFSNATFQSEKETGDRNYAIGYYLKEKKCFPNPVDMMAALDLYFQLCSVEVTCESGSVMAATLANGGICPITGESVLSAEAVRNTLSLMHSCGMYDFSGQFAFHVGLPAKSAVSGAILLVVPNVMGMMCLSPPLDKLGNSHRGISFCQKLVSLFNFHNYDNLRHCARKLDPRREGGEVRNKTVVNLLFAAYSGDVSALRRFALSAVDMEQKDYDSRTALHVAAAEGHIDVVKFLIEACKVNPFVKDRWGNIPLDDAVQFNHLEVVKLLQDYHDSYMLSETQAEVAAETLSKENLESMV

SEQ ID NO: 10830 - DNA, 2403 bp, Homo sapiens
  ref <308>: DATABASE ACCESSION NUMBER: EMBL / AK000467
  ref <309>: DATABASE ENTRY DATE: 2000-02-22
agaggtcccgggcgcacctgcagagccggaggcttgctggggcatgcgctccatgaaggctctgcagaaggccctgagccgggctggcagtcactgcgggcgaggaggctggggtcacccgagccggagccccctccttggcgggggcgtccggcaccacctcagtgaggccgcggcgcagggcagagagacgccacacagccaccagccgcagcaccaggatcatgattcatcagaaagtggcatgctgtcccgcctgggtgatttgctcttttacactattgctgaaggacaggaacgaatccctatccacaagttcaccactgcactaaaggccactggactgcagacatcagatcctcggctccgagactgcatgagcgaaatgcaccgcgtggtccaagagtccagtagtggtggcctcttggaccgagatctcttccgaaagtgtgtgagcagcaacattgtgctcctgacccaggcattccgaaagaagtttgtcattcctgattttgaggagttcacgggccatgtggatcgcatctttgaggatgtcaaagagctcactggaggcaaagtggcagcctacatccctcagctggccaagtcaaacccagacctgtggggtgtctccctgtgcactgtggatggtcaacggcactctgtgggccacacaaagatccccttctgcctgcagtcctgtgtgaagcccctcacctatgccatctccataagcaccctaggcactgactacgtgcacaagtttgtgggcaaagagccaagtggcctgcgctacaacaagctctccctcaatgaggaaggaatcccccataaccccatggtcaatgctggtgccattgttgtcagctccctgatcaagatggactgtaacaaagcagagaagtttgattttgtgttgcagtatctcaacaaaatggctgggaatgaatacatgggtttcagcaatgccacattccagtcagagaaggaaacaggggatcggaattatgccatcggctattatctcaaggaaaagaagtgctttcctaagggggtggacatgatggctgcccttgatctctacttccagctgtgttctgtggaggtcacttgtgaatcaggcagtgtcatggcagccaccctcgccaacggtgggatctgccccatcacaggcgagagtgtgctgagtgctgaagcagtgcgcaacaccctcagcctcatgcattcctgcggcatgtatgacttctctggccagtttgccttccacgtgggcctgccagccaagtcagctgtatcaggagccatcctcctggtggtacccaatgtcatgggaatgatgtgcctgtcacccccattggacaagctggggaacagccatagggggaccagcttctgccagaagttggtgtctctcttcaatttccacaactatgacaacctgaggcactgtgctcggaagttagacccacggcgtgaaggggcagaaattcggaacaagactgtggtcaacctgttatttgctgcctatagtggcgatgtctcagctcttcgaaggtttgccttgtcagccatggatatggaacagaaagactatgactcgcgcacagctctgcatgttgctgcagctgaaggacacatcgaagttgttaaattcctgatcgaggcttgcaaagtgaatccttttgccaaggacaggtggggcaacattcccctggatgatgctgtgcagttcaaccatctggaggtggtcaaactgcttcaagattaccaggactcctacacactctctgaaactcaggctgaggcagcagctgaggccctgtccaaagagaacttagaaagcatggtatgagcacaggtcatggacagcccctgctcaagaaaaagcatgagctggccacacatgtaatccataaccaccaaaaatactatggagagctacactgcttcagtggggaccaagcagtcatttggtgacttaggctagtgctttctatgggagtcaaaataccccattccctcagcagacagagtacagagaagggcctcagaggacacctgcagtacagctatccagagagactgggcttcaaggtacagcctaatggcttgccccactcaaaaccatcccagctcttcacccaggtctcctcttcctctccctgaagaaaccatcatgagagagatactctggtggagggactctagctaccatgcacatgtacatatccacagaatatgggaagtgggaatggctatatacatggctttagtagtctggagaaatctactccccttggccaggacatgctgctgctactgctaacagccaattttatagacagagaaagtattttgtgttcaaataaactttaattaccaaatcaaaaaaaaaaaaaaaaa

SEQ ID NO: 10831 - protein, 602 aa, Homo sapiens [sequence omitted]

SEQ ID NO: 10832 - DNA, 3504 bp, Rattus norvegicus
  ref <308>: DATABASE ACCESSION NUMBER: Refseq / NM_020075
  ref <309>: DATABASE ENTRY DATE: 2000-11-01
ctctgcttttctctttcagagctgttgcgcagccattggtacctgtattggggaaacatagcatacaagcaagaagcttacagcctcagtggcgaaaaatttttcatgtcagagaccgagaactcttgcagtcgtttatgtcatcccttcttctccagacagaagataccaaaaagttgcaatcaaagatctgttcatcttattgataaagtcactaataagccaaaatgtctgtcaacgtcaaccgcagcgtgtcagaccagttctatcgctacaagatgccccgtttgattgctaaggttgagggcaaaggaaatggaatcaagacagttatagtcaacatggttgacgttgcaaaggcgcttaatcggcctccaacgtatcccaccaaatattttggttgtgagctgggagcacagacccagtttgatgttaagaatgaccgttacattgtcaatggatctcatgaggcgaataagctgcaagacatgttggatggattcattaaaaaatttgttctctgtcctgagtgtgagaatcctgaaacagatctgcatgtcaatccaaagaagcaaacaataggtaattcttgtaaagcctgtgggtaccgaggcatgcttgacacacatcataaactctgtacattcattctcaaaaacccacctgagaatagtgacattggtacaggaaagaaagagaaagaaaagaaaaatagaaagggcaaggacaaggaaaatggctctgtatccaccagtgagacaccaccacctccaccaccaaatgaaattagtcctccacatgctgtggaagaagaggaagatgatgattggggggaggatacaactgaggaagctcaaaggcgcagaatggatgaaatcagtgaccatgcaaaaggtctgacacttagcgatgatttggaaagaactgtagaagagcgtgttaacatcctgtttgattttgttaagaaaaagaaagaagagggcattattgattcatctgataaagacattgtggctgaggcagaaagactggatgtaaaagccatgggccctctcgttttgacagaagttctctttgatgagaagataagagagcaaatcaagaaatacaggcgccattttttaagattttgtcataacaacaaaaaggcccagcggtaccttcttcatggtttggaatgtgtggtagcaatgcatcaagctcagttgatctccaagattccacatatcttgaaggagatgtatgatgcagaccttttagaggaagaggtcattatcagctggtcagaaaaggcctctaagaaatatgtctcaaaagaacttgccaaagagattcgtgtcaaagcagagccatttattaaatggttgaaggaagcggaggaggaatcttctggtggtgaggaagaagacgaagatgaaaatattgaggtggtatattcgaagactgccagtgtaccaaaagttgaaactgtgaagtctgacaacaaggatgacgacattgatattgatgccatttaaaaggatggatgcaacttagcttaacagtgtaatgctgcaaatttttctccattatcagccagaagtgcaacatgtatgtgcaagagctaaagtggcttaacatcatgctacacttgatactaaaaagctattactgtgagtggtctataattaagcccaatgagacatctagggagtccatacatatcagtgagcagttgtagtttgcttatttatagcatgtttctttcggaaaaactagtggtggacacatttggatcacatttatacagttataaaaaataaagatttgattttggtcattcttcagactttgggctatgaatggcttatgctgaagtaattggctacttttaggatgttacaccatttaataacttagacttcttaagtttggtagattgttaggtactgaagacttgaagaatgcaaacaattataatgaccttactcagccattaagaaatgaagtattttgaaagttgtgtctccagtccattgagattggcaactgacaattcttgtcattctaaggaaatttgatgatttaatgacagtgtgacatcctcatgagaagtaaaaatgacctgtgtgtcctatggtttaagagcaaattttgaaacttggagttgtggtttttcagtttgtgtacactcaccccaaattgtagtctattgagtcatgtgcattgcacgttggataagccagggaaatgacaaataagtattttgtgtgtatttagtggttgctttgtactgagagaaaagctttgaggtgtgattaaatcgtaaactctgattctatttgggagaaacaggaaaaaggtgcacttaatctaaaacagcataagttttcaacttttacccttaaattataatttcaagatgtttagacatactgtatcttgtgtttgatgtgttccccctccctaatattatggtttattctttaatgccttttaatttggatataatagcttgtactttagattttggttgctatcttgccaaaataagtgttactgtttttcaagcttgatccccttccctgattgtcttatttaaagagaaagttaaactcatacttctgagtcagagcctgtattttggttaagacttgggatattttttacttcacattgaatatagctggatacctgagaagtctggtgatggcactgggtgggtgcagctagctaaggcctgaccagcccattcagagccttggacttcagacacaaaagtgagtttcttacccacttgctggtgtaaactctatctggggtcctgactatatttgaatacttgtcttcaatattaaaaaacatagcacatttttctttctacaaaagtacattctggagttaagaacccatgtggttgatttgtgtgtggcgtgctagctcatacattatttggatcttattctttgtgtcatccatctcacagattataagactttgattaatgtaaaaagtatgcgttaaaatcataccaaacatttggtaaaattaaaaccttgatgggaggctgggcgtggaacaggagccatatacctggaatggtaacaggggaatgtgctatgtcacaccaaagaagtgggacttggaaagtcacttgtctcctgggtttcagactctttgttgcatgggcagcccatccatatgtcattactttttgagattctcaagtagatcagcacatttcggcctcaggttggcaagattttgtcttagagctgttgctttaaagggaaatggtcaggtcttagacacttaggaaggtcttgggcttctgttcattctggtgccaaaccagtgggattcaaatttcacacaatctgggtttttattcatggaggttaacctggtaagagtaatccttcatggctctattgaggtgtcttaaaaagtttcctgtttcaaacagctacattacttgattaaaacaatgttataaaattaaatttccccctcctttcatattaa

SEQ ID NO: 10833 - protein, 429 aa, Rattus norvegicus; identical to SEQ ID NO: 6589
  ref <308>: DATABASE ACCESSION NUMBER: SWISS-Prot / Q07205
  ref <309>: DATABASE ENTRY DATE: 2001-10-16

SEQ ID NO: 10834 - DNA, 3899 bp, Homo sapiens; identical to SEQ ID NO: 6590
  ref <308>: DATABASE ACCESSION NUMBER: Refseq / NM_001969
  ref <309>: DATABASE ENTRY DATE: 2002-11-05

SEQ ID NO: 10835 - protein, 431 aa, Homo sapiens; identical to SEQ ID NO: 6591
  ref <308>: DATABASE ACCESSION NUMBER: SWISS-Prot / P55010
  ref <309>: DATABASE ENTRY DATE: 2001-10-16

SEQ ID NO: 10836 - DNA, 681 bp, Rattus norvegicus; identical to SEQ ID NO: 2705
  ref <308>: DATABASE ACCESSION NUMBER: EMBL / K02815
  ref <309>: DATABASE ENTRY DATE: 2000-03-04

SEQ ID NO: 10837 - DNA, 728 bp, Homo sapiens; identical to SEQ ID NO: 2706
  ref <308>: DATABASE ACCESSION NUMBER: EMBL / M17847
  ref <309>: DATABASE ENTRY DATE: 2000-03-04

SEQ ID NO: 10838 - protein, 255 aa, Homo sapiens [sequence omitted]

SEQ ID NO: 10839 - DNA, 486 bp, Rattus norvegicus
  ref <308>: DATABASE ACCESSION NUMBER: EMBL / L00111
  ref <309>: DATABASE ENTRY DATE: 2000-03-04
tattctttttttcctcctaggttacacaataaagataaactctaattcttttcatgtataattaaagtcatgtgtcagaaaggctgatggaagacacatatatttgcatccttcttggtactgaaacccttctccctatgacaggaaataaagctaagtgcagaataagctcaccatagttggctattgtgcatcgtgttgtatgtgattctatatccataacatgacagcatggttctggcttatctggtagcaaatctagtccccataaaccaccctgtcgatgttgataactctgctaaacctcaagcggatatgaaaccactgcctcttggtcttctggggacacatggtaatgttgtgactcaatggaaccatatgcttaaagaactgttaatgttgtcacttgtgagcttaatcaaaattaaaaaatatgtattttcgatatcctcaagtggagtctttgctgttacttatactgtgttt

SEQ ID NO: 10840 - DNA, 7637 bp, Homo sapiens
  ref <308>: DATABASE ACCESSION NUMBER: EMBL / X15943
  ref <309>: DATABASE ENTRY DATE: 1997-06-25
gatcaattaagggcatcttagaagttaggcgttcccgctgcctcctttgagcacggaggccaccaacccctagggggaagagatgtagcgcgaggcaggggtgtcgtgctaagaaatttcgacgcttctggggactgaggacaaaggtgcggacacgaccccggggtacctggagttccgtgactcgcgccacggacggcacacctaggggctaatttctgctctgcctcaaagaacctcaagctagagtccttgcctccgcccacagccccgggatgccgctgctgcgctcaccgcacaggcagcgcccggaccggctgcagcagatcgcgcgctgcgcgttccaccgggagatggtggagacgctgaaaagcttctttcttgccactctggacgctgtgggcggcaagcgccttagtccctacctctgctgagctgaacgctcaggcacagtggaactgaaacccggttctgcgggatgtgagagctgttgaggtcacgcgtaattgggtgtgatggagggcgcctgttcgtgatgtgtgcaggtttgatgcaagcaggtcatcgtcgtgcgagtgtgtggatgcgaccgcccgagagactcggaggcaggcttgggacacgtttgagtgaacacctcaggatactcttctggccagtatctgttttttagtgtctgtgattcagagtgggcacatgttgggagacagtaatgggtttgggtgtgtgtaaatgagtgtgaccggaagcgagtgtgagcttgatctaggcagggaccacacagcactgtcacacctgcctgctctttagtagaggactgaagtgcgggggtgggggtacggggccggaatagaatgtctctgggacatcttggcaaacagcagccggaagcaaaggggcagctgtgcaaacggctcaggcaggtgatggatggcagggtaggaagggggaggtccagaggtctggatggaggcttccgcatctgtaccttgcaactcacccctcaggcccagcaggtcatcggccccctcctcacacatgtaatggatctgaagagtaccccgggacagtccggggagatggagattcggaaagtatccatggagatcttacagaatcccctatgcggaccaggaaactcttgtagatccctgcctatctgaggcccaggcgctgggctgtttctcacaatattccttcaagatgagattgtggtccccatttcaaagatgagtacactgagcctctgtgaagttacttgcccatgatcacacaaccaggaattgggccaactgtaattgaactcctgtctaacaaagttcttgctcccagctccgtctcttgtttcccacgagccctggccctctgtgggtaataccagctactggagtcagatttcttgggcccagaacccacccttaggggcattaacctttaaaatctcacttggcagggtctggatcagagttggaagagtccctacaatcctggaccctttccgccaaatcgtgaaaccaggggtggagtggggcgagggttcaaaaccaggccggactgagaggtgaaattcaccatgacgtcaaactgccctcaaattcccgctcactttaagggcgttacttgttggtgcccccaccatcccccaccatttccatcaatgacctcaatgcaaatacaagtgggacggtcctgctggatcctccaggttctggaagcatgagggtgacgcaacccaggggcaaaggacccctccgcccattggttgctgtgcactggcggaactttcccgacccacagcggcgggaataagagcagtcgctggcgctgggaggcatcagagacactgcccagcccaagtgtcgccgccgcttccacagggctctggctggacgccgccgccgccgctgccaccgcctctgatccaagccacctcccgccaggtgagccccgagattctggctcaggtatatgtctctccctccctctccctccattcgtcattttctcactccctttcctcctctccctctctctccgttagtctcttcatcagatagtctctgttagtccgcgatttataccagctcgtgccctaggttggatcggacagtctcaatcccccggctcgctcttcctgctcggctgcggactccagtcttactctctcgcactgcacacaggcttaggccagtctcgggacactcaggctccccagggaccgcgcacagagcctgaggcaagagaaactttccgcagacggtgcgatcagggacggcgtctggagcccagcagtcccagggaaattggttcagaacctggaacagagcggatgggtggcaaataggcacgacgactgagggacaagcagccctaaactgcaagccccagtcacaggctctgggagcaaagagagaaagtcttgggtcccaatttaagagtaaaacttggttcctgcaggggactgaggtgccagcaggcggagcttaggctgagcactaaaattgattcttttatttctcagattccaattgcagagataatctctgtggatagatcccacccctcccaccaaggtgtatgcaaaagccccagaagaggaggacagctctgggtttccttatgggatcagcttctgtgacaggggcctgggagcatgtcctccacagagacctggctaacaggtttatatgtatctgtgtggctttggggagaagggtaggactgagacctcccccactcagctctccctctaggatcgctcctccagctctatcagactgtgcatgctacaggcccactgaacctcccagaagtccactgtgctgatgaggaaacaaaaaagaagagaaatataatgaccagtctgaagccacaaagccagagcgttagaagcaagacagaaaaccaggataggagccaaggtctgtgggctcctagaacttcgaactggcgcaggtggtttatctcattcttcccttgcagagaggtgtcatgggcttccaaaagttctcccccttcctggctctcagcatcttggtcctgttgcaggcaggcagcctccatgcagcaccattcaggtaagacagcctgaagccagaaggacactggtatcagacaattccatgcctcttaagtgtggtgtactgaatgcttaaaaaccgacagggggccggggtaaggtatgtactcatgcacatatataattttttgatataaaaatgtgtggtacacaatttataagtagtgataaatatttagacaatattcttcattataatttttttgagacagagtctcactctgtcatccatgctggagtgcaatggcaccgtgtcggctcactgcaacttccatctcctgggttcaagcaattctcctgcctcagcctcccaagtagccgggattacaggcgcccaccaccatgcccggctaatttttgtatttttagtagagatagggtttcaccatgttggccaggctggtctcaaactcctgacctcaggtgatccacctgcctcagcctcccaaagtgctgagattacagccgtgagccaccgcgcccggcctattataaattttatatagcccactgagtctcacaaaatgcttttgttgcttttagccaaacttttgtatgtgtagccatcctatttatcctattcagccatgatttgaaaaatgaattgcatcctattctgttaaatagtttgccactaaatttgttattgttaaatctggtattttacctgttgatctattctcacccacatataaatctattaaactgaaactattttcaggttcagcactaactgtaagtttttgcatttaatttttaataatggctgcactcagcttgcaaaattcttgaaaatttaaccattagctttcacaagcctatacaaactggctccagcacaccactgtttagaggccacaccagtgcctgggtcctgaggaggacactggccttgtgccctgtcccctaggactcccgctggccacatcctcaggggaagaagcaaagaccaggaagcctggctgcttatcctggggaggggcaggcaggggctcacagcctgcactgagtttgcttcccctccacaggtctgccctggagagcagcccagcagacccggccacgctcagtgaggacgaagcgcgcctcctgctggctgcactggtgcaggactatgtgcagatgaaggccagtgagctggagcaggagcaagagagagagggctccaggtgaggctccccaagcgctcagcacagggcctcctctccccgcagcatacacaggaaggtggatcccgagaggtaggagagaacacactggccaggaatccaacaggctgtgttgttcaccgggacctggggcccagctgttctcagcctccaagggagacagaggtcccactgcagctggaggtaccgtggttagacataacaaaaggctccgtttctgaaagttcttaggaaatgaaatggggaggtgtggaatcgctcactgtgggaattgttcttgcagtactgggagacctcccagcactggatgagttaagactagtaagggtgaagtcagggatacacatagtacatctcaggaagttttagaaagtttggatccaccttgttaatctgcatacgacattctttcacacctgcaaggagactttcatttcacatttgcaaggtgaaggtgaggcccttgcaggggatggggatgggtagagcagtgtctgaggtaggtttgagcctttaaatgtgtggcatctgtggagatgtgcatgttgtcaggaggccagggagagcacccttccccagatccacatccctgtgtaccttgagcctgagcagagaccagcccctggcctggccccagcactgctcaggcagaggcatgtgttgcccctgcatctgccctgagaacccctctgtcaagcatgaaggactgaacagcatgtggaatgccagaaaagatcatccttccccatccagcccttccctgcattgccctagcccactgcacctctgagctctcctaatgaaggatagataagtgagctgccctcctgcctgcccctcctgctcccagggtcccctgcctggtctaaccttctaagtgactgcccatggggacagattctggtgcatggtactgtctggtatgtgttttccctgcagcctggacagccccagatctaagcggtgtggtaatctgagtacttgcatgctgggcacatacacgcaggacttcaacaagtttcacacgttcccccaaactgcaattggggttggagcacctggaaagaaaagggatatgtccagcgacttggagagagaccatcgccctcatgttagcatgccccagaatgccaactaaactcctccctttccttcctaatttcccttctagcatccttcctataacttgatgcatgtggtttggttcctctctggtggctctttgggctggtattggtggctttccttgtggcagaggatgtctcaaacttcagatgggaggaaagagagcaggactcacaggttggaagagaatcacctgggaaaataccagaaaatgagggccgctttgagtcccccagagatgtcatcagagctcctctgtcctgcttctgaatgtgctgatcatttgaggaataaaattatttttccccaaagatctgagctgtggtggtcattgctctgatctatgtcccaggcttcatagtgtctaagacctatgcttagaaatagccttaaccctaggctagctggacagaggatatggtgggtggtccctttgaccaagctcaagcaggaagaacaggggtcctaaggagcaggtaagcacctctaggacttgatgctgcaaactccgctcctcttccaggtaagactgaggaattttttattttcctaagaaagggtatttggtgcccgtgactggggtgtagattttatagtcctttgtgaatggggctgggtgtgggaccataattcactccagtgtcataaacctccgctttgatttttagttaatttatacaggaaagattggctgttactgctccacattccatagccagtcatccagagtcaccttgggttttctgacacccctgggaatatctatggggagtgatcatggcattttccctaatggccttgtgattttctgctctgataattgtgtttaggagaaacacttaaagttaattggtgcctttcagcacagcaactttaccatgaaggtccatggggctgacctctctcccagcctctcactcacagatcttctcttctttctccatcctgcaaatcagaatcattgcccagaagagagcctgtgacactgccacctgtgtgactcatcggctggcaggcttgctgagcagatcagggggtgtggtgaagaacaactttgtgcccaccaatgtgggttccaaagcctttggcaggcgccgcagggaccttcaagcctgagcagctgaatgactcaagaaggtgactgcccttgtatgatgggatgggaagatgaatgactggtttttactggggtgtaaaaccactctgagcctctctgagaccatgtggttttaaaaaatccataagggaaggtacccacaccagtatctgagttccagtagctaagaccctagaatttggattcatctctgttttttcatgtctctccttgtaaccctgagatcatcagaccaagaaatacagatcctgtttatttagaacactgctgtttgacatttattaattttgattattctagcctttgagtttgaaagataatgacactatcattttagagtatacattactatgttgtgtacctctgaattaagtgtacagacttgagttcaagaactgtatttgccctttaccagctatatgaccatgaacaggttacttaactctctccaagcctcagtttctccatctgtaaattgagggctacaatagtacctacctccaagcattactataaagagcaagtgaggtaatagatgttaagtctgacaattaaccagtaactaaattctagctgttattttcttcctcctaggtcacaataaagctgaactccttttaatgtgtaatgaaagcaatttgtaggaaaggctccatggaagacatacatataggcatccttcttgatactgaaaactatcttctttgtttgaaaggaactattgctaaatgcagaacaagctcattgcagttacctattgtgcatctttttaaatacttgattatgtaaccataaatctgacagcatgtctcattggcttatctggtagcaaatctaggccccgtcagccaccctattgacattggtggctctgctaaacctcagggggacatgaaatcactgcctcttgggcatctggggacacatggtaatgctgtgccttgacagaagtatttgtttaaagaaatgtcaatgctgtcatttgtgaactctatcaaaattaaaaatgtattttctatacccttcaatggaatctctgctgctatttatgctatttttcccaggagagttcaggggcctgtaagcactctgttgaccaaccaatctgactcacttagcacaatgacaacatgcctgggtaggatcc

SEQ ID NO: 10841 - protein, 141 aa, Homo sapiens; identical to SEQ ID NO: 3267
  ref <308>: DATABASE ACCESSION NUMBER: SWISS-Prot / P01258
  ref <309>: DATABASE ENTRY DATE: 2002-06-15

SEQ ID NO: 10842 - DNA, 3509 bp, Rattus norvegicus
  ref <308>: DATABASE ACCESSION NUMBER: EMBL / L02896
  ref <309>: DATABASE ENTRY DATE: 1996-02-03
cgcccgcctgagtggccggacctcgcgcctcgcgcctcgcgtcccgcgctgcagccgcagtcggcttttgttgtctccgcctcctcgtcggtccccgactctggaccacgagcggcgcgcgctgggaccttggctctgcccttcgcgcagactgggctgagcgggccgggcggccatccagggaggcgcgcacgggcggtcggggagccgcgggccccgccatggagctccgggcccgaggctggtggctgctgtgcgcggccgccgcgctagtcgcctgcacccgcggggaccccgccagcaagagccggagctgcagcgaagtccgccagatctacggggctaagggctttagcctgagcgacgtgccccaggcagagatctcgggagagcacctgcggatctgcccccagggctacacctgctgcaccagtgagatggaggagaacctggccaaccacagccggatggagctggagaccgcactccacgacagcagccgtgccctgcaggctacactggccacccagctgcatggtatcgatgaccacttccagcgcctgctgaatgactcggagcgtacactgcaggatgcttttcccggggcctttggggacctgtacacgcagaacactcgggccttccgggacctgtatgctgagctgcgtctctactaccgaggggccaacctacaccttgaggagacactggccgagttctgggcacggctgctggagcgtctcttcaagcagctgcacccccagctgctgctgcccgatgactatctggactgcctgggcaagcaggcggaggcactgcggccgtttggggatgcccctcgagaactgcgcctgagggccacccgtgcttttgtggcggcacgatcctttgtgcagggcctgggtgtggccagtgacgtagtccgaaaggtggcccaggttcctctggccccagaatgttctcgggctgtcatgaagttggtctactgtgcccattgccggggagtccctggtgcccggccctgtcccgactattgccgaaatgtgctcaaaggctgccttgccaaccaggccgacctggatgccgagtggaggaacctcctggactccatggtgctcatcactgacaagttctggggcccgtcgggtgcggagtatgtcattggcagtgtgcatatgtggctggcggaggccatcaacgccctccaggacaacaaggacacactcacagctaaggtcatccagggctgcggaaaccccaaggtcaatccccatggctctgggcctgaggagaagcgtcgccgtgccaaactggcactgcaggagaagtcctccacaggtactctggaaaagctggtctctgaggccaaggcccagctccgagacattcaggactactggatcagcctcccagggacactgtgtagtgagaagatggccatgagtcctgccagcgatgaccgctgctggaatgggatttccaagggccggtacctacctgaggtgatgggtgatgggctggccaaccagatcaacaaccctgaagtggaggtggacatcaccaagccggatatgaccatccggcagcagatcatgcagctcaagatcatgaccaaccgtttacgtggcgcctacggtggaaatgatgtggacttccaggatgccagtgatgacggtagtggttccggcagcggtggcggatgcccagatgacgcctgtggtcggagggtcagcaagaagagctccagctcccggacccccttgatccatgccctccccggcttgtcagaacaggagggacagaagacctcggccgccactcgcccagagcctcactacttctttctgctcttcctgttcaccttggtccttgctgcagccaggcccaggtggcggtaactgccccctagcccaaaggactgtcttggccaaaacatgcaacagaccatatttacttcccttggccttcgaggcccagggcaggataaggagacagtagctctgagtgctggggcagggcgcatggggtcctggccttcctgggtctggccacgcctgtcaccctagcttctagttgttgtatcaggtcagctgcgagccagtgtccccaaaagccatgtttttcagggacctcaggggcacctctggctgcacactcctcccctaccctcctgtaccaccccagaagctcacgaggtcacccagaagggcggttattagctacaacccatcggagacctcaagtgagtctgtgtcttcctctcctgcctcttcccggtggggactccccaccagaccccatgggacacagatgtcagaaattgaggcccatcccgcagctccccaggaagcctggaagggatgccagtatgtcgctgaccaggctctggcagggcctacaagtttatgcatgataccttctcctcagaagaagctctgcaggcaggatcccaacacacaccagaccaggaccctgtgccactgtggagctcagtgaatctggttctcaaagaagacccactgtggggttcctctagtgtgacataggtgaggtggcagctggcaaggccgcactaggctgccacactgtttgccccctcagatgggctcataaagactgggcttgagggtccacatgaagagcctcacttcaggggaatagccggccacgtctagcccctatcccacttagaaaggtcacctggccacggtgatgctgggtggctgatgaaacttaagctcagggtcagtgggacctggcactgcaggtcaagaggacgcctgggccccttcctgacccaggcagctctgcaggagctgggggagcattgacagtcaagggcttttatagacatacacattcagaccctcggtgtccttgtccactgagtgctgtatctcatcgtatctcaatcttcattgacagcactggagaggctcggggcaccacttggagccttgtatcccgcaggcttgagacctgggggcacctggcttaccaaggttggcaaggctccatcttcccttccaggggcttggggatgctaagttgctgtatccaggaagacagtagtcctcacatgcagaaggcctgggaaaaggctgcttgtcgctttttttttttcctttctttttgtcactgggttagagaggctcccgccagcacagcaccaaggcctgcccagtagtcaggtctcctggtccaggatgggtgtgctctgtagttggtctgtgggtttcttaggcccatgccctgagcacattcacccagccacatccctgctagtgacactcaggcaggggcactgggaaccagacctgggctctggcatcaacgagtgcctaggtgtcaggacagcggcacccatcctgtacagggcagccaggatagtggccaagctactgtgtcctttctccatgaggctccctgtcactcggtgccagtgggtaatgtgtgttctttgagtccttatatgaataaaaggctggagacctaccaaaaaaaaaaaa

SEQ ID NO: 10843 - protein, 558 aa, Rattus norvegicus
  ref <308>: DATABASE ACCESSION NUMBER: SWISS-Prot / P35053
  ref <309>: DATABASE ENTRY DATE: 2002-06-15
MELRARGWWLLCAAAALVACTRGDPASKSRSCSEVRQIYGAKGFSLSDVPQAEISGEHLRICPQGYTCCTSEMEENLANHSRMELETALHDSSRALQATLATQLHGIDDHFQRLLNDSERTLQDAFPGAFGDLYTQNTRAFRDLYAELRLYYRGANLHLEETLAEFWARLLERLFKQLHPQLLLPDDYLDCLGKQAEALRPFGDAPRELRLRATRAFVAARSFVQGLGVASDVVRKVAQVPLAPECSRAVMKLVYCAHCRGVPGARPCPDYCRNVLKGCLANQADLDAEWRNLLDSMVLITDKFWGPSGAEYVIGSVHMWLAEAINALQDNKDTLTAKVIQGCGNPKVNPHGSGPEEKRRRAKLALQEKSSTGTLEKLVSEAKAQLRDIQDYWISLPGTLCSEKMAMSPASDDRCWNGISKGRYLPEVMGDGLANQINNPEVEVDITKPDMTIRQQIMQLKIMTNRLRGAYGGNDVDFQDASDDGSGSGSGGGCPDDACGRRVSKKSSSSRTPLIHALPGLSEQEGQKTSAATRPEPHYFFLLFLFTLVLAAARPRWR

SEQ ID NO: 10844 - DNA, 3692 bp, Homo sapiens
  ref <308>: DATABASE ACCESSION NUMBER: EMBL / X54232
  ref <309>: DATABASE ENTRY DATE: 1991-03-08
ggctgcccgagcgagcgttcggacctcgcaccccgcgcgccccgcgccgccgccgccgccggcttttgttgtctccgcctcctcggccgccgccgcctctggaccgcgagccgcgcgcgccgggaccttggctctgcccttcgcgggcgggaactgcgcaggacccggccaggatccgagagaggcgcgggcgggtggccgggggcgccgccggccccgccatggagctccgggcccgaggctggtggctgctatgtgcggccgcagcgctggtcgcctgcgcccgcggggacccggccagcaagagccggagctgcggcgaggtccgccagatctacggagccaagggcttcagcctgagcgacgtgccccaggcggagatctcgggtgagcacctgcggatctgtccccagggctacacctgctgcaccagcgagatggaggagaacctggccaaccgcagccatgccgagctggagaccgcgctccgggacagcagccgcgtcctgcaggccatgcttgccacccagctgcgcagcttcgatgaccacttccagcacctgctgaacgactcggagcggacgctgcaggccaccttccccggcgccttcggagagctgtacacgcagaacgcgagggccttccgggacctgtactcagagctgcgcctgtactaccgcggtgccaacctgcacctggaggagacgctggccgagttctgggcccgcctgctcgagcgcctcttcaagcagctgcacccccagctgctgctgcctgatgactacctggactgcctgggcaagcaggccgaggcgctgcggcccttcggggaggccccgagagagctgcgcctgcgggccacccgtgccttcgtggctgctcgctcctttgtgcagggcctgggcgtggccagcgacgtggtccggaaagtggctcaggtccccctgggcccggagtgctcgagagctgtcatgaagctggtctactgtgctcactgcctgggagtccccggcgccaggccctgccctgactattgccgaaatgtgctcaagggctgccttgccaaccaggccgacctggacgccgagtggaggaacctcctggactccatggtgctcatcaccgacaagttctggggtacatcgggtgtggagagtgtcatcggcagcgtgcacacgtggctggcggaggccatcaacgccctccaggacaacagggacacgctcacggccaaggtcatccagggctgcgggaaccccaaggtcaacccccagggccctgggcctgaggagaagcggcgccggggcaagctggccccgcgggagaggccaccttcaggcacgctggagaagctggtctctgaagccaaggcccagctccgcgacgtccaggacttctggatcagcctcccagggacactgtgcagtgagaagatggccctgagcactgccagtgatgaccgctgctggaacgggatggccagaggccggtacctccccgaggtcatgggtgacggcctggccaaccagatcaacaaccccgaggtggaggtggacatcaccaagccggacatgaccatccggcagcagatcatgcagctgaagatcatgaccaaccggctgcgcagcgcctacaacggcaacgacgtggacttccaggacgccagtgacgacggcagcggctcgggcagcggtgatggctgtctggatgacctctgcggccggaaggtcagcaggaagagctccagctcccggacgcccttgacccatgccctcccaggcctgtcagagcaggaaggacagaagacctcggctgccagctgcccccagcccccgaccttcctcctgcccctcctcctcttcctggcccttacagtagccaggccccggtggcggtaactgccccaaggccccagggacagaggccaaggactgactttgccaaaaatacaacacagacgatatttaattcacctcagcctggagaggcctggggtgggacagggagggccggcggctctgagcaggggcaggcgcagaggtcccagccccaggcctggcctcgcctgcctttctgccttttaattttgtatgaggtcctcaggtcagctgggagccagtgtgcccaaaagccatgtatttcagggacctcaggggcacctccggctgcctagccctccccccagctccctgcaccgccgcagaagcagcccctcgaggcctacagaggaggcctcaaagcaacccgctggagcccacagcgagcctgtgccttcctccccgcctcctcccactgggactcccagcagagcccaccagccagccctggcccaccccccagcctccagagaagccccgcacgggctgtctgggtgtccgccatccagggtctggcagagcctctgagatgatgcatgatgccctcccctcagcgcaggctgcagagcccggccccacctccctgcgcccttgaggggccccagcgtctgcagggtgacgcctgagacagcaccactgctgaggagtctgaggactgtcctcccacagaccctgcagtgaggggccctccatgcgcagatgaggggccactgacccacctgcgcttctgctggaggaggggaagctgggcccaaaggcccagggaggcagcgtgggctctgccaatgtgggctgcccctcgcacacagggctcacagggcaggccttgctggggtccagggctgttggaggaccccgagggctgaggagcagccaggacccgcctgctcccatcctcacccagatcaggaaccagggcctccctgttcacggtgacacaggtcagggctcagagtgaccctcggctgtcacctgctcacagggatgctggtggctggtgagaccccgcactgcacacgggaatgcctaggtcccttcccgacccagccagctgcactgcagggcacggggacctggatagttaagggcttttccaaacatgcatccatttactgacacttcctgtccttgttcatggagagctgttcgctcctcccagatggcttcggaggcccgcagggcccaccttggaccctggtgacctcctgtcactcactgaggccatcagggccctgccccaggcctggacgggccctccttccctcctgtgccccagctgccaggtggccctggggaggggtggtgtggtgttgggaaggggtcctgcagggggaggaggacttggagggtctgggggcagctgtcctgaaccgactgaccctgaggaggccgcttagtgctgctttgcttttcatcaccgtcccgcacagtggacggaggtccccggttgctggtcaggtccccatggcttgttctctggaacctgactttagatgttttgggatcaggagcccccaacacaggcaagtccaccccataataaccctgccagtgccagggtgggctggggactctggcacagtgatgccgggcgccaggacagcagcactcccgctgcacacagacggcctaggggtggcgctcagaccccaccctacgctcatctctggaaggggcagccctgagtggtcactggtcagggcagtggccaagcctgctgtgtccttcctccacaaggtccccccaccgctcagtgtcagcgggtgacgtgtgttcttttgagtccttgtatgaataaaaggctggaaacctaaa

SEQ ID NO: 10845 - protein, 558 aa, Homo sapiens
  ref <308>: DATABASE ACCESSION NUMBER: SWISS-Prot / P35052
  ref <309>: DATABASE ENTRY DATE: 2001-10-16
MELRARGWWLLCAAAALVACARGDPASKSRSCGEVRQIYGAKGFSLSDVPQAEISGEHLRICPQGYTCCTSEMEENLANRSHAELETALRDSSRVLQAMLATQLRSFDDHFQHLLNDSERTLQATFPGAFGELYTQNARAFRDLYSELRLYYRGANLHLEETLAEFWARLLERLFKQLHPQLLLPDDYLDCLGKQAEALRPFGEAPRELRLRATRAFVAARSFVQGLGVASDVVRKVAQVPLGPECSRAVMKLVYCAHCLGVPGARPCPDYCRNVLKGCLANQADLDAEWRNLLDSMVLITDKFWGTSGVESVIGSVHTWLAEAINALQDNRDTLTAKVIQGCGNPKVNPQGPGPEEKRRRGKLAPRERPPSGTLEKLVSEAKAQLRDVQDFWISLPGTLCSEKMALSTASDDRCWNGMARGRYLPEVMGDGLANQINNPEVEVDITKPDMTIRQQIMQLKIMTNRLRSAYNGNDVDFQDASDDGSGSGSGDGCLDDLCGRKVSRKSSSSRTPLTHALPGLSEQEGQKTSAASCPQPPTFLLPLLLFLALTVARPRWR

SEQ ID NO: 10846 - DNA, 1330 bp, Rattus norvegicus; identical to SEQ ID NO: 2754
  ref <308>: DATABASE ACCESSION NUMBER: EMBL / L03201
  ref <309>: DATABASE ENTRY DATE: 2000-03-04

SEQ ID NO: 10847 - protein, 330 aa, Rattus norvegicus; identical to SEQ ID NO: 2755
  ref <308>: DATABASE ACCESSION NUMBER: SWISS-Prot / Q02765
  ref <309>: DATABASE ENTRY DATE: 2002-06-15

SEQ ID NO: 10848 - DNA, 1763 bp, Homo sapiens; identical to SEQ ID NO: 2756
  ref <308>: DATABASE ACCESSION NUMBER: EMBL / M90696
  ref <309>: DATABASE ENTRY DATE: 2000-10-20

SEQ ID NO: 10849 - protein, 331 aa, Homo sapiens; identical to SEQ ID NO: 2757
  ref <308>: DATABASE ACCESSION NUMBER: SWISS-Prot / P25774
  ref <309>: DATABASE ENTRY DATE: 2002-06-15

SEQ ID NO: 10850 - DNA, 3665 bp, Rattus norvegicus; identical to SEQ ID NO: 2822
  ref <308>: DATABASE ACCESSION NUMBER: EMBL / L07925
  ref <309>: DATABASE ENTRY DATE: 2000-06-16

SEQ ID NO: 10851 - protein, 895 aa, Rattus norvegicus; identical to SEQ ID NO: 2823
  ref <308>: DATABASE ACCESSION NUMBER: SWISS-Prot / Q03386
  ref <309>: DATABASE ENTRY DATE: 2002-06-15

SEQ ID NO: 10852 - DNA, 5796 bp, Homo sapiens; identical to SEQ ID NO: 2824
  ref <308>: DATABASE ACCESSION NUMBER: EMBL / AB037729
  ref <309>: DATABASE ENTRY DATE: 2000-03-14

SEQ ID NO: 10853 - protein, 914 aa, Homo sapiens; identical to SEQ ID NO: 2825
  ref <308>: DATABASE ACCESSION NUMBER: SWISS-Prot / Q12967
  ref <309>: DATABASE ENTRY DATE: 2002-06-15

SEQ ID NO: 10854 - DNA, 2490 bp, Rattus norvegicus
  ref <308>: DATABASE ACCESSION NUMBER: EMBL / L10336
  ref <309>: DATABASE ENTRY DATE: 1993-07-13
ggtagccactttggacttatcttcaagaatgtgacatttgtggtaatattctttgcttccccatggcctcaccgtgccacaacagtgttacgtgtttgacactcactgcttgtgcacccatcacttctgatgtatggcagttttgggtcaataagatattagtattactttgactttgacttgtgagtctaggttaaaatcattcggaggattttttattctccgaggtcaccccaaccgaaattttttagttcatatttattttgttttagcccattaggttgtttttatataattgaactagtaaattaaagctccatagggcttctccgtcttattgggagattccagcctcttcactggaaggtcaatttcactgattgaaagtaagagacagttgaaccctcgtttagccattcattctagtccctaattaaggaacaagtgattatgctacctttgcacggtcaggataccgcggccgtttaactttagtcactgggcaggcaatgctctaatacttgttatgctagaggtatgtttttggtaaacaggcggggttcatgtttgccgagttccttttactttttaatctttccttaaagcacgcctgtgttgggctaacgagttagggataggtaattctattgttgggttagtacctatgattcgataattgacaatggttatccgggttgtcatacacttgtgctaggagaggcaatggaaccctgcgagctgcagaacgagctagtgtcagccgaaggccggaaccggaaggcggtgctgtgccagcgttgtggctctcgggtgctgcagccagggactgctcttttctctcgccggcagcttttcctcccctccatgaggaagaagccggatctggtggacggcagcaatcctgatggtgatgtcctcgaggaacactggctggttaatgacatgttcatctttgagaacgtgggctttaccaaggacgtgggcaacgtcaagtttctagtctgtgcagactgtgagattggacccattggctggcattgcctagatgacaagaacagcttctatgtggccttggagcgagtttcccacgagtaactgaggggtttgggacttggctccaccctagctataaagctctgcccacaagaaccgacactgatgtgtcagcagtgctggcagacttcttggtactaatataagcaccggtgtttgcccttgaacttgcagagggccggtcctgtttcctcaggcctcagagcatgtctcctacttagtcctctctgtcacatgtgtcctagagccctttcccctgacttggaacatggaagaacacgcgagtgctctaccagtgtagtctggttccggcactctgcctccgcacctcgatgccaagctctcttcttctcagcaagaacaacattcatctttagccatcacgacgggaactaagatgctaatatttgaaactccacctttcctcattctagaagccaagtgtgatagggtgcacatctgtaatcctaggtcttgagtgggtagaggcaggaagatcaggagttcaagggcagccttagctacatagactgggccaagtgagatgttgtctcaaaaaacataaagcatacaagtatttgagagtaatctcattgtatgtgacctacttatctacagtaatttattctttttaaaagtaaaacatttacagatgtcagtatttaaacctcactttagatacatttttagtactgtgtttgagagccttttttccgggtcaatagtggcattttataatgaggacgaacacgactcctcttccctcagatcttgatcaggtttctctttttagtcattccttgcccctgatgtcaaccctaaggaaaactcagccctagctgtgtgccagactctcttgtaaacctgttccacggacatttctattgttatggacaaggtgttaccttttcttattattagccaacttaaatcttcaatatgatttccagttactctgtcatttctcttctggagtgactcagtagcttaaaaggactctgtgtaaacaggttcaaatactgtgtcatcatcccctcctctgagggcctaaattgagataagtagagacttcattattcctcatgccagagcttaggaagtgggggcagatcaagagttcaaggtcagcctcagttactataatatcaaattcaaggccagcctgtactatggagatcttgtttcaaatgaacaaaacacaaaataaacaagtaggacctgcaaaagtgacacgtagttaaaaatgtttgctgctctttcaggcgacctgagttcaggaccttgcaccctcatgggaggtttattccagttcaaggagatctgcgccttctggtccctgcagatgccttcatgtgtgtggcacccatacaaacaagtgagcacactcgcgtacacacacacacacgcacgcacgcacgtgaataaaaattttacaaa

SEQ ID NO: 10855 - protein, 123 aa, Rattus norvegicus; identical to SEQ ID NO: 6470
  ref <308>: DATABASE ACCESSION NUMBER: SWISS-Prot / Q08326
  ref <309>: DATABASE ENTRY DATE: 2002-06-15

SEQ ID NO: 10856 - DNA, 922 bp, Homo sapiens
  ref <308>: DATABASE ACCESSION NUMBER: EMBL / S78873
  ref <309>: DATABASE ENTRY DATE: 2000-03-04
ccggctgcggcgatggaaccagcggacgagccgagcgagttagtgtcagccgagggccgaaaccggaaggcggtgctgtgccagcgttgcggctcccgggtgctgcagccagggaccgctctcttctctcgccgacagcttttccttccctccatgagaaagaagccagctctgtctgacggcagcaatcctgacggcgatctcctccaggaacactggctggttgaggacatgttcatttttgagaatgtgggcttcaccaaggacgtgggcaacatcaagtttctggtctgcgcagactgtgaaattggaccaattggctggcattgcctagatgacaagaacagtttctatgtggccttggaacgagtttcccatgagtaactgaggggaggggtactcagctccatctccaaagataaacctactccccacaagaactggcctttaatgtggtataactgttccgctgccttcttgtctgtgtgctaatataaatactgagtaccagcatgtccatttgaacatgcaaagggttaatcctgcttcctaaagcctcaagtacatgcctcctgcttagttcactttgtatcacatttcctaagctcccttttcccccagttttgggacactgtgcttacctccaaaaatctcatctcttccctggcattctccctaggctctgttttgcccagggctcccgctttttcttgctctagaggagcagtattcaaccttttagctatgatgacacataacaaaagatgtttatgtactaatagttgaaatctgcctttttctcattcaagaaggcatacaaatatctgagagtgactttgttgtatggctacccttgtgatctacagtaatttattctttctaaaagtaaagcattctcaaaacaaaaaaaaaaaaaaaaagg

SEQ ID NO: 10857 - protein, 123 aa, Homo sapiens
  ref <308>: DATABASE ACCESSION NUMBER: SWISS-Prot / P47224
  ref <309>: DATABASE ENTRY DATE: 2002-06-15
MEPAEQPSELVSAEGRNRKAVLCQRCGSRVLQPGTALFSRRQLFLPSMRKKPALSDGSNPDGDLLQEHWLVEDMFIFENVGFTKDVGNIKFLVCADCEIGPIGWHCLDDKNSFYVALERVSHE

SEQ ID NO: 10858 - DNA, 2171 bp, Rattus norvegicus; identical to SEQ ID NO: 2884
  ref <308>: DATABASE ACCESSION NUMBER: EMBL / L12025
  ref <309>: DATABASE ENTRY DATE: 2000-03-04

SEQ ID NO: 10859 - protein, 412 aa, Rattus norvegicus; identical to SEQ ID NO: 2885
  ref <308>: DATABASE ACCESSION NUMBER: SWISS-Prot / AAB80767
  ref <309>: DATABASE ENTRY DATE: 2003-02-01

SEQ ID NO: 10860 - DNA, 1254 bp, Homo sapiens; identical to SEQ ID NO: 2886
  ref <308>: DATABASE ACCESSION NUMBER: EMBL / M24407
  ref <309>: DATABASE ENTRY DATE: 2000-03-04

SEQ ID NO: 10861 - protein, 417 aa, Homo sapiens; identical to SEQ ID NO: 2887
  ref <308>: DATABASE ACCESSION NUMBER: SWISS-Prot / P15151
  ref <309>: DATABASE ENTRY DATE: 2002-06-15

SEQ ID NO: 10862 - DNA, 826 bp, Rattus norvegicus
  ref <308>: DATABASE ACCESSION NUMBER: EMBL / L12382
  ref <309>: DATABASE ENTRY DATE: 2001-12-17
gcggcttgcggagcgggaggcagcggccggagagccaggcggaacctgcgggggcggaggcggcggtggcagccggggcgcagatagcaggaacaggatcaagccctccataccagggaccaggctaaaaccagattaccactgcccctacctgggccctgttgacttaaagcagccactgtaatcatgggcaatatctttgggaaccttctgaagagcctgatcgggaagaaggagatgcgcatcctgatggtgggcctggatgctgcaggaaagaccaccatcctctataagctgaagcttggcgagattgttaccaccattcccaccatcgggtttaatgtggagacagtggaatataagaatatcagcttcacagtatgggacgtaggtggccaggacaagattcggcccctctggagacactacttccagaatacccaaggcttgatatttgtggttgacagcaatgaccgggagcgagtgaacgaggcccgggaagagctgatgaggatgctggcggaggatgagctccgggatgctgtgctgcttgtgtttgcaaacaaacaggatttgccgaatgctatgaatgctgctgagatcacagacaagctgggcctgcactctctgcgccaccgcaattggtacattcaggccacctgtgccaccagcggggacgggctctatgaaggcttggactggctggccaatcagctcaaaaacaagaagtgagagccaggcagccctctctgactaccccacccactcctgaaacatacctgttgtctccttaccccaatttccccctttcttcctcatgaaatgt

SEQ ID NO: 10863 - protein, 180 aa, Rattus norvegicus
  ref <308>: DATABASE ACCESSION NUMBER: SWISS-Prot / P16587
  ref <309>: DATABASE ENTRY DATE: 2002-06-15
GNIFGNLLKSLIGKKEMRILMVGLDAAGKTTILYKLKLGEIVTTIPTIGFNVETVEYKNISFTVWDVGGQDKIRPLWRHYFQNTQGLIFVVDSNDRERVNEAREELMRMLAEDELRDAVLLVFANKQDLPNAMNAAEITDKLGLHSLRHRNWYIQATCATSGDGLYEGLDWLANQLKNKK

SEQ ID NO: 10864 - DNA, 1058 bp, Homo sapiens
  ref <308>: DATABASE ACCESSION NUMBER: EMBL / M33384
  ref <309>: DATABASE ENTRY DATE: 1999-07-02
gtgcagatcttggtggtaggttgaggccatctcctgggccgcctggcggccatcgtggctaaacaggtactgctgggccggaaggtggtggtcgtacgctgtgaaggcatcaacatttctggcaatttctacagaaacaagttgaagtacctggctttcctccgcaagccggtgcagatctgggtgctaggtggagggaaggaaggagggagccggggagtgggccagggcagcagccgggctgaagtcggcttggggagccagagggagcggagcggaacctgcggggcagaggcggcggccgcagcggcgcagctgatagcaggaacaggatcaagtcttccataccagggaccaggccaaaaccagactgccactgcccctacttgggccccactgtccccagaaagcagctgctgtgatcatgggcaatatctttggaaaccttctcaagagcctgattgggaagaaggagatgcgcatcctgatggtgggcctggatgccgcaggaaagaccaccatcctatacaagctgaaactgggggagatcgtcaccaccatccctaccattgggttcaatgtggagacagtggagtataagaacatcagctttacagtgtgggatgtgggtggccaggacaagattcgacccctctggagacactacttccagaacacccaagggttgatatttgtggtcgacagcaatgatcgggagcgagtaaatgaggcccgggaagagctgatgagaatgctggcggaggacgagctccgggatgctgtactccttgtctttgcaaacaaacaggatctgcctaatgctatgaacgctgctgagatcacagacaagctgggcctgcattcccttcgtcaccgtaactggtacattcaggccacctgtgccaccagcggggacgggctgtacgaaggcctggactggctggccaatcagctcaaaaacaagaagtgaaagccagacagccctaacaaagcaccccacccacccctgacatacctactgtcaccctgccccagtcctaccccttcctctccatgca

SEQ ID NO: 10865 - protein, 180 aa, Homo sapiens; identical to SEQ ID NO: 10863

SEQ ID NO: 10866 - DNA, 1058 bp, Rattus norvegicus; identical to SEQ ID NO: 2892
  ref <308>: DATABASE ACCESSION NUMBER: EMBL / L12384
  ref <309>: DATABASE ENTRY DATE: 2001-12-17

SEQ ID NO: 10867 - protein, 179 aa, Rattus norvegicus; identical to SEQ ID NO: 2893
  ref <308>: DATABASE ACCESSION NUMBER: SWISS-Prot / P26437
  ref <309>: DATABASE ENTRY DATE: 2002-06-15

SEQ ID NO: 10868 - DNA, 957 bp, Homo sapiens; identical to SEQ ID NO: 2894
  misc_feature (1)..(957): n=a, c, g or t
  ref <308>: DATABASE ACCESSION NUMBER: EMBL / BI837414
  ref <309>: DATABASE ENTRY DATE: 2001-10-08

SEQ ID NO: 10869 - protein, 179 aa, Homo sapiens; identical to SEQ ID NO: 2893

SEQ ID NO: 10870 - DNA, 1179 bp, Rattus norvegicus
  ref <308>: DATABASE ACCESSION NUMBER: EMBL / L14680
  ref <309>: DATABASE ENTRY DATE: 2000-03-04
cctcatgaaataaaaagctgaaaggaatttgaataaaaatttcctgcatctcatgccaagggggaaacaccagaatcaagtgttcgtcataactaaagacaccccttcatccaagaatgcaaagcacatccaataaaagcgctggatataacttcttttttctctctttcggccgtggggcgggagccgggacgcgaagtgctattggtacctgcagcttctttccccggaaggatggcgcaagccgggagaacagggtatgataaccgggagatcgtgatgaagtacatccattataagctgtcacagaggggctacgagtgggatactggagatgaagactccgcgcccctgagggctgcccccacccctggcatcttctccttccagcctgagagcaaccgaacgcccgctgtgcaccgagacacggctgccaggacgtcgcctctacggccccttgtcgccaacgctgggcctgcgctcagccctgtgccacctgtggtccacctgaccctccgccgggctggggatgacttctctcgtcgctaccgtcgcgactttgcagagatgtccagtcagctgcacctgacgcccttcaccgcgaggggacgctttgccacggtggtggaggaactcttcagggatggggtgaactgggggaggattgtggccttctttgagttcggtggggtcatgtgtgtggggagcgtcaacagggagatgtcacccctggtggacaacatcgctctgtggatgactgagtacctgaaccggcatctgcacacctggatccaggataacggaggctgggatgcctttgtggaactatatggccccagcatgcgacctctgtttgatttctcctggctgtctctgaagacgctgctcagcctggccctggtgggggcctgcatcactctgggtgcatacctgggccacaagtgaggtcagcagacctgccccaaacaaatatgaaaaggttcactaaagcagtagaaattaatatgcattatcaaggatggaccatgaaacaaagttgtgatttttttttaaagcagaacacacacacacacacacacacacacacacacacacacacacacacacacacattcaggcaaatggtcaaatcagctatttactgccaaagggaaatattatttattttttacattattt

SEQ ID NO: 10871 - protein, 237 aa, Rattus norvegicus
  misc_feature (1)..(237): Xaa=Unknown amino acid
MAQAGRTGYDNREIVMKYIHYKLSQRGYEWDTGDEDSAPLRAAPTPGIFSFQPESNRTPAVHRDTAARTSPLRPLVANAGPALSPVPPVVHLTLRRAGDDFSRRYRRDFAEMSSQLHLTPFTARGRFATVVEELFRDGVNWGRIVAFFEFGGVMCVGSVNREMSPLVDNIALWMTEYLNRHLHTWIQDNGGWDAFVELYGPSMRPLFDFSWLSLKTLLSLALVGACITLGAYLGHKX

SEQ ID NO: 10872 - DNA, 911 bp, Homo sapiens
  ref <308>: DATABASE ACCESSION NUMBER: EMBL / M13995
  ref <309>: DATABASE ENTRY DATE: 2000-03-04
tgattgaagacaccccctcgtccaagaatgcaaagcacatccaataaaatagctggattataactcctcttctttctctgggggccgtggggtgggagctggggcgagaggtgccgttggcccccgttgcttttcctctgggaaggatggcgcacgctgggagaacggggtacgacaaccgggagatagtgatgaagtacatccattataagctgtcgcagaggggctacgagtgggatgcgggagatgtgggcgccgcgcccccgggggccgcccccgcaccgggcatcttctcctcccagcccgggcacacgccccatccagccgcatcccgcgacccggtcgccaggacctcgccgctgcagaccccggctgcccccggcgccgccgcggggcctgcgctcagcccggtgccacctgtggtccacctggccctccgccaagccggcgacgacttctcccgccgctaccgcggcgacttcgccgagatgtccagccagctgcacctgacgcccttcaccgcgcggggacgctttgccacggtggtggaggagctcttcagggacggggtgaactgggggaggattgtggccttctttgagttcggtggggtcatgtgtgtggagagcgtcaaccgggagatgtcgcccctggtggacaacatcgccctgtggatgactgagtacctgaaccggcacctgcacacctggatccaggataacggaggctgggtaggtgcatctggtgatgtgagtctgggctgaggccacaggtccgagatcgggggttggagtgcgggtgggctcctgggcaatgggaggctgtggagccggcgaaataaaatcagagttgttgcttcccggcgtgtccctacctcctcctctggacaaagcgttcactcccaacctgac

SEQ ID NO: 10873 - protein, 239 aa, Homo sapiens
  ref <308>: DATABASE ACCESSION NUMBER: SWISS-Prot / P10415
  ref <309>: DATABASE ENTRY DATE: 2002-06-15
MAHAGRTGYDNREIVMKYIHYKLSQRGYEWDAGDVGAAPPGAAPAPGIFSSQPGHTPHPAASRDPVARTSPLQTPAAPGAAAGPALSPVPPVVHLTLRQAGDDFSRRYRRDFAEMSSQLHLTPFTARGRFATVVEELFRDGVNWGRIVAFFEFGGVMCVESVNREMSPLVDNIALWMTEYLNRHLHTWIQDNGGWDAFVELYGPSMRPLFDFSWLSLKTLLSLALVGACITLGAYLGHK

SEQ ID NO: 10874 - DNA, 1011 bp, Rattus norvegicus; identical to SEQ ID NO: 2964
  ref <308>: DATABASE ACCESSION NUMBER: EMBL / L17318
  ref <309>: DATABASE ENTRY DATE: 2000-03-04

SEQ ID NO: 10875 - protein, 296 aa, Rattus norvegicus; identical to SEQ ID NO: 2965
  misc_feature (1)..(296): Xaa=Unknown amino acid

SEQ ID NO: 10876 - protein, 1970 aa, Homo sapiens; identical to SEQ ID NO: 2966
  ref <308>: DATABASE ACCESSION NUMBER: SWISS-Prot / P24928
  ref <309>: DATABASE ENTRY DATE: 2001-10-16

SEQ ID NO: 10877 - DNA, 1062 bp, Rattus norvegicus; identical to SEQ ID NO: 2971
  ref <308>: DATABASE ACCESSION NUMBER: EMBL / L19112
  ref <309>: DATABASE ENTRY DATE: 2001-02-13

SEQ ID NO: 10878 - DNA, 1475 bp, Homo sapiens; identical to SEQ ID NO: 2972
  ref <308>: DATABASE ACCESSION NUMBER: EMBL / U11814
  ref <309>: DATABASE ENTRY DATE: 1999-07-02

SEQ ID NO: 10879 - protein, 821 aa, Homo sapiens; identical to SEQ ID NO: 2973
  ref <308>: DATABASE ACCESSION NUMBER: SWISS-Prot / P21802
  ref <309>: DATABASE ENTRY DATE: 2002-06-15

SEQ ID NO: 10880 - DNA, 1227 bp, Rattus norvegicus; identical to SEQ ID NO: 2994
  ref <308>: DATABASE ACCESSION NUMBER: Refseq / NM_031834
  ref <309>: DATABASE ENTRY DATE: 2002-01-10

SEQ ID NO: 10881 - protein, 291 aa, Rattus norvegicus; identical to SEQ ID NO: 2995
  ref <308>: DATABASE ACCESSION NUMBER: SWISS-Prot / P17988
  ref <309>: DATABASE ENTRY DATE: 2001-10-16

SEQ ID NO: 10882 - DNA, 1208 bp, Rattus norvegicus
  ref <308>: DATABASE ACCESSION NUMBER: EMBL / L21192
  ref <309>: DATABASE ENTRY DATE: 1993-11-23
gtagtatctaccgagtgatgacctgtcctttactccttgtgtttgctgaaccgcatcctagaataaaggcttttggcctaggaaattatattactggatattaatcatctcatcatcgtaattccttaggcaatgttttggaaagaagtaatgccttgtaccattgaacagatttcagagagcaaaacattcaccatcctctccctcctccatctcgttttctttttcagaagctgtagatgaagccaaacctaaggaaagtgcccgacaggatgagggtaaagaagaccccgaggctgaccaagaacatgcctgaactttaagaaacggctttccacgttgcccccacctgaaccctgtctctcctgccctttctcagatccactctgaagtttcctctcctgtcctgctcacgtgtgtgagcctgtcctctcctacctatgagccctctctctctgtgtggcaaacatttaaaaaaaaaaaagcaggaaagatcccaagtccaacagtgtggcttaaacatttgtttcttggtgttgttatggcgagtttttggtaatgatgatgcagtcatcttgggaaattcttgcactgtaccccggttttttgatctggtgcgtgtggccctgtgggagtccactttcctctctatttctctctgttccaagtgtgtgtgtgcaatgttccgttctgaggagtccaaaatattaagtgaattcaaaaaaccatttctgtttcctcattttcaatgtgatggaatgaacaaaaaggttaaaaaaatttaaaaaaaaaaaccggtttgttttaaaaataaataaataaagcaaatgtgccaattagcgtaacttaaggctgtgaggctcctttttcaatctgaatattaataaatcatgagagtaatcaactttggtgttctgtgttttctttccatatcccttggtctctttgttccgacacatcaggctcttctctttttcctgagctctttcgttagacaactctgggaaaggaagcacagaccctggctaagaccaatggctgccatcccagtgagatagttaggtaccacaatggctggggatgctatgacaaagaacacagtcggtgtggcttaagccaagacatcatctcacggtagtgaaaacgagaggtctgaaatcaggatatcggccttgtggattctttctgaggccaataaaaatatagtg

SEQ ID NO: 10883 - protein, 226 aa, Rattus norvegicus
  ref <308>: DATABASE ACCESSION NUMBER: PIR / A26964
  ref <309>: DATABASE ENTRY DATE: 2000-02-18
MLCCMRRTKQVEKNDEDQKIEQDGVKPEDKAHKAATKIQASFRGHITRKKLKDEKKGDAPAAEAEAKEKDDAPVADGVEKKEGDGSATTDAAPATSPKAEEPSKAGDAPSEEKKGEGDAAPSEEKAGSAETESAAKATTDNSPSSKAEDGPAKEEPKQADVPAAVTDAAATTPAAEDAAKAAQPPTETAESSQAEEEKEAVDEAKPKESARQDEGKEDPEADQEHA

SEQ ID NO: 10884 - DNA, 778 bp, Homo sapiens
  ref <308>: DATABASE ACCESSION NUMBER: EMBL / S66541
  ref <309>: DATABASE ENTRY DATE: 2000-03-04
ccccccatcctatcttgttttctttctcagaagctgtagatgaaaccaaacctaaggaaagtgcccggcaggacgagggtaaagaagaggaacctgaggctgaccaagaacatgcctgaactctaagaaatggctttccacatccccaccctcccctctcctgagcctgtctctccctaccctcttctcagctccactctgaagtcccttcctgtcctgctcacgtctgtgagtctgtcctttcccacccactagccctctttctctctgtgtggcaaacatttaaaaaaaaaaaaaaaaagcaggaaagatcccaagtcaaacagtgtggcttaaacattttttgtttcttggtgttgttatggcaagtttttggtaatgatgattcaatcattttgggaaattcttgcactgtatccaagttatttgatctggtgcgtgtggccctgtgggagtccactttcctctctctctctctctctgttccaagtgtgtgtgcaatgttccgttcatctgaggagtccaaaatatcgagtgaattcaaaatcatttttgttttcctccttttcaatgtgatggaatgaacaaaaaggaaaaaattcaaaaaacccagtttgttttaaaaataaataaataaagcaaatgtgccaattagcgtaaacttgcggctctaaggctcctttttcaacccgaatattaataaatcatgagagtaatcaaggtccaatggctctgtgtttctgttctaccttctcattagttggttggacatgctagg

SEQ ID NO: 10885 - DNA, 1124 bp, Rattus norvegicus; identical to SEQ ID NO: 3030
  ref <308>: DATABASE ACCESSION NUMBER: EMBL / L23148
  ref <309>: DATABASE ENTRY DATE: 2000-03-04

SEQ ID NO: 10886 - protein, 164 aa, Rattus norvegicus; identical to SEQ ID NO: 3031
  ref <308>: DATABASE ACCESSION NUMBER: SWISS-Prot / P41135
  ref <309>: DATABASE ENTRY DATE: 2001-10-16

SEQ ID NO: 10887 - DNA, 497 bp, Homo sapiens; identical to SEQ ID NO: 3032
  ref <308>: DATABASE ACCESSION NUMBER: EMBL / AA689598
  ref <309>: DATABASE ENTRY DATE: 2000-03-03

SEQ ID NO: 10888 - DNA, 2393 bp, Rattus norvegicus
  ref <308>: DATABASE ACCESSION NUMBER: EMBL / AF390546
  ref <309>: DATABASE ENTRY DATE: 2002-06-05
atcttcgttgacttcggggtttgggtacccctctctcttcttcggactccggaggaccttctgggcccccacattaatgaggcagccacctggcgagtctgacatggctgtcagcgacgctctgctcccgtccttctccacgttcgcgtccggcccggcgggaagggagaagacactgcgtccagcaggtgccccgactaaccgttggcgagaggaactctctcacatgaagcgacttcccccacttcccggccgcccctacgacctggcggcgacggtggccacagacctggaaagtggtggagctggtgcagcttgcagcagtaacaacccggccctaccccggagggagaccgaggagttcaacgatctcctggacctagactttatcctttccaactcgctatcccaccaggaatcggtggccgccaccgtgaccacctcggcgtcagcttcatcctcgtcttccccagctagcagcggccctgccagcgcgccctccacctgcagcttcagctatccgatccgggccgggggtgacccgggcgtggctgcgggcaacacaggtggagggctcctctacagccgagaatctgcgccacctcccacggcccccttcaacctggcggacatcaatgacgtgagcccctcgggcggcttcgtggctgagctcctgcggccggagttggacccagtatacattccgccacagcagcctcagccgccaggtggcgggctgatgggcaagtttgtgctgaaggcgtctctgagcacccctggcagcgagtacaccagcccttcggtcatcagtgttagcaaaggaagcccagacggcagccaccctgtggtagtggcgccctacagcggtggcccgccgcgtatgtgccccaagattaagcaagaggccgtcccgtcctgcacggtcagccggtccctagaggcccacttgagcgctggaccccagctcagcaacggccacaggcccaacacacacgacttccccctggggcggcagctccccaccaggactacccctacactgagtcccgaggaactgctgaacagcagggactgtcaccctggcctgcctcttcccccaggattccatccccatccggggcccagctaccctcctttcctgccagaccagatgcagtcgcaagtcccctctctccattatcaagagctcatgccaccgggatcctgcctgccagaggagcccaagccaaagaggggaagaaggtcttggccccggaaaagaacagccacccacacttgtgactatgcaggctgtggcaaaacctatacgaagagttctcatctcaaggcacacctgcgaactcacacaggcgagaaaccttaccactgtgactgggacggctgtgggtggaaattcgcccgctcagatgaactgaccaggcactaccgcaaacacaccgggcaccggccctttcagtgccagaagtgcgacagggccttttccaggtcggaccaccttgccttacacatgaagaggcacttttaaattccacatcgtggacatgacccacactgccaggagagagttcagtatttttttttaacctttcacactgtcttcccacgaggggaggagcccagctggcaagcgctacaatcatggtcaagttcccagcaagtcagcttgtgaatggataatcaggagaaaggaagagtccaagggacaaaagaaaagaaaagaaaaaaatactaaaaaacaaacaaacaaaaaaaaaaaacaaaagaaaaaaatcacagaacagatggggtctgagactggatcttctatcattccaataccaaatccgacttgaacaagactggacttacaaaatgccaaggggtgactggaagtttgtggatatcagggtatacattaaatcagtgacctggggggagggaagaccagagttcccttgaattgtgcttcaatgatgcaatatacatggaaagaccaccttgtatgctctttgccttctaaaaagccattatgacgtcagaggaagaggaagcaattcaggtacagaacgtgttctaatagcctaaacgatggtgcttggtgagtcgtggttctaaaggtaccaaacgggggagccaaagttctccaactgctgcatactttgacaaggaaaatctatttttgtcttccgatctacatttatgacctaagtcaggtaaataagcctggtttatttctgtaacattttttatgcagacagtctgttatgcactgtggtttcagatgtgcaataatttgtacaatggtttattcccaagtatgcctttaagcagaacaaatgtgtttttctatatagttccttgccttaataaatatgtaatataaatttaaaaaaaaaaaaaaaaaaaaaaaaaaa

SEQ ID NO: 10889 - protein, 482 aa, Rattus norvegicus
  ref <308>: DATABASE ACCESSION NUMBER: SWISS-Prot / AAK73355
  ref <309>: DATABASE ENTRY DATE: 2003-02-01
MRQPPGESDMAVSDALLPSFSTFASGPAGREKTLRPAGAPTNRWREELSHMKRLPPLPGRPYDLAATVATDLESGGAGAACSSNNPALPRRETEEFNDLLDLDFILSNSLSHQESVAATVTTSASASSSSSPASSGPASAPSTCSFSYPIRAGGDPGVAAGNTGGGLLYSRESAPPPTAPFNLADINDVSPSGGFVAELLRPELDPVYIPPQQPQPPGGGLMGKFVLKASLSTPGSEYTSPSVISVSKGSPDGSHPVVVAPYSGGPPRMCPKIKQEAVPSCTVSRSLEAHLSAGPQLSNGHRPNTHDFPLGRQLPTRTTPTLSPEELLNSRDCHPGLPLPPGFHPHPGPSYPPFLPDQMQSQVPSLHYQELMPPGSCLPEEPKPKRGRRSWPRKRTATHTCDYAGCGKTYTKSSHLKAHLRTHTGEKPYHCDWDGCGWKFARSDELTRHYRKHTGHRPFQCQKCDRAFSRSDHLALHMKRHF

SEQ ID NO: 10890 - DNA, 2639 bp, Homo sapiens
  ref <308>: DATABASE ACCESSION NUMBER: EMBL / AF105036
  ref <309>: DATABASE ENTRY DATE: 2000-03-03
tcgaggcgaccgcgacagtggtgggggacgctgctgagtggaagagagcgcagcccggccaccggacctacttactcgccttgctgattgtctatttttgcgtttacaacttttctaagaacttttgtatacaaaggaactttttaaaaaagacgcttccaagttatatttaatccaaagaagaaggatctcggccaatttggggttttgggttttggcttcgtttcttctcttcgttgactttggggttcaggtgccccagctgcttcgggctgccgaggaccttctgggcccccacattaatgaggcagccacctggcgagtctgacatggctgtcagcgacgcgctgctcccatctttctccacgttcgcgtctggcccggcgggaagggagaagacactgcgtcaagcaggtgccccgaataaccgctggcgggaggagctctcccacatgaagcgacttcccccagtgcttcccggccgcccctatgacctggcggcggcgaccgtggccacagacctggagagcggcggagccggtgcggcttgcggcggtagcaacctggcgcccctacctcggagagagaccgaggagttcaacgatctcctggacctggactttattctctccaattcgctgacccatcctccggagtcagtggccgccaccgtgtcctcgtcagcgtcagcctcctcttcgtcgtcgccgtcgagcagcggccctgccagcgcgccctccacctgcagcttcacctatccgatccgggccgggaacgacccgggcgtggcgccgggcggcacgggcggaggcctcctctatggcagggagtccgctccccctccgacggctcccttcaacctggcggacatcaacgacgtgagcccctcgggcggcttcgtggccgagctcctgcggccagaattggacccggtgtacattccgccgcagcagccgcagccgccaggtggcgggctgatgggcaagttcgtgctgaaggcgtcgctgagcgcccctggcagcgagtacggcagcccgtcggtcatcagcgtcagcaaaggcagccctgacggcagccacccggtggtggtggcgccctacaacggcgggccgccgcgcacgtgccccaagatcaagcaggaggcggtctcttcgtgcacccacttgggcgctggaccccctctcagcaatggccaccggccggctgcacacgacttccccctggggcggcagctccccagcaggactaccccgaccctgggtcttgaggaagtgctgagcagcagggactgtcaccctgccctgccgcttcctcccggcttccatccccacccggggcccaattacccatccttcctgcccgatcagatgcagccgcaagtcccgccgctccattaccaagagctcatgccacccggttcctgcatgccagaggagcccaagccaaagaggggaagacgatcgtggccccggaaaaggaccgccacccacacttgtgattacgcgggctgcggcaaaacctacacaaagagttcccatctcaaggcacacctgcgaacccacacaggtgagaaaccttaccactgtgactgggacggctgtggatggaaattcgcccgctcagatgaactgaccaggcactaccgtaaacacacggggcaccgcccgttccagtgccaaaaatgcgaccgagcattttccaggtcggaccacctcgccttacacatgaagaggcatttttaaatcccagacagtggatatgacccacactgccagaagagaattcagtattttttacttttcacactgtcttcccgatgagggaaggagcccagccagaaagcactacaatcatggtcaagttcccaactgagtcatcttgtgagtggataatcaggaaaaatgaggaatccaaaagacaaaaatcaaagaacagatggggtctgtgactggatcttctatcattccaattctaaatccgacttgaatattcctggacttacaaaatgccaagggggtgactggaagttgtggatatcagggtataaattatatccgtgagttgggggagggaagaccagaattcccttgaattgtgtattgatgcaatataagcataaaagatcaccttgtattctctttaccttctaaaagccattattatgatgttagaagaagaggaagaaattcaggtacagaaaacatgtttaaatagcctaaatgatggtgcttggtgagtcttggttctaaaggtaccaaacaaggaagccaaagttttcaaactgctgcatactttgacaaggaaaatctatatttgtcttccgatcaacatttatgacctaagtcaggtaatatacctggtttacttctttagcatttttatgcagacagtctgttatgcactgtggtttcagatgtgcaataatttgtacaatggtttattcccaagtatgccttaagcagaacaaatgtgtttttctatatagttccttgccttaataaatatgtaatataaatttaagcaaacgtctattttgtatatttgtaaactacaaagtaaaatgaacattttgtggagtttgtattttgcatactcaaggtgagaattaagttttaaataaacctataatattttatctg

SEQ ID NO: 10891 - protein, 470 aa, Homo sapiens
  ref <308>: DATABASE ACCESSION NUMBER: SWISS-Prot / O43474
  ref <309>: DATABASE ENTRY DATE: 2002-06-15
MAVSDALLPSFSTFASGPAGREKTLRQAGAPNNRWREELSHMKRLPPVLPGRPYDLAAATVATDLESGGAGAACGGSNLAPLPRRETEEFNDLLDLDFILSNSLTHPPESVAATVSSSASASSSSSPSSSGPASAPSTCSFTYPIRAGNDPGVAPGGTGGGLLYGRESAPPPTAPFNLADINDVSPSGGFVAELLRPELDPVYIPPQQPQPPGGGLMGKFVLKASLSAPGSEYGSPSVISVSKGSPDGSHPVVVAPYNGGPPRTCPKIKQEAVSSCTHLGAGPPLSNGHRPAAHDFPLGRQLPSRTTPTLGLEEVLSSRDCHPALPLPPGFHPHPGPNYPSFLPDQMQPQVPPLHYQELMPPGSCMPEEPKPKRGRRSWPRKRTATHTCDYAGCGKTYTKSSHLKAHLRTHTGEKPYHCDWDGCGWKFARSDELTRHYRKHTGHRPFQCQKCDRAFSRSDHLALHMKRHF

SEQ ID NO: 10892 - DNA, 2638 bp, Rattus norvegicus; identical to SEQ ID NO: 3141
  ref <308>: DATABASE ACCESSION NUMBER: Refseq / NM_031579
  ref <309>: DATABASE ENTRY DATE: 2002-11-05

SEQ ID NO: 10893 - protein, 173 aa, Rattus norvegicus; identical to SEQ ID NO: 3142
  ref <308>: DATABASE ACCESSION NUMBER: Refseq / NP_113767
  ref <309>: DATABASE ENTRY DATE: 2002-11-05

SEQ ID NO: 10894 - DNA, 2200 bp, Homo sapiens; identical to SEQ ID NO: 3143
  ref <308>: DATABASE ACCESSION NUMBER: EMBL / U48296
  ref <309>: DATABASE ENTRY DATE: 1999-08-02

SEQ ID NO: 10895 - protein, 174 aa, Homo sapiens; identical to SEQ ID NO: 3144
  misc_feature (1)..(174): Xaa=Unknown amino acid

SEQ ID NO: 10896 - DNA, 3808 bp, Rattus norvegicus; identical to SEQ ID NO: 3161
  ref <308>: DATABASE ACCESSION NUMBER: EMBL / L29281
  ref <309>: DATABASE ENTRY DATE: 2000-03-04

SEQ ID NO: 10897 - protein, 514 aa, Rattus norvegicus; identical to SEQ ID NO: 3162
  misc_feature (1)..(514): Xaa=Unknown amino acid

SEQ ID NO: 10898 - DNA, 2562 bp, Homo sapiens; identical to SEQ ID NO: 3163
  ref <308>: DATABASE ACCESSION NUMBER: EMBL / M35663
  ref <309>: DATABASE ENTRY DATE: 2000-03-04

SEQ ID NO: 10899 - protein, 551 aa, Homo sapiens; identical to SEQ ID NO: 3164
  ref <308>: DATABASE ACCESSION NUMBER: SWISS-Prot / P19525
  ref <309>: DATABASE ENTRY DATE: 2002-06-15

SEQ ID NO: 10900 - DNA, 471 bp, Rattus norvegicus; identical to SEQ ID NO: 3165
  ref <308>: DATABASE ACCESSION NUMBER: EMBL / L29573
  ref <309>: DATABASE ENTRY DATE: 2000-03-04

SEQ ID NO: 10901 - DNA, 1983 bp, Homo sapiens; identical to SEQ ID NO: 3166
  ref <308>: DATABASE ACCESSION NUMBER: EMBL / M65105
  ref <309>: DATABASE ENTRY DATE: 2000-03-04

SEQ ID NO: 10902 - protein, 617 aa, Homo sapiens [sequence omitted]

SEQ ID NO: 10903 - DNA, 711 bp, Rattus norvegicus; identical to SEQ ID NO: 3180
  ref <308>: DATABASE ACCESSION NUMBER: EMBL / L32591
  ref <309>: DATABASE ENTRY DATE: 2000-03-04

SEQ ID NO: 10904 - protein, 165 aa, Rattus norvegicus; identical to SEQ ID NO: 3181
  ref <308>: DATABASE ACCESSION NUMBER: SWISS-Prot / P48317
  ref <309>: DATABASE ENTRY DATE: 2001-10-16

SEQ ID NO: 10905 - DNA, 1343 bp, Homo sapiens; identical to SEQ ID NO: 3182
  ref <308>: DATABASE ACCESSION NUMBER: EMBL / M60974
  ref <309>: DATABASE ENTRY DATE: 1999-07-02

SEQ ID NO: 10906 - protein, 165 aa, Homo sapiens; identical to SEQ ID NO: 3183
  ref <308>: DATABASE ACCESSION NUMBER: SWISS-Prot / P24522
  ref <309>: DATABASE ENTRY DATE: 2002-06-15

SEQ ID NO: 10907 - DNA, 1731 bp, Rattus norvegicus; identical to SEQ ID NO: 3204
  ref <308>: DATABASE ACCESSION NUMBER: EMBL / L34821
  ref <309>: DATABASE ENTRY DATE: 2000-03-04

SEQ ID NO: 10908 - protein, 488 aa, Rattus norvegicus; identical to SEQ ID NO: 3205
  ref <308>: DATABASE ACCESSION NUMBER: SWISS-Prot / P51650
  ref <309>: DATABASE ENTRY DATE: 2002-06-15

SEQ ID NO: 10909 - DNA, 1071 bp, Homo sapiens; identical to SEQ ID NO: 3206
  ref <308>: DATABASE ACCESSION NUMBER: EMBL / L34820
  ref <309>: DATABASE ENTRY DATE: 2000-03-04

SEQ ID NO: 10910 - protein, 535 aa, Homo sapiens; identical to SEQ ID NO: 3207
  ref <308>: DATABASE ACCESSION NUMBER: SWISS-Prot / P51649
  ref <309>: DATABASE ENTRY DATE: 2002-06-15

SEQ ID NO: 10911 - DNA, 2472 bp, Rattus norvegicus; identical to SEQ ID NO: 3306
  ref <308>: DATABASE ACCESSION NUMBER: EMBL / M13962
  ref <309>: DATABASE ENTRY DATE: 2000-03-04

SEQ ID NO: 10912 - protein, 648 aa, Rattus norvegicus; identical to SEQ ID NO: 3307
  ref <308>: DATABASE ACCESSION NUMBER: SWISS-Prot / P06760
  ref <309>: DATABASE ENTRY DATE: 2001-10-16

SEQ ID NO: 10913 - DNA, 873 bp, Homo sapiens; identical to SEQ ID NO: 3308
  ref <308>: DATABASE ACCESSION NUMBER: EMBL / BM019597
  ref <309>: DATABASE ENTRY DATE: 2001-10-31

SEQ ID NO: 10914 - protein, 651 aa, Homo sapiens; identical to SEQ ID NO: 3309
  ref <308>: DATABASE ACCESSION NUMBER: SWISS-Prot / P08236
  ref <309>: DATABASE ENTRY DATE: 2002-06-15

SEQ ID NO: 10915 - DNA, 1138 bp, Rattus norvegicus
  ref <308>: DATABASE ACCESSION NUMBER: EMBL / Y00480
  ref <309>: DATABASE ENTRY DATE: 1995-03-23
aagaaaatggccacaattggagacctggtaataagattttttttcatggctgtcctaatgagcccccagaagtcgtgggctatcaaagaggagcacaccatcatccaggcggagttctatctttcccccgaccaaaatggagagttcatgtttgactttgacggcgacgagattttccatgtagatattaaaaagtcagagaccatttggagacttgaagaatttgcaaagtttgccagctttgaggctcagggtgcattggctaatatagctgtggacaaagctaacctggacatcatgataaagcgctccaacaacaccccagatgccaatgtgattccagaggtgactgtactccccaaaagcccggtgaacctgggagagcccaacatcctcatctgtttcattgacaagttctcccctccagcggtcaatgtcacctggcttcggaacggacagcctgtcaccaaaggcgtgtcagagacagtgtttctcccaagggaggaccacctcttccgcaaattccactatctcaccttcctgccctccgtggaagattactatgactgtgaggtggatcactggggtctggaggagcctctgcggaagcactgggagtttgaagagaaaaccctcctcccagaaactaaagagaatgtcctgtgtgttctcgggttgtttgtgggtctggtaggcatcgtcgtcgggattgtgctcatcatcaagggccttcggaaacgcaacgcagtggaaggccgccaaggagccctgtgagataccgggaggtgatggcttccgtgagagctcatagaagaaatgtgctgtgacagcatctgaggctaccccttctctcagctcttcacctcagcagagacatcttctgcagtttccaacctcaagcctcgcgccagattctctggtctaatgtctggctggggttctccgtctgcttcctgtatctatattctattttccatcatttatagtaattcctctgtggcacatatcacagagctcttcctccgctgcggaactttctaagaatggaggcatcttctgttcacttacggcttgacatttctccaaactgtgttttctctttctctttttcaataaataataaacaccttgggtcctg

SEQ ID NO: 10916 - protein, 255 aa, Rattus norvegicus; identical to SEQ ID NO: 3337
  ref <308>: DATABASE ACCESSION NUMBER: SWISS-Prot / CAA68540
  ref <309>: DATABASE ENTRY DATE: 2003-02-01

SEQ ID NO: 10917 - DNA, 1237 bp, Homo sapiens; identical to SEQ ID NO: 3338
  ref <308>: DATABASE ACCESSION NUMBER: Refseq / NM_019111
  ref <309>: DATABASE ENTRY DATE: 2002-02-08

SEQ ID NO: 10918 - protein, 254 aa, Homo sapiens; identical to SEQ ID NO: 3335
  ref <308>: DATABASE ACCESSION NUMBER: SWISS-Prot / P01903
  ref <309>: DATABASE ENTRY DATE: 2002-06-15

SEQ ID NO: 10919 - DNA, 539 bp, Rattus norvegicus
  ref <308>: DATABASE ACCESSION NUMBER: EMBL / M15880
  ref <309>: DATABASE ENTRY DATE: 2000-03-04
caagctcattcctcgcagaggcgcccagagcagagcacccgctgcgcagagaccacagcccgcccgccatgatgctaggtaacaaacgaatggggctgtgtggactgaccctcgctctatccctgctcgtgtgtttgggcattctggctgaggggtacccctccaagccggacaatccgggcgaggacgcgccagcagaggacatggccagatactactccgctctgcgacactacatcaatctcatcaccagacagagatatggcaagagatccagccctgagacactgatttcagatctcttaatgagagaaagcacagaaaatgcccccagaacaaggcttgaagacccttccatgtggtgatgggaaatgaaacttgctctcctgacttttcctagtttccccccacatctcatctcatcctgtgaaaccagtctgcctgtcccacccaatgcatgccaccaccaggctggattccgacccatttcccttgttgtcgttgtatatatgtgtgtttaaataaagtatcatgcattc

SEQ ID NO: 10920 - protein, 98 aa, Rattus norvegicus
  ref <308>: DATABASE ACCESSION NUMBER: SWISS-Prot / P07808
  ref <309>: DATABASE ENTRY DATE: 2001-10-16
MMLGNKRMGLCGLTLALSLLVCLGILAEGYPSKPDNPGEDAPAEDMARYYSALRHYINLITRQRYGKRSSPETLISDLLMRESTENAPRTRLEDPSMW

SEQ ID NO: 10921 - DNA, 551 bp, Homo sapiens
  ref <308>: DATABASE ACCESSION NUMBER: EMBL / K01911
  ref <309>: DATABASE ENTRY DATE: 2000-03-04
accccatccgctggctctcacccctcggagacgctcgcccgacagcatagtacttgccgcccagccacgcccgcgcgccagccaccatgctaggtaacaagcgactggggctgtccggactgaccctcgccctgtccctgctcgtgtgcctgggtgcgctggccgaggcgtacccctccaagccggacaacccgggcgaggacgcaccagcggaggacatggccagatactactcggcgctgcgacactacatcaacctcatcaccaggcagagatatggaaaacgatccagcccagagacactgatttcagacctcttgatgagagaaagcacagaaaatgttcccagaactcggcttgaagaccctgcaatgtggtgatgggaaatgagacttgctctctggccttttcctattttcagcccatatttcatcgtgtaaaacgagaatccacccatcctaccaatgcatgcagccactgtgctgaattctgcaatgttttcctttgtcatcattgtatatatgtgtgtttaaataaagtatcatgcattc

SEQ ID NO: 10922 - protein, 97 aa, Homo sapiens
  ref <308>: DATABASE ACCESSION NUMBER: SWISS-Prot / P01303
  ref <309>: DATABASE ENTRY DATE: 2002-06-15
MLGNKRLGLSGLTLALSLLVCLGALAEAYPSKPDNPGEDAPAEDMARYYSALRHYINLITRQRYGKRSSPETLISDLLMRESTENVPRTRLEDPAMW

SEQ ID NO: 10923 - DNA, 3243 bp, Rattus norvegicus; identical to SEQ ID NO: 3360
  ref <308>: DATABASE ACCESSION NUMBER: EMBL / M15944
  ref <309>: DATABASE ENTRY DATE: 2000-03-04

SEQ ID NO: 10924 - protein, 749 aa, Rattus norvegicus; identical to SEQ ID NO: 3361
  ref <308>: DATABASE ACCESSION NUMBER: SWISS-Prot / P07861
  ref <309>: DATABASE ENTRY DATE: 2002-06-15

SEQ ID NO: 10925 - DNA, 3181 bp, Homo sapiens; identical to SEQ ID NO: 3362
  ref <308>: DATABASE ACCESSION NUMBER: EMBL / X07166
  ref <309>: DATABASE ENTRY DATE: 1993-09-12

SEQ ID NO: 10926 - protein, 749 aa, Homo sapiens; identical to SEQ ID NO: 3363
  ref <308>: DATABASE ACCESSION NUMBER: SWISS-Prot / P08473
  ref <309>: DATABASE ENTRY DATE: 2002-06-15

SEQ ID NO: 10927 - DNA, 31737 bp, Rattus norvegicus; identical to SEQ ID NO: 3412
  misc_feature (1)..(31737): n=a, c, g or t
  ref <308>: DATABASE ACCESSION NUMBER: EMBL / M19359
  ref <309>: DATABASE ENTRY DATE: 2000-03-04

SEQ ID NO: 10928 - protein, 173 aa, Rattus norvegicus; identical to SEQ ID NO: 3413
  ref <308>: DATABASE ACCESSION NUMBER: SWISS-Prot / P10065
  ref <309>: DATABASE ENTRY DATE: 1991-08-01

SEQ ID NO: 10929 - DNA, 465 bp, Homo sapiens; identical to SEQ ID NO: 3414
  ref <308>: DATABASE ACCESSION NUMBER: EMBL / M17315
  ref <309>: DATABASE ENTRY DATE: 1999-07-02

SEQ ID NO: 10930 - protein, 173 aa, Homo sapiens; identical to SEQ ID NO: 3415
  ref <308>: DATABASE ACCESSION NUMBER: SWISS-Prot / P11844
  ref <309>: DATABASE ENTRY DATE: 1997-11-01

SEQ ID NO: 10931 - DNA, 771 bp, Rattus norvegicus
  ref <308>: DATABASE ACCESSION NUMBER: EMBL / M22756
  ref <309>: DATABASE ENTRY DATE: 2000-03-04
gccagggcgtccggcctcaccgctcagtggggaagacatgcaaggaatttgcataagacagcagtgcaaaatggtgctggaggagccttatttgtgcatagagatactcctgagaataacccagatactccatttgatttcacaccagaaaactacgagaggatagaggcaatagtcagaaactacccggaagggcacagagcagcagctgtgcttccagtgctggacctggcccaaaggcagaatgggtggctgcctatctctgccatgaacaaggtggcagaagttttacaagtgcctccaatgagagtctatgaagtggcgactttttacacaatgtacaatcgaaagccagttgggaagtaccacattcaggtctgcactactacaccttgcatgcttcgagactctgacagcatcctggagacccttcagagaaagctgggaataaaagttggagagactacgcctgacaagcttttcactcttatagaagtagaatgtttaggggcctgtgtaaacgcaccgatggttcaaataaacgacgactactacgaggatctgacacccaaggatattgaagagattattgatgaactcagagctgggaaagttccaaaaccagggccaaggagtggccgcttctgttgtgagccagccggaggccttacttctttgactgaaccacccaaaggacctggctttggtgtgccagcaggcctttaacttacattcaactgtaaaaatgtcactggagaaataaaatatgaa

SEQ ID NO: 10932 - protein, 241 aa, Rattus norvegicus
  ref <308>: DATABASE ACCESSION NUMBER: SWISS-Prot / P19234
  ref <309>: DATABASE ENTRY DATE: 2002-06-15
ARASGLTAQWGRHARNLHKTAVQNGAGGALFVHRDTPENNPDTPFDFTPENYERIEAIVRNYPEGHRAAAVLPVLDLAQRQNGWLPISAMNKVAEVLQVPPMRVYEVATFYTMYNRKPVGKYHIQVCTTTPCMLRDSDSILETLQRKLGIKVGETTPDKLFTLIEVECLGACVNAPMVQINDDYYEDLTPKDIEEIIDELRAGKVPKPGPRSGRFCCEPAGGLTSLTEPPKGPGFGVPAGL

SEQ ID NO: 10933 - DNA, 827 bp, Homo sapiens
  ref <308>: DATABASE ACCESSION NUMBER: EMBL / M22538
  ref <309>: DATABASE ENTRY DATE: 1999-07-02
ggaacagtgtggcccgccatgttcttctccgcggcgctccgggcccgggcggctggcctcaccgcccactggggaagacatgtaaggaatttgcataagacagctatgcaaaatggagctggaggagctttatttgtgcacagagatactcctgagaataaccctgatactccatttgatttcacaccagaaaactataagaggatagaggcaattgtaaaaaactatccagaaggccataaagcagcagctgttcttccagtcctggatttagcccaaaggcagaatgggtggttgcccatctctgctatgaacaaggttgcagaagttttacaagtacctccaatgagagtatatgaagtagcaactttttatacaatgtataatcgaaagccagttggaaagtatcacattcaggtctgcactactacaccctgcatgcttcgaaactctgacagcatactggaggccattcagaaaaagcttggaataaaggttggggagactacacctgacaaacttttcactcttatagaagtggaatgtttaggggcctgtgtgaacgcaccaatggttcaaataaatgacaattactatgaggatttgacagctaaggatattgaagaaattattgatgagctcaaggctggcaaaatcccaaaaccagggccaaggagtggacgcttctcttgtgagccagctggaggtcttacctctttgactgaaccacccaagggacctggatttggtgtacaagcaggcctttaatttatattgaactgtaaatatgtcactagagaaataaaatatggacttccaatctacgt

SEQ ID NO: 10934 - protein, 249 aa, Homo sapiens
  ref <308>: DATABASE ACCESSION NUMBER: SWISS-Prot / P19404
  ref <309>: DATABASE ENTRY DATE: 2002-06-15
MFFSAALRARAAGLTAHWGRHVRNLHKTVMQNGAGGALFVHRDTPENNPDTPFDFTPENYKRIEAIVKNYPEGHKAAAVLPVLDLAQRQNGWLPISAMNKVAEVLQVPPMRVYEVATFYTMYNRKPVGKYHIQVCTTTPCMLRNSDSILEAIQKKLGIKVGETTPDKLFTLIEVECLGACVNAPMVQINDNYYEDLTAKDIEEIIDELKAGKIPKPGPRSGRFSCEPAGGLTSLTEPPKGPGFGVQAGL

SEQ ID NO: 10935 - DNA, 250 bp, Rattus norvegicus; identical to SEQ ID NO: 3446
  ref <308>: DATABASE ACCESSION NUMBER: EMBL / M23566
  ref <309>: DATABASE ENTRY DATE: 2000-03-04

SEQ ID NO: 10936 - protein, 1472 aa, Rattus norvegicus; identical to SEQ ID NO: 3447
  ref <308>: DATABASE ACCESSION NUMBER: PIR / A26122
  ref <309>: DATABASE ENTRY DATE: 2000-12-31

SEQ ID NO: 10937 - protein, 1474 aa, Homo sapiens; identical to SEQ ID NO: 3448
  ref <308>: DATABASE ACCESSION NUMBER: SWISS-Prot / MAHU
  ref <309>: DATABASE ENTRY DATE: 2002-06-15

SEQ ID NO: 10938 - DNA, 256 bp, Rattus norvegicus; identical to SEQ ID NO: 3449
  ref <308>: DATABASE ACCESSION NUMBER: EMBL / M23643
  ref <309>: DATABASE ENTRY DATE: 2000-03-08

SEQ ID NO: 10939 - protein, 255 aa, Rattus norvegicus; identical to SEQ ID NO: 3450
  ref <308>: DATABASE ACCESSION NUMBER: SWISS-Prot / RHRTT
  ref <309>: DATABASE ENTRY DATE: 2001-10-16

SEQ ID NO: 10940 - DNA, 1359 bp, Homo sapiens; identical to SEQ ID NO: 3451
  ref <308>: DATABASE ACCESSION NUMBER: EMBL / M63582
  ref <309>: DATABASE ENTRY DATE: 1999-07-02

SEQ ID NO: 10941 - protein, 242 aa, Homo sapiens; identical to SEQ ID NO: 3452
  ref <308>: DATABASE ACCESSION NUMBER: SWISS-Prot / P20396
  ref <309>: DATABASE ENTRY DATE: 2001-10-16

SEQ ID NO: 10942 - DNA, 635 bp, Rattus norvegicus
  ref <308>: DATABASE ACCESSION NUMBER: EMBL / M24026
  ref <309>: DATABASE ENTRY DATE: 2000-03-04
aatgtcatttatgttgtccttggagccatctctgctgtggccatcattggagctgtgatcattggaggtgtgttggctgttgtgaggaagagaaacacaggtgggaaaggagactacacccctgctccagatagggacagctgccagagctctaatgtgtctctcccagattgtaaagcatgaagacagctgcctggagtggactgagtgacagacgatgtgttcaggtctctcctgtgacatccagagccctcagttctctttagacaccagtgtctgaagttccctgtgattctatggcttcagtgtgaaggactgtggagcccagcctgccctgcacacctggaccctgtccctgaactgcctgtcttcccttccacagccaaccttgctggtccagcctggggttgggggctggggacagctgcatcctgttactctgtgctgccctgagctgcagctcctcacttctacactgagaataagaatctgagtgtgaaattgactgttcacatccttgacacagtgttgattgctttttaaattactagattgagaatacttagaggttgttttttgtttttatttttgttttgttttgttttaaataaatggcaggcggagaaccttccaga

SEQ ID NO: 10943 - protein, 319 aa, Rattus norvegicus; identical to SEQ ID NO: 3253
  ref <308>: DATABASE ACCESSION NUMBER: SWISS-Prot / P15978
  ref <309>: DATABASE ENTRY DATE: 1999-07-15

SEQ ID NO: 10944 - DNA, 413 bp, Homo sapiens
  ref <308>: DATABASE ACCESSION NUMBER: EMBL / U14756
  ref <309>: DATABASE ENTRY DATE: 1999-06-30
ggttcgacagcgacgccgcgagtccgaggacggagccccgggcgccatggatagagcaggaggggccggagtattgggaccggaacacacagatcttcaagaccaacacacagacttaccgagagagcctgcggaacctgcgcggctactacaaccagagcgaggccgggtctcacaccctccagaggatgtacggctgcgacgtggggccggacgggcgcctcctccgcgggcatgaccagtccgcctacgacggcaaggattacatcgccctgaacgaggacctgagctcctggaccgcggcggacacggcggctcagatcacccagcgcaagtgggaggcggcccgtgaggcggagcagtggagagcctacctggagggcctgtgcgtggagtggctccgcagatacctg

SEQ ID NO: 10945 - DNA, 1638 bp, Rattus norvegicus
  ref <308>: DATABASE ACCESSION NUMBER: EMBL / M25758
  ref <309>: DATABASE ENTRY DATE: 2000-03-04
gcgggaggtggcgaggccagggcagggtggcagaagcccgcgcggcgaccgcagcgagagcagcggggacagagcagaccacaacgaaggcgcacaggcagcggggccgggccgggccaccgggagagcggccaccgggaagcgggcgggaggccgggctggcagctggcagccgccgagccgcgaagcgacatggtgctgctcaaggaatatcgggtcatcctgcctgtgtctgtagatgagtatcaagtggggcagctgtactctgtggctgaagccagtaaaaatgaaactggtggtggggaaggtgtggaggtcctggtgaacgagccctacgagaaggatgatggcgagaaaggccagtacacacacaagatctaccacttacagagcaaagttcccacgtttgttcgaatgctggccccagaaggcgccctgaatatacatgagaaagcctggaatgcctacccttactgcagaaccgttattacaaatgagtacatgaaggaagactttctcattaaaattgaaacctggcacaagccagaccttggcacccaggagaatgtgcataaactggagcctgaggcatggaaacatgtggaagctatatatatagacatcgctgatcgaagccaagtacttagcaaggattacaaggcagaggaagacccagcaaaatttaaatctatcaaaacaggacgaggaccattgggcccgaattggaagcaagaacttgtcaatcagaaggactgcccatatatgtgtgcatacaaactggttactgtcaagttcaagtggtggggcttgcagaacaaagtggaaaactttatacataagcaagagaagcgtctgtttacaaactttcacaggcagctgttctgttggcttgataaatgggttgatctgactatggatgacattcggaggatggaagaagagacgaagagacagctggatgagatgagacaaaaggaccccgtgaaaggaatgacagcagatgactagcgctaccgccctttctgcactttttgcaagacagtggtccacaggaaggcccagcagctccaccctcctgagtggcaggccatctttggacgcagcctttctgtgctcattcttcaggcaactttcagtcccttactatagctatttctagatgccctttaacattgtgaacaaatagaccgtctggtattataaagcctgtgtgtgcgggagcctgatcctctaagatatatggtgtatgctgctgtatttacagctcatcctctctccattgtgccctgacccatttctgtatgccctccccctttatttccaagtgacgttctcattctttcaaatgtgctgcctttgtgatgtgattatttaagctcacttatttcagccttgggataagctgagctattttgcttcctgggcagatctttggcaatgttgaatattcacttggggagagaggaggagttaaaaatacagagacacctaccctagctcctcacaataggaatgtggcttcagaaccctgacctctgctcctagtaacctcttgttcgcgtgctctaagcaccaagaaggcacccaaggcccagccagtctaagaaaatttagcaaataataaataacccctactcg

SEQ ID NO: 10946 - protein, 270 aa, Rattus norvegicus
  ref <308>: DATABASE ACCESSION NUMBER: SWISS-Prot / P16446
  ref <309>: DATABASE ENTRY DATE: 2002-06-15
VLLKEYRVILPVSVDEYQVGQLYSVAEASKNETGGGEGVEVLVNEPYEKDDGEKGQYTHKIYHLQSKVPTFVRMLAPEGALNIHEKAWNAYPYCRTVITNEYMKEDFLIKIETWHKPDLGTQENVHKLEPEAWKHVEAIYIDIADRSQVLSKDYKAEEDPAKFKSIKTGRGPLGPNWKQELVNQKDCPYMCAYKLVTVKFKWWGLQNKVENFIHKQEKRLFTNFHRQLFCWLDKWVDLTMDDIRRMEEETKRQLDEMRQKDPVKGMTADD

SEQ ID NO: 10947 - DNA, 1368 bp, Homo sapiens
  ref <308>: DATABASE ACCESSION NUMBER: EMBL / M73704
  ref <309>: DATABASE ENTRY DATE: 1999-07-02
ccgcagctccgggcggcgtcggcagcggcgcgagaggcgacgaggcccgggcggcaggagccggcgcggcgaccgcggcgagggcggcggggacggagcagagcacgacgaagacgcacaggcagccgggccgggccgggccacggggagagcggccggcgggcagcgggcgggaggccgggcgggccgcgggcagccaccgagccgcgaagcgacatggtgctgctcaaggagtatcgagtaatcctgcctgtgtctgtagatgagtatcaagtggggcagctgtattctgtggctgaggccagtaaaaatgaaacgggtggtggcgaaggcgtggaggtcctggtgaatgagccctacgagaaggacggtgagaaaggccagtacacacacaagatctaccacctgcagagcaaagtacccacgtttgttcgaatgctggccccagagggagccctgaatatacacgagaaagcctggaatgcttacccctactgcagaaccgttattacaaatgagtacatgaaagaagactttctgattaaaattgaaacctggcacaaaccagatcttggcacgcaggagaatgtgcataagctggagcctgaggcgtggaaacacgtggaagccgtatatatagacattgcagatcgaagccaagtgctcagcaaggattacaaggcagaggaagacccagcaaaatttaaatctatcaaaacaggccgaggacccttgggccccaattggaagcaagagcttgtaaaccagaaggactgcccatatatgtgtgcatacaaactggtgaccgtcaagttcaagtggtggggcctgcagaacaaagtggagaacttcatccataagcaagagaggcgtctgtttacaaacttccacaggcagctgttctgttggctcgataagtgggttgacctgaccatggacgacattcgaaggatggaagaagagacgaagagacagctggatgaaatgagacaaaaggacccagtgaaaggaatgacagcagatgactaaagccgcctttcccctctgcactttttgcaagacagtggtcaacaggaagacccagcagctccaccctcccaagtgacaggccattttcggacgcagccgttctgtgcccattcttcaggcaactttcgattccttactgtagctaattctagatgcccttcagtattgtgaacaaatagaccgtctggtgtcacagagcccgcgtgtgcaggagcctgctcctccgagatacgtggcgtgtaggttgctgtagttacagcgcctccgtctctctccattgtgttccgatccatttctgtgtgttcccccaacctttatttccaagtgacattttcagtc

SEQ ID NO: 10948 - protein, 269 aa, Homo sapiens
  ref <308>: DATABASE ACCESSION NUMBER: SWISS-Prot / Q00169
  ref <309>: DATABASE ENTRY DATE: 2002-06-15
VLLKEYRVILPVSVDEYQVGQLYSVAEASKNETGGGEGVEVLVNEPYEKDGEKGQYTHKIYHLQSKVPTFVRMLAPEGALNIHEKAWNAYPYCRTVITNEYMKEDFLIKIETWHKPDLGTQENVHKLEPEAWKHVEAVYIDIADRSQVLSKDYKAEEDPAKFKSIKTGRGPLGPNWKQELVNQKDCPYMCAYKLVTVKFKWWGLQNKVENFIHKQERRLFTNFHRQLFCWLDKWVDLTMDDIRRMEEETKRQLDEMRQKDPVKGMTADD

SEQ ID NO: 10949 - DNA, 2280 bp, Rattus norvegicus; identical to SEQ ID NO: 3608
  ref <308>: DATABASE ACCESSION NUMBER: EMBL / M31178
  ref <309>: DATABASE ENTRY DATE: 2000-03-04

SEQ ID NO: 10950 - protein, 260 aa, Rattus norvegicus; identical to SEQ ID NO: 3609
  ref <308>: DATABASE ACCESSION NUMBER: SWISS-Prot / P07171
  ref <309>: DATABASE ENTRY DATE: 2002-06-15

SEQ ID NO: 10951 - DNA, 2376 bp, Homo sapiens; identical to SEQ ID NO: 3610
  ref <308>: DATABASE ACCESSION NUMBER: EMBL / X06661
  ref <309>: DATABASE ENTRY DATE: 1993-09-12

SEQ ID NO: 10952 - protein, 260 aa, Homo sapiens; identical to SEQ ID NO: 3611
  ref <308>: DATABASE ACCESSION NUMBER: SWISS-Prot / P05937
  ref <309>: DATABASE ENTRY DATE: 2002-06-15

SEQ ID NO: 10953 - DNA, 4127 bp, Rattus norvegicus
  ref <308>: DATABASE ACCESSION NUMBER: Refseq / NM_012637
  ref <309>: DATABASE ENTRY DATE: 2002-10-20
agccgctgctggggaggttggggctgaggtggtggcgggcgacgggcctcgagacgcggagcgacgcggcctagcgcggcggacggccgagggaactcgggcagtcgtcccgtcccgccatggaaatggagaaggaattcgagcagatcgataaggctgggaactgggcggctatttaccaggatattcgacatgaagccagtgacttcccatgcagaatagcgaaacttcctaagaacaaaaaccggaacaggtaccgagatgtcagcccttttgaccacagtcggattaaattgcatcaggaagataatgactatatcaatgccagcttgataaaaatggaggaagcccagaggagctatatcctcacccagggccctttaccaaacacgtgcgggcacttctgggagatggtgtgggagcagaagagcaggggcgtggtcatgctcaaccgcatcatggagaaaggctcgttaaaatgtgcccagtattggccacagaaagaagaaaaagagatggtcttcgatgacaccaatttgaagctgacactgatctctgaagatgtcaagtcatattacacagtacggcagttggagttggagaacctggctacccaggaggctcgagagatcctgcatttccactacaccacctggcctgactttggagtccctgagtcacctgcctctttcctcaatttcctattcaaagtccgagagtcaggctcactcagcccagagcacggccccattgtggtccactgcagtgctggcattggcaggtcagggaccttctgcctggctgacacctgcctcttactgatggacaagaggaaagacccgtcctctgtggacatcaagaaagtgctgttggagatgcgcaggttccgcatggggctcatccagacggccgaccaactgcgcttctcctacctggctgtgatcgagggtgcaaagttcatcatgggcgactcgtcagtgcaggatcagtggaaggagctttcccatgaagacctggagcctccccctgagcacgtgcccccacctccccggccacccaaacgcacattggagcctcacaatggcaagtgcaaggagctcttctccaaccaccagtgggtgagcgaggagagctgtgaggatgaggacatcctggccagagaggaaagcagagccccctcaattgctgtgcacagcatgagcagtatgagtcaagacactgaagttaggaaacggatggtgggtggaggtcttcaaagtgctcaggcatctgtccccactgaggaagagctgtccccaaccgaggaggaacaaaaggcacacaggccagttcactggaagcccttcctggtcaacgtgtgcatggccacggccctggcgactggcgcgtacctctgttaccgggtatgttttcactgacagactgctgtgaggcatgagcgtggtgggcgctgccactgcccaggttaggatttggtctgcggcgtctaacctggtgtagaagaaacaacagcttacaagcctgtggtggaactggaagggccagccccaggaggggcatctgtgcactgggctttgaaggagcccctggtcccaagaacagagtctaatctcagggccttaacctgttcaggagaagtagaggaaatgccaaatactcttcttgctctcacctcactcctcccctttctctggttcgtttgtttttggaaaaaaaaaaaaaagaattacaacacattgttgtttttaacatttataaaggcaggtttttgttatttttagagaaaacaaaagatgctaggcactggtgagattctcttgtgccctttggcatgtgatcagattcacgatttacgtttatttccgggggagggtcccacctgtcaggactgtaaagttcctgctggcttggtcagcccccccacccccccaccccgagcttgcaggtgccctgctgtgaggagagcagcagcagaggctgcccctggacagaagcccagctctgcttccctcaggtgtccctgcgtttccatcctccttctttgtgaccgccatcttgcagatgacccagtcctcagcaccccacccctgcagatgggtttctccgagggcctgcctcagggtcatcagaggttggctgccagcttagagctggggcttccatttgattggaaagtcattactattctatgtagaagccactccactgaggtgtaaagcaagactcataaaggaggagccttggtgtcatggaagtcactccgcgcgcaggacctgtaacaacctctgaaacactcagtcctgctgcagtgacgtccttgaaggcatcagacagatgatttgcagactgccaagacttgtcctgagccgtgatttttagagtctggactcatgaaacaccgccgagcgcttactgtgcagcctctgatgctggttggctgaggctgcggggaggtggacactgtgggtgcatccagtgcagttgcttttgtgcagttgggtccagcagcacagcccgcactccagcctcagctgcaggccacagtggccatggaggccgccagagcgagctggggtggatgcttgttcacttggagcagccttcccaggacgtgcagctcccttcctgctttgtccttctgcttccttccctggagtagcaagcccacgagcaatcgtgaggggtgtgagggagctgcagaggcatcagagtggcctgcagcggcgtgaggccccttcccctccgacacccccctccagaggagccgctccactgttatttattcactttgcccacagacacccctgagtgagcacaccctgaaactgaccgtgtaaggtgtcagcctgcacccaggaccgtcaggtgcagcaccgggtcagtcctagggttgaggtaggactgacacagccactgtgtggctggtgctggggcaggggcaggagctgagggtcttagaagcaatcttcaggaacagacaacagtggtgacatgtaaagtccctgtggctactgatgacatgtgtaggatgaaggctggcctttctcccatgactttctagatcccgttccccgtctgctttccctgtgagttagaaaacacacaggctcctgtcctggtggtgccgtgtgcttgacatgggaaacttagatgcctgctcactggcgggcacctcggcatcgccaccactcagagtgagagcagtgctgtccagtgccgaggccgcctgactcccggcaggactcttcaggctctggcctgccccagcacaccccgctggatctcagacattccacacccacacctcattccctggacacttgggcaagcaggcccgcccttccacctctggggtcagcccctccattccgagttcacactgctctggagcaggccaggaccggaagcaaggcagctggtgaggagcaccctcctgggaacagtgtaggtgacagtcctgagagtcagcttgctagcgctgctggcaccagtcaccttgctcagaagtgtgtggctcttgaggctgaagagactgatgatggtgctcatgactcttctgtgaggggaacttgaccttcacattgggtggctttttttaaaataagcgaaggcagctggaactccagtctgcctcttgccagcacttcacattttgcctttcacccagagaagccagcacagagccactggggaaggcgatggccttgcctgcacaggctgaggagatggctcagccggcgtccaggctgtgtctggagcagggggtgcacagcagcctcacaggtgggggcctcagagcaggcgctgccctgtcccctgccccgctggaggcagcaaagctgctgcatgccttaagtcaatacttactcagcagggcgctctcgttctctctctctctctctctctctctctctctctctctctctctctctctaaatggccatagaataaaccattttacaaaaataaaagccaacaacaaagtgctctggaatagcacctttgcaggagcggggggtgtctcagggtcttctgtgacctcaccgaactgtccgactgcaccgtttccaacttgtgtctcactaatgggtctgcattagttgcaacaataaatgtttttaaagaac

SEQ ID NO: 10954 - protein, 432 aa, Rattus norvegicus; identical to SEQ ID NO: 6857
  ref <308>: DATABASE ACCESSION NUMBER: SWISS-Prot / P20417
  ref <309>: DATABASE ENTRY DATE: 2001-10-16

SEQ ID NO: 10955 - DNA, 524 bp, Homo sapiens; identical to SEQ ID NO: 6858
  ref <308>: DATABASE ACCESSION NUMBER: EMBL / AI803199
  ref <309>: DATABASE ENTRY DATE: 1999-12-15

SEQ ID NO: 10956 - protein, 435 aa, Homo sapiens; identical to SEQ ID NO: 6859
  ref <308>: DATABASE ACCESSION NUMBER: Refseq / NP_002818
  ref <309>: DATABASE ENTRY DATE: 2002-01-09

SEQ ID NO: 10957 - DNA, 1157 bp, Rattus norvegicus; identical to SEQ ID NO: 3684
  ref <308>: DATABASE ACCESSION NUMBER: EMBL / M36410
  ref <309>: DATABASE ENTRY DATE: 2000-03-04

SEQ ID NO: 10958 - protein, 262 aa, Rattus norvegicus; identical to SEQ ID NO: 3685
  ref <308>: DATABASE ACCESSION NUMBER: SWISS-Prot / P18297
  ref <309>: DATABASE ENTRY DATE: 1997-11-01

SEQ ID NO: 10959 - DNA, 833 bp, Homo sapiens; identical to SEQ ID NO: 3686
  ref <308>: DATABASE ACCESSION NUMBER: EMBL / M76231
  ref <309>: DATABASE ENTRY DATE: 1999-07-02

SEQ ID NO: 10960 - protein, 261 aa, Homo sapiens; identical to SEQ ID NO: 3687
  ref <308>: DATABASE ACCESSION NUMBER: SWISS-Prot / P35270
  ref <309>: DATABASE ENTRY DATE: 2002-06-15

SEQ ID NO: 10961 - DNA, 1360 bp, Rattus norvegicus
  ref <308>: DATABASE ACCESSION NUMBER: EMBL / M38135
  ref <309>: DATABASE ENTRY DATE: 2000-03-04
aattcgggcgctgcccctgctgtgcgctggggcctggctgctgagtgctggggccaccgctgagctgaccgtgaatgccatagaaaagtttcactttacgtcatggatgaaacagcatcaaaagacgtacagctcgagggagtacagccacaggctcaggtgtttgccaacaactggaggaagattcaagcccacaaccagaggaaccacacatttaaaatgggattgaaccagttttcagatatgagctttgccgaaataaaacacaaatacctctggtcagagcctcagaattgctcagccaccaaaagtaactacctccgtggtactggcccctacccatcctccatggactggaggaagaaaggaaatgtcgtttcaccagtgaagaaccagggggcctgtggcagctgctggactttctcaaccactggggccctagagtcagctgttgctattgccagtgggaaaatgatgaccttggctgagcagcagctcgtggattgtgcccagaacttcaacaatcatggctgccaaggaggtctccccagccaggccttcgagtacatcctgtacaacaagggcatcatgggagaggacagctacccttacataggcaagaatggtcagtgcaaattcaacccagaaaaggccgtcgcgttcgtcaagaatgttgtcaacatcacactcaatgatgaggctgcaatggtagaggctgtggccctatacaatcctgtgagctttgcctttgaggtgactgaagattttatgatgtataaaagtggtgtctactccagtaactcctgtcataaaactccagataaagtaaaccatgcagtcctggctgttggctatggagaacagaatggattactctactggattgtgaaaaactcttggggctccaactgggggaacaatgggtacttcctcattgagcgtggaaagaacatgtgtggcctggctgcctgtgcctcttacccaatccctcaggtataagcacacggctgcacaggcaacttcgcttggcaagacaaagggaggaacttggttcctacgatgagaatgcgccctggagaaagttgttcagaaattcacccagaggccctctcactcctgagtctagacgcctaaagacagtaaggaagaacttgaccaggcaacaagcccgcccgtgtgacgacatcaccagccatacgctttgtttgaatatggtttttaaatgacccaaaaccatgtggacctagaatcttctcttttcagctctcttcatatagggaaagctccgatggctacccttttctatgttgtatattcaataaatgcagtgaacgcctgcctggctggcctagccgaattc

SEQ ID NO: 10962 - protein, 333 aa, Rattus norvegicus
  ref <308>: DATABASE ACCESSION NUMBER: SWISS-Prot / P00786
  ref <309>: DATABASE ENTRY DATE: 2002-06-15
MWTALPLLCAGAWLLSAGATAELTVNAIEKFHFTSWMKQHQKTYSSREYSHRLQVFANNWRKIQAHNQRNHTFKMGLNQFSDMSFAEIKHKYLWSEPQNCSATKSNYLRGTGPYPSSMDWRKKGNVVSPVKNQGACGSCWTFSTTGALESAVAIASGKMMTLAEQQLVDCAQNFNNHGCQGGLPSQAFEYILYNKGIMGEDSYPYIGKNGQCKFNPEKAVAFVKNVVNITLNDEAAMVEAVALYNPVSFAFEVTEDFMMYKSGVYSSNSCHKTPDKVNHAVLAVGYGEQNGLLYWIVKNSWGSNWGNNGYFLIERGKNMCGLAACASYPIPQV

SEQ ID NO: 10963 - DNA, 1807 bp, Homo sapiens
  ref <308>: DATABASE ACCESSION NUMBER: EMBL / AK026152
  ref <309>: DATABASE ENTRY DATE: 2000-09-29
caggtgaatttgggcctcaaaggtatccctttgcatggtccccaggagagcctcattggtgacacctgcagggccctgacgaccaggccagaactagcattcagccctcttgggcaggcccatggggtggaaatggtgccacctgcagaagtcatcgcccctgtgctgggctggcctctgtgccctccatgtctcagatatgccctgacctgttgggctcacaaggccttgtccacataccaggaaggagggcactcccttgccaggcacctgtttgcttttcacagctgggtctctgtccacccctctagggaggcaggactgagggaggctgggcgccccgtccctcctgcacttgctttccttcagtagggccctggcctcagcacaggtaacttcccccctcatttcagctcccagaggtctcttggttagtgcacttgaacccagccacccccaacccagaagctccaaaaagtgccaatgcctgggacccaccctgcagatactgttgtagttggtctgaggcacagcctggacttggggtttttttaaggttctgcatggggttctacctgctgctgtcacctggtctctgcagctctgttccaaagctgcagcctccaggaagccaccctgacttccccccacctaccttcccccttggaggggacaggttctactcagaagtcacacagccctcggatgggtcttctcgtttccaccgccatctgggacctacccgtccatggtttataacccctgtgttctagcagcaaagctttgtagactctgggtttatgggtgtaggggtgagagctgctggcccaggagaggacctcagggaatggatgtgaatgactgaatgagtaggtccacgctgtaccccgtggtccctatctcagagggtgcagggtttcctaggagcagagttggggagaggaacgagagatggccagacagacccagccagagacaggaagggagagaggccgcaggggagctgcttctgtccatccatgctgctctgggcctctagcccctagcttgaggcaaaaggctgtactgtgaaaggagtggggaggtgacaggccatgtgtttctgtctcggtcctgtttccacagtatgacgaggaagcgatggtggaggctgtggccctctacaaccctgtgagctttgcctttgaggtgactcaggacttcatgatgtatagaacgggcatctactccagtacttcctgccataaaactccagataaagtaaaccatgcagtactggctgttgggtatggagaaaaaaatgggatcccttactggatcgtgaaaaactcttggggtccccagtggggaatgaacgggtacttcctcatcgagcgcggaaagaacatgtgtggcctggctgcctgcgcctcctaccccatccctctggtgtgagccgtggcagccgcagcgcagactggcggagaaggagaggaacgggcagcctgggcctgggtggaaatcctgccctggaggaagttgtggggagatccactgggacccccaacattctgccctcacctctgtgcccagcctggaaacctacagacaaggaggagttccaccatgagctcacccgtgtctatgacgcaaagatcaccagccatgtgccttagtgtccttcttaacagactcaaaccacatggaccacgaatattctttctgtccagaagggctactttccacatatagagctccagggactgtcttttctgtattcgctgttcaataaacattgagtgagcacctcaaaaaaaaaaaaaaaaaa

SEQ ID NO: 10964 - protein, 335 aa, Homo sapiens [sequence omitted]

SEQ ID NO: 10965 - DNA, 2287 bp, Rattus norvegicus
  ref <308>: DATABASE ACCESSION NUMBER: EMBL / M58340
  ref <309>: DATABASE ENTRY DATE: 2000-03-04
gtctgcggcgggtccgggcccatgaggcgacgacggaggcgggacggcttttacccagcgcctgacttccgacacagggaagctgaggacatggcaggagtgtttgacatagacctggaccagccagaggatgcaggctctgaggatgagctggaggaggggggtcagttaaatgaaagcatggaccatgggggagttggaccatatgaacttggcatggaacattgtgagaaatttgaaatctcagaaactagtgtgaacagagggccagaaaaaatcagaccagaatgttttgagctacttcgggtacttggtaaagggggctatggaaaggtttttcaagtacgaaaagtaacaggagcaaatactgggaagatatttgccatgaaggtgcttaaaaaggcaatgatagtaagaaatgctaaagatacagctcatacaaaagcagagcggaatattctggaggaagtaaagcatcccttcattgtggatttaatttatgcctttcagaccggtggaaaactctacctcatccttgagtatctcagtggaggagaactatttatgcagttagaaagagaggggatattcatggaagatacagcttgcttttacttggctgaaatctccatggctttggggcatttacatcaaaaggggattatctacagagacctgaagccggagaacatcatgcttaatcaccaaggtcacgtgaagctgacagactttggactatgcaaagaatctattcatgatggaacagtcacgcacacattttgtggaacaatagaatacatggcccctgaaatcttgatgagaagcggccacaaccgtgctgtggattggtggagtctgggagcattaatgtatgacatgctgactggagcacctccattcactggggagaatagaaagaagacaattgacaaaatcctcaaatgtaaacttaatttgcctccctacctcacacaagaagctcgagatctgcttaaaaagctgctgaagagaaatgctgcttctcgtcttggagctggccctggggatgctggagaagtccaagcgcatccattttttagacacattaactgggaagagcttttggctcggaaggtggagcgcccctttaagcctctgttgcaatctgaagaggatgtgagtcagtttgattcaaagtttactcgtcagacacctgttgacagccccgatgactcaactctcagtgaaagtgccaaccaggtctttctgggttttacatatgtggctccatctgtacttgaaagtgtgaaagaaaagttttcttttgaaccaaaaatccgatcgcctcgaagatttattggtagcccacgaacgcctgtcagcccagtcaaattctctcctggggatttctggggacgaggtgcttcagccagcacagcaaatcctcagacacctgtggaatacccaatggaaacaagtggaatagagcagatggatgtgacaacgagcggggaagcttcagcgccacttccaatccgacagcccaactctgggccatacaaaaaacaagcttttcctatgatctccaaacggccagagcacctgcgtatgaatctatgatgaaacaatgcttttattaatgcaaatgcaaaaaggaaacaaatcctggaagggcatgtgtgaggatcctgcaagataaaaatgagaaaatggcagtctcaaagagtcagtgtcattacctggaatgctttcgatggaggaaaaaataaacatggatttttaaaaaaatcaatcaatggtgcaaaaaataaacccacaaaaaactcaaacaaaatagtattgtggaacccacagacacatcaactgactggttcctaccctagcaacatctcagcgttcgtaaggattctcatgctgatggccgtaaactgacagtattaagggtaggatgttgcttctgaatcactggtaaagtctgatgatgtcacataagggttatcctaataggcaaagtacaagattgcctgtaatacttgcaactaaggacaaattagcatgcaagctttgtcaaactttttccagcaacacagaatcaaagacaaaagaaacttatcgattgatgttttacgtgcaaacaacctgaatcttttttttatataaatatatatttttcaaatagatttttgattcagctcattatgaaaaacatcccaaactttaaaatgcgaagttattggttggtgtgaagaaagccagcttctgttcttctcttgatgaaataaaatgcaaatggatcattgttaaaaaa

SEQ ID NO: 10966 - protein, 502 aa, Rattus norvegicus; identical to SEQ ID NO: 3705
  ref <308>: DATABASE ACCESSION NUMBER: SWISS-Prot / P21425
  ref <309>: DATABASE ENTRY DATE: 2001-10-16

SEQ ID NO: 10967 - DNA, 2346 bp, Homo sapiens; identical to SEQ ID NO: 3706
  ref <308>: DATABASE ACCESSION NUMBER: EMBL / M60724
  ref <309>: DATABASE ENTRY DATE: 2000-03-04

SEQ ID NO: 10968 - protein, 502 aa, Homo sapiens; identical to SEQ ID NO: 3707
  ref <308>: DATABASE ACCESSION NUMBER: SWISS-Prot / P23443
  ref <309>: DATABASE ENTRY DATE: 2002-06-15

SEQ ID NO: 10969 - DNA, 1016 bp, Rattus norvegicus; identical to SEQ ID NO: 3724
  ref <308>: DATABASE ACCESSION NUMBER: EMBL / M58364
  ref <309>: DATABASE ENTRY DATE: 2000-03-04

SEQ ID NO: 10970 - protein, 241 aa, Rattus norvegicus; identical to SEQ ID NO: 3725
  ref <308>: DATABASE ACCESSION NUMBER: SWISS-Prot / P22288
  ref <309>: DATABASE ENTRY DATE: 2002-06-15

SEQ ID NO: 10971 - DNA, 1413 bp, Homo sapiens; identical to SEQ ID NO: 3726
  ref <308>: DATABASE ACCESSION NUMBER: EMBL / U63810
  ref <309>: DATABASE ENTRY DATE: 1998-07-02

SEQ ID NO: 10972 - protein, 339 aa, Homo sapiens; identical to SEQ ID NO: 3727
  ref <308>: DATABASE ACCESSION NUMBER: SWISS-Prot / O76071
  ref <309>: DATABASE ENTRY DATE: 2002-06-15

SEQ ID NO: 10973 - DNA, 4400 bp, Rattus norvegicus
  ref <308>: DATABASE ACCESSION NUMBER: EMBL / M59814
  ref <309>: DATABASE ENTRY DATE: 2000-03-04
gtatagtttcgtgtgaggggtttccagccccaagaatgccagctatgaaactagcagggtcgcccacccacaactccccctccatctttttatggtttggctcgctctccctcaccctctctcacacacgcacgcacacacccacctctcccataaacacacacacacacatgcacacccacatccacgcgcgcccgcaccgccccacgcgcgcacactcccgcccacgcccacgccgcgctccggggagtccggtcccggccagagcgcgaaaggacacggagaagccacccgccgggagcgcagcggcgccctgggacgcggcgcgtctccgctggggctcggcctgggggccgctggccggcgatggccctggattgcctgctgctgttcctcctggcatctgcagtggccgcgatggaagaaacattgatggacacaaggactgccactgcagagttgggatggacggccaaccctgcctctgggtgggaagaagtcagtggctacgatgaaaacctgaacaccatccgtacttaccaagtgtgcaacgtctttgaacccaaccagaacaactggctgcttaccacctttatcaacagacggggcgcccatcgcatctatacagagatgcgcttcactgtgagggactgcagcagccttccaaatgtcccaggctcctgcaaagagaccttcaacttatactactatgagactgactctgtcattgccaccaagaagtcagccttctggtctgaagccccctacctcaaagttgacaccattgctgcagatgagagcttctcccaggtggattttgggggaaggttgatgaaggtcaacacagaagtcaggagctttgggcctcttactaggaatggtttttacctcgctttccaggattatggagcctgtatgtctctactttctgtccgtgtcttcttcaaaaagtgtcccagcattgtgcaaaattttgcagtgttcccagaaaccatgacaggagcagagagcacatctctggtgattgctcggggcacatgcatccctaatgcagaagaagtggatgtgcccataaaactctactgcaatggagatggagagtggatggtgcccattgggcgctgcacctgtaaggctggctatgaacctgagaacagcgtggcctgcaaggcctgtcctgcgggaaccttcaaggccagccaggaagctgaaggctgctcccactgcccctccaacagccgctccccttcagaggcgtctcccatctgcacctgccggactggctattaccgagcagactttgatcccccagaagtggcgtgcactagtgtcccatcaggccctcgaaatgtcatctccattgtgaatgagacatctatcattctagagtggcaccctccaagagagaccggtgggcgagatgatgtgacctacaacatcatctgcaagaagtgcagagcagaccgccggagttgctcccgctgcgatgacaatgtggagtttgtacccagacagctgggcttgactgagtgtcgtgtctctatcagtagcctatgggcccacaccccatacacttttgatatccaggccatcaatggagtctctagcaagagtcccttccccccacagcatgtctctgtcaacatcaccacaaaccaagctgccccctccactgttcctatcatgcaccaggtcagtgccaccatgaggagcatcaccttgtcatggcctcagccggagcagcctaatggcatcatcctggactatgagatccggtactatgagaaggagcacaatgagttcaactcttccatggccaggagccagaccaacacggcacgtatcgatgggctacggcccggcatggtgtatgtggtccaggtacgagctcgaaccgtggctggctatggcaagttcagtggcaagatgtgcttccagactctgacagatgatgattacaagtcggagctgagagagcagctacccctgatcgctggctctgcagcagctggggttgtatttgttgtgtctctggtggctatctccattgtctgcagcaggaaacgagcttacagcaaagaggctgtgtacagtgataaacttcagcattacagcacaggccgaggctccccagggatgaagatctacattgacccgttcacttatgaggaccctaatgaagctgtccgggagtttgccaaggagattgatgtgtcttttgtgaaaattgaagaggtcatcggagcaggggagtttggagaagtgtacaagggccgattgaagctgccaggcaagagggaaatctatgtggccatcaagaccctgaaagctgggtactcagagaaacagcgtcgggattttctgagcgaggcgagcatcatgggccagtttgaccatcccaacatcattcgcctagagggtgttgtcaccaagagccgacctgtcatgatcattacggagttcatggagaatggcgctttagactctttcctccggcaaaatgacggacagttcaccgtgatccagcttgtggggatgctgaggggcatcgctgctggcatgaagtacctatctgagatgaattatgtgcaccgggacctggctgctaggaacattctggtgaacagcaacctggtgtgcaaagtgtctgactttggcctctctcgctacctccaggatgacacctcagaccccacctacaccagctccttgggagggaagatacctgttagatggacagctccagaggccatcgcctaccgcaagtttacgtcagccagcgatgtctggagctacgggattgtcatgtgggaagtaatgtcatttggagagagaccttactgggatatgtccaatcaagatgtcatcaatgccattgagcaggactaccggctgccccctcctatggactgcccagctgccctgcaccagctcatgctggactgttggcagaaggatcgaaatagccggccccgttttgcagagatcgtcaacaccctggacaagatgatccggaacccagctagtctcaagactgtggcaaccatcaccgctgtgccttcccaacccctgcttgaccgctctatcccagacttcacggcctttaccaccgtggatgactggctaagtgccatcaaaatggtccagtacagggacagcttcctcaccgctggcttcacctccctccagctggtcacccagatgacatcagaagacctcctgagaataggggtcaccttggcaggccatcagaagaagattcttagcagcatccactcgatgagggtccagatgaaccagtcaccgtcggtaatggcatgagaactcgatgttcctaggggaggagaggaatgaaaaggaccagggtcaaaggggaaacagaggttgaccacggtggaatgtgccagaaagatcagcttcttggctgagaaacaacttcccacctgtgaagaatgaactggacctgctgcccatgggcaaccgccatttctcggccatggaagtgtgtagaagccgtgggaaaccaaacgcgtaatgattgacgataaagacagagaaaggtgatgctaaacagaagcgaagctgaaaccgtatgcgttgggaaccagggtgaactcagttcccatctgagagggactggagttccccgtctgcaggaagaaaggaaggaggtggagggaagagagggaagccctgggctgtgccatgctctccctcgccaatgacattcttttctttcctccattcgtactcctccctcagagcccctcctccctcccccacatccatttcccttgctcatgactcatgtagggaagtttcttcaaaataaaacccagctcctgagtcaaaacctggtctgagggagagcggttctccatccctcggtcccagagaacagagtgatatttaaaatgccatcgatggtgaggttattggaagaggaaggaccgttagcacacaccatcatggtaaataagtggagcctaagtgtcagcagacatgatgaaagccaagtcaccttgaaggtgacttttctgggaaggtcttaagcatgtaatgtcccttaataggagggaaagggacaatctcagggcagccttgtccaggtagaaatattttgcccccctgtctgttgttggtgaggggtcacaccagccagggagacctctgggaagaagctgccacacacaaggactctggaaggatccacatgtgagcccagccagggtcatacggttcccaacctgaggaaaaggtttttcacacactccttgctttctgctgagataagaaaggtgtcactctgcagagtgtgactttttacaggttaaataaagctgtatatgtctcattgttaaaaaaaaaaaaaaaaaaaaaaaaaaaaaaaaaaaaaaaaa

SEQ ID NO: 10974 - protein, 984 aa, Rattus norvegicus; identical to SEQ ID NO: 9339
  ref <308>: DATABASE ACCESSION NUMBER: SWISS-Prot / P09759
  ref <309>: DATABASE ENTRY DATE: 2001-10-16

SEQ ID NO: 10975 - DNA, 1874 bp, Homo sapiens
  ref <308>: DATABASE ACCESSION NUMBER: EMBL / AL133099
  ref <309>: DATABASE ENTRY DATE: 2000-02-18
cgctgcgccgggcacggtgtctttggagcgcgctttcccagccaccaagccggaggcaccgccaagtctgcgctggcagagagtgacgctgcccgacgactcccggccgccgagtatcctctccggggtggtggagaggctgggagactttaggtaggaccgaccactcaccccagcccactcctgttccaaggctcaagaggcgaaaagggtttccacctctccccgactgaccctggaaacgtgcagtcccgcaggcgcccggaccaccagactggtccccaagggtacggccaatgaactccacccctctccttcggcggccacttgcgggataccacggcagagcttctccggcccccgcgcgcagtgcttgcacgccaagcagagtccactagcccgtggactgcgagctggagaaaaggaggtggcgcgcggctgctcagaagcgtatccgtgcctgggagcagacgggcgctagtactccaggagccggatggccagaggcacccctttctccccaacgcccagctctggctctgccccagagctaaggagcatgcaccgcaatgcagcgggctccgagctctccgagcgggggctgcgggagaccgaggctaccagggagtgccggggcgaggaagccgggggactcgcgagccagtttcgggcgctaagagccagccgggggcgctctggtgggtgccgcccaagccccgcgctcggcagcggccgaggctcccaaacctccttgccctcgggtcccgggatgcctgcaccgcaaagcagccagaggaaccccgcgaaccgcggagcacagcagtcccgaggcggccggcaccagcagccaacttgctccgtggagggtacgttaccttccatcgcagccactgcggatgccaggaggagcagtagtagataatccagggccatcgccggccgacggcccgcaggccgagaccaagccgaggcagcagcgccgggagagcgccgcgtcccagggcgccgctgcgctctccgcgggtggcttctcggtatcctttcgcgctctcgcccggaccggacttcccggagcgctgcgtgggcgtgggcaggagtgtgtgcgcgtggggcggtgcgggcgcgcgtgggtgtgggtgtgcatgtgtgtgtgtgtgtttatgggagaggtgggtgtgtgcgtgcgtgtgtgagagagagagggcgagggagaacgagcctgggagagcgcgcgagagcgagtgcgtcctggtgtcacattgctagctacagcggagcctacgggaggacggagccggccagactgacgcgggagggagcgggatcccccaccatcagctctctccccacccctaacacctcctgtccaatcaaggaatcaaacctgcaaaattcccccggccaatcaggcgcgagcacctccttacactggcattgttagtttaagaaaaacttttgcttgcaaggctgtgcgggagggctcggaaggcgctaggaggggtccgggctccccctcgtggtgctctcggagaaccgcagcggcccgcccaactcaccctgtccccacatagggtgcccagcgaaggagctggggaggcctcgtgcccttacatcccacccaggactggatccgctttaaatgatcaaacgagccttcgttcatcttctctgtgacaagagcaccctgcctaccctgtttagagcaactccaggggcgcacccgtgcctctcctccagagctcttcactctctagcatgggttggtatttactaatcgattttgtttatcgtggggtctctccctcattaaaatggggtcaccaaaaaaaaaaaaaaaaaaaaaaaaaaaaaaaaaaaaaaaaaaaaaaaaaaag

SEQ ID NO: 10976 - protein, 984 aa, Homo sapiens
  ref <308>: DATABASE ACCESSION NUMBER: SWISS-Prot / P54762
  ref <309>: DATABASE ENTRY DATE: 2002-06-15
MALDYLLLLLLASAVAAMEETLMDTRTATAELGWTANPASGWEEVSGYDENLNTIRTYQVCNVFEPNQNNWLLTTFINRRGAHRIYTEMRFTVRDCSSLPNVPGSCKETFNLYYYETDSVIATKKSAFWSEAPYLKVDTIAADESFSQVDFGGRLMKVNTEVRSFGPLTRNGFYLAFQDYGACMSLLSVRVFFKKCPSIVQNFAVFPETMTGAESTSLVIARGTCIPNAEEVDVPIKLYCNGDGEWMVPIGRCTCKPGYEPENSVACKACPAGTFKASQEAEGCSHCPSNSRSPAEASPICTCRTGYYRADFDPPEVACTSVPSGPRNVISIVNETSIILEWHPPRETGGRDDVTYNIICKKCRADRRSCSRCDDNVEFVPRQLGLTECRVSISSLWAHTPYTFDIQAINGVSSKSPFPPQHVSVNITTNQAAPSTVPIMHQVSATMRSITLSWPQPEQPNGIILDYEIRYYEKEHNEFNSSMARSQTNTARIDGLRPGMVYVVQVRARTVAGYGKFSGKMCFQTLTDDDYKSELREQLPLIAGSAAAGVVFVVSLVAISIVCSRKRAYSKEAVYSDKLQHYSTGRGSPGMKIYIDPFTYEDPNEAVREFAKEIDVSFVKIEEVIGAGEFGEVYKGRLKLPGKREIYVAIKTLKAGYSEKQRRDFLSEASIMGQFDHPNIIRLEGVVTKSRPVMIITEFMENGALDSFLRQNDGQFTVIQLVGMLRGIAAGMKYLAEMNYVHRDLAARNILVNSNLVCKVSDFGLSRYLQDDTSDPTYTSSLGGKIPVRWTAPEAIAYRKFTSASDVWSYGIVMWEVMSFGERPYWDMSNQDVINAIEQDYRLPPPMDCPAALHQLMLDCWQKDRNSRPRFAEIVNTLDKMIRNPASLKTVATITAVPSQPLLDRSIPDFTAFTTVDDWLSAIKMVQYRDSFLTAGFTSLQLVTQMTSEDLLRIGITLAGHQKKILNSIHSMRVQISQSPTAMA

SEQ ID NO: 10977 - DNA, 2519 bp, Rattus norvegicus; identical to SEQ ID NO: 3756
  ref <308>: DATABASE ACCESSION NUMBER: EMBL / M60921
  ref <309>: DATABASE ENTRY DATE: 2002-10-24

SEQ ID NO: 10978 - protein, 158 aa, Rattus norvegicus; identical to SEQ ID NO: 3757
  ref <308>: DATABASE ACCESSION NUMBER: SWISS-Prot / P27049
  ref <309>: DATABASE ENTRY DATE: 2001-10-16

SEQ ID NO: 10979 - DNA, 2717 bp, Homo sapiens; identical to SEQ ID NO: 3758
  ref <308>: DATABASE ACCESSION NUMBER: EMBL / U72649
  ref <309>: DATABASE ENTRY DATE: 2000-03-04

SEQ ID NO: 10980 - protein, 158 aa, Homo sapiens; identical to SEQ ID NO: 3759
  ref <308>: DATABASE ACCESSION NUMBER: SWISS-Prot / P78543
  ref <309>: DATABASE ENTRY DATE: 2002-06-15

SEQ ID NO: 10981 - DNA, 2314 bp, Rattus norvegicus
  ref <308>: DATABASE ACCESSION NUMBER: EMBL / M61142
  ref <309>: DATABASE ENTRY DATE: 2000-03-04
ggaccgcacaggcgtgaggacagaggagggcgtgccgtcccgcgcgcagctgccgccatgaaaccccccgcagcctgtgctggggacgtggtggatacagtgtcaccatgctccaccgtgaatcatctgcgctgggacctgagcgcacagcagatcagagctctaaccacacagctcatcgagcagaccaagtgtgtgtacgaccgtgtgggcgcccaggacttcgaggacgtgtcctatgagagcacactgaaggcactggctgacgtggaggtcacctacacagtgcagaggaacattctcgacttcccccagcacgtgtctccgaacaaggacatccgcgcagccagcacagaggctgacaagaagctctcagagtttgatgtggagatgagcatgaggcaggacgtgtaccagagggtcgtgtggctgcaggagaaaatcccgaaagactcactgaagcctgaggcagctcgctacctggagcggctcatcaagctgggccggagaaacgggctccacttacctcaggacacacaggagaagatcaagaacatcaagaagaggctgagcctgctgtgcatcgacttcaacaagaacctgaatgaggacaccaccttcctgcccttcacgagagaggagctgggcgggctccccgaggacttcctgaactccctggagaagacagaggacggcaaactgaaggtcaccctcaagtatccacactatttcccactgctgaagaagtgccacgtgcccgagacacgacgcctgttggaggaggccttcaactgtcgctgcaaggaggagaactgtgccatcctgaaggagctagtgtccctgcgggcgcagaagtccaacctgctgggattccgcacacacgcagactacgtcctggagatgaacatggccaagaccagtcagacagtagccaccttcctagatgaactggcccggaagctgaagccgctgggtgagcaggagcgtgcggtgatcctggagctgaaggaggcagagtgccaagcgcgggctgccattcgatgggcgcatccacgcatgggacatgcggtactacatgaaccaggtggaggaggaacacgctaccgcgtagaccagaacctgctgaaggagtacttccccatgcaggtggtcacgcgtgggctgctggccatctaccaagagctgctggggctgaccttcacgctggaggaaggtgctgccgcctggcacgaagacgtgcggctgtactctgtgcgtgacgccgcctctggagaggagattggcaagttctacctcgacctgtaccccagggaagggaagtatggccacgcggcctgcttcggcctgcagcctggctgcctacggcaggatggcagccgacagctggccatcgcggccatggtggccaatttcaccaagcccacacctgacgtgccttccctgctgcagcacgatgaggtggagacctacttccacgagttcgggcacgtcatgcaccagctctgctcacaggcagagtttgctatgttcagtgggacccacgtggagcgggactttgtggaggcaccgtcacagatgctggagaactgggtgtgggaaaaggagccactgatgcgcatgtcccagcattaccgcacaggaggcgaggcccctgaggacctcctggagaagctcatcaagtctcgccaggccaatgcaggtctcttcaaccttcggcagattgtccttgccaaggtagatcaggtcctgcacacacagacagatgtagacccagctgaggaatatgcccgctctgccaggagatccttggggtgccagccacaccaggtaccaacatgccagccacttttggccacctcgctggtggctacgacgctcagtactatggctacttgtggagtgaggtgtactccatggacatgttccacacacgcttcaagcaggagggtgtgcttagccccaaggttggcatggattaccggaccagcatcctgaggccggggggctctgaggatgccagtaccatgctgaagcagttcctgggccgtgaccccaagcaagacgccttcctcctgagcaagggtctgcaggtagagggctgcgagccacctgcgtgctgagcggtccccagctcgccctcctgtgccttagcctgccgggcggcaaggtcagcagcccttgggtacggatgagcctggggcagtttccatcctcgtcctccccccagctccaggtccccggcttcaggctgctgtgctctccttgcactatcccctccccaaactgatgttggacattaaatttcacacagggg

SEQ ID NO: 10982 - protein, 686 aa, Rattus norvegicus
  ref <308>: DATABASE ACCESSION NUMBER: SWISS-Prot / P24155
  ref <309>: DATABASE ENTRY DATE: 2002-06-15
KPPAACAGDVVDTVSPCSTVNHLRWDLSAQQIRALTTQLIEQTKCVYDRVGAQDFEDVSYESTLKALADVEVTYTVQRNILDFPQHVSPNKDIRAASTEADKKLSEFDVEMSMRQDVYQRVVWLQEKIPKDSLKPEAARYLERLIKLGRRNGLHLPQDTQEKIKNIKKRLSLLCIDFNKNLNEDTTFLPFTREELGGLPEDFLNSLEKTEDGKLKVTLKYPHYFPLLKKCHVPETRRLLEEAFNCRCKEENCAILKELVSLRAQKSNLLGFRTHADYVLEMNMAKTSQTVATFLDELARKLKPLGEQERAVILELKEAESAKRGLPFDGRIHAWDMRYYMNQVEEDSYRVDQNLLKEYFPMQVVTRGLLAIYQELLGLTFTLEEGAAAWHEDVRLYSVRDAASGEEIGKFYLDLYPREGKYGHAACFGLQPGCLRQDGSRQLAIAAMVANFTKPTPDVPSLLQHDEVETYFHEFGHVMHQLCSQAEFAMFSGTHVERDFVEAPSQMLENWVWEKEPLMRMSQHYRTGGEAPEDLLEKLIKSRQANAGLFNLRQIVLAKVDQVLHTQTDVDPAEEYARLCQEILGVPATPGTNMPATFGHLAGGYDAQYYGYLWSEVYSMDMFHTRFKQEGVLSPKVGMDYRTSILRPGGSEDASTMLKQFLGRDPKQDAFLLSKGLQVEGCEPPAC

SEQ ID NO: 10983 - DNA, 2122 bp, Homo sapiens
  ref <308>: DATABASE ACCESSION NUMBER: EMBL / BC000583
  ref <309>: DATABASE ENTRY DATE: 2001-07-13
ggcacgagggcacagaggccgacaagaagctctctgagttcgacgtggagatgagcatgagggaggacgtgtaccagaggatcgtgtggctccaggagaaagttcagaaggactcactgaggcccgaggctgcgcggtacctggagcggctaatcaagctgggccggagaaatgggcttcacctccccagagagactcaggaaaacatcaaacgcatcaagaagaagctgagccttctgtgcatcgacttcaacaagaacctgaacgaggacacgaccttcctgcccttcacgctccaggagctaggagggctccccgaggactttctgaactccctggagaagatggaggacggcaagttgaaggtcaccctcaagtacccccattacttccccctcctgaagaaatgccacgtgcctgagaccaggaggaaagtggaggaggccttcaactgccggtgcaaggaggagaactgcgctatcctcaaggagctggtgacgctgcgggcccagaagtcccgcctgctggggttccacacgcacgccgactatgtcctggagatgaacatggccaagaccagccagaccgtggccaccttcctagatgagctggcgcagaagctgaagcccctgggggagcaggagcgtgcggtgattctggagctgaagcgtgcggagtgcgagcgccggggcctgcccttcgacggccgcatccgtgcctgggacatgcgctactacatgaaccaggtggaggagacgcgctactgcgtggaccagaacctgctcaaggagtacttccccgtgcaggtggtcacgcacgggctgctgggcatctaccaggagctcctggggctggccttccaccacgaggagggcgccagtgcctggcatgaggacgtgcggctctacaccgcgagggacgcggcctcgggggaggtggtcggcaagttctacctggacctgtacccgcgggaaggaaagtacgggcacgcggcctgctttggcctgcagcccggctgcctgcggcaggatgggagccgccagatcgccatcgcggccatggtggccaacttcaccaagcccacagccgacgcgccctcgctgctgcagcatgacgaggtggagacctacttccatgagtttggccacgtgatgcaccagctctgctcccaggcggagttcgccatgttcagcgggacccacgtggagcgggactttgtggaggcgccgtcgcagatgctggagaactgggtgtgggagcaggagccgctgctgcggatgtcgcggcactaccgcacaggcagcgccgtgccccgggagctcctggagaagctcattgagtcccggcaggccaacacaggcctcttcaacctgcgccagatcgtcctcgccaaggtggaccaggccctgcacacgcagacggacgcagaccccgccgaggagtatgcgcggctctgccaggagatcctcggggtcccggccacgccaggaaccaacatgcctgcaaccttcggccatctggcaggtggctacgacgcccagtactacgggtacctgtggagcgaggtgtattccatggacatgttccacacgcgcttcaagcaggagggtgtcctgaacagcaaggttggcatggattacagaagctgcatcctgagacccggcggttccgaggatgccagcgccatgctgaggcgcttcctgggccgtgaccccaagcaggacgccttcctcctgagcaaggggctgcaggtcgggggctgcgagcccgagccgcaggtctgctgaggcctggcactgcgactgcccagtctggcctgcgctcccgccgccctggtgccttagcccccggcacaggatggggcaggctctggcacagtgcctgggactggcagggtggctgagcggctgtcttgcctcttgtcattgtctgtccccacccggtcgtggcccacccggctagagacggcgtcctcaaggcatctggagggctttcgtggctgccagggcctggtctttgttgcactaacacgtctcctctctgggaaacgtcccttgtcaggagacggctcttctttgaaatgaggtcattaaaaggaaacagaaaaaaaaaaaaaaaaaaa

SEQ ID NO: 10984 - protein, 688 aa, Homo sapiens
  ref <308>: DATABASE ACCESSION NUMBER: SWISS-Prot / P52888
  ref <309>: DATABASE ENTRY DATE: 2002-06-15
KPPAACAGDMADAASPCSVVNDLRWDLSAQQIEERTRELIEQTKRVYDQVGTQEFEDVSYESTLKALADVEVTYTVQRNILDFPQHVSPSKDIRTASTEADKKLSEFDVEMSMREDVYQRIVWLQEKVQKDSLRPEAARYLERLIKLGRRNGLHLPRETQENIKRIKKKLSLLCIDFNKNLNEDTTFLPFTLQELGGLPEDFLNSLEKMEDGKLKVTLKYPHYFPLLKKCHVPETRRKVEEAFNCRCKEENCAILKELVTLRAQKSRLLGFHTHADYVLEMNMAKTSQTVATFLDELAQKLKPLGEQERAVILELKRAECERRGLPFDGRIRAWDMRYYMNQVEETRYCVDQNLLKEYFPVQVVTHGLLGIYQELLGLAFHHEEGASAWHEDVRLYTARDAASGEVVGKFYLDLYPREGKYGHAACFGLQPGCLRQDGSRQIAIAAMVANFTKPTADAPSLLQHDEVETYFHEFGHVMHQLCSQAEFAMFSGTHVERDFVEAPSQMLENWVWEQEPLLRMSRHYRTGSAVPRELLEKLIESRQANTGLFNLRQIVLAKVDQALHTQTDADPAEEYARLCQEILGVPATPGTNMPATFGHLAGGYDAQYYGYLWSEVYSMDMFHTRFKQEGVLNSKVGMDYRSCILRPGGSEDASAMLRRFLGRDPKQDAFLLSKGLQVGGCEPEPQVC

SEQ ID NO: 10985 - DNA, 1893 bp, Rattus norvegicus
  ref <308>: DATABASE ACCESSION NUMBER: EMBL / M63282
  ref <309>: DATABASE ENTRY DATE: 2000-03-04
tgtctcactcagcgagacgcgcggtgcacggtgcttccccggcggacgaccgaccaacccgcgctccggcagagtccttggcgctcgcctgccggcgggacagacagcccgcctctagccgctctctggaccctggccgccccgagcgaagactggagcaaaatgatgcttcaacatccaggccaggtctctgcctcagaagtcagcgcgaccgccatcgtcccctgcctctcacctcctgggtcactggtgtttgaggattttgctaacctgacaccttttgtcaaggaagagctgagattcgccatccagaacaagcacctttgccatcggatgtcctctgcgctggagtcagtcaccatcaacaacagacctctggagatgtcagtcaccaagtctgaggtggcccctgaagaagatgagagaaaaaggaggcggcgggaaagaaacaaaattgctgctgccaagtgtcgaaacaagaaaaaagagaagacagagtgcctgcagaaggagtcagagaaactggagagtgtgaatgccgaactgaaggcccagatcgaggagctgaagaatgagaagcagcatctgatttacatgctcaacctgcaccggcccacgtgtatcgtccgggctcagaacgggcggacgccggaagacgagaggaacctttttatccaacagataaaagaaggaacattgcagagctaagcagaggtggcatgggggcaattggggagtccttactgaatcctccttttccaccccaaaccctgaagccattggaaaactggcttcctgtgcacttctagaatctcagcagccacgagctgttgggtcaggagggcctgcggtgactactgcgttgtcccactctgtccccgagtgaaccgtggagcaggcaggagcatcctttgtctcaccggctccaggatttaggccttaccatcccggccattctcagatgacctagctggccccaggctggggtcccatgcaaagcaggatcgcactaatgggatgcaggcagaagtgtctaccttgacaggtggggtggaccacgtcctccactgcggctgacaacatccctcctagggaagatggagtgagaacattcatcattgaagttgtccaatggccagggtatgctttctagaaactatgctgttctgtcctagactgactgtgcatagggcattcatttctgagcctggtgttgtgctatttagatgtttgtcttgcacaacattggcgtgatttttttccgggagtttcatcagacctgatttccgagagtttgggggtctgccactgtggacaatatcccccaaaagtgtttgggtggccatgtaaactggctgatgaccagctgtgctactctgtgctgaccgaggactgatgcctccttcccctgtacccactgctgaggaagaacccgggcacagcagctgtccttggctacaaactgttacaatgtcacagaacgaaggcacaaagtcccgctttcaaagggcgtaggactccacactcagtgacagggcaggaagagccaaggattctccgttttcccttccttcccaccaaaaaccacagcccgtggagactggtatttgaagccaggagtggggcaaggaaggtgtctgcactgtgggatgttaactgcgcttttgtcttgaagctattttgagatgcggtccagagtatttcagctgggaggtccctcccactggccaccagggctctggctactgttaaaattctgatgtttctgtgaaatcctcagtgttcaatccagactcagtagtatattacagttttctgtaagagagaacgttacttatttatcccagtattcctagcctgtcaacgtaataaaatatcagaatgagacctggt

SEQ ID NO: 10986 - protein, 181 aa, Rattus norvegicus
  ref <308>: DATABASE ACCESSION NUMBER: SWISS-Prot / P29596
  ref <309>: DATABASE ENTRY DATE: 2002-06-15
MMLQHPGQVSASEVSATAIVPCLSPPGSLVFEDFANLTPFVKEELRFAIQNKHLCHRMSSALESVTINNRPLEMSVTKSEVAPEEDERKRRRRERNKIAAAKCRNKKKEKTECLQKESEKLESVNAELKAQIEELKNEKQHLIYMLNLHRPTCIVRAQNGRTPEDERNLFIQQIKEGTLQS

SEQ ID NO: 10987 - DNA, 2056 bp, Homo sapiens
  ref <308>: DATABASE ACCESSION NUMBER: Refseq / NM_004024
  ref <309>: DATABASE ENTRY DATE: 2002-05-16
gcagccaggcgcgcactgcacagctctcttctctcgccgccgcccgagcgcacccttcagcccgcgcgccggccgtgagtcctcggtgctcgcccgccggccagacaaacagcccgcccgaccccgtcccgaccctggccgccccgagcggagcctggagcaaaatgatgcttcaacacccaggccaggtctctgcctcggaagtgagtgcttctgccatcgtcccctgcctgtcccctcctgggtcactggtgtttgaggattttgctaacctgacgccctttgtcaaggaagagctgaggtttgccatccagaacaagcacctctgccaccggatgtcctctgcgctggaatcagtcactgtcagcgacagacccctcggggtgtccatcacaaaagccgaggtagcccctgaagaagatgaaaggaaaaagaggcgacgagaaagaaataagattgcagctgcaaagtgccgaaacaagaagaaggagaagacggagtgcctgcagcttcagtattagcagagccacaggccgcctctgtggcatcaccagggtttctctgaagaagagggtctgcattttcctaaacccagtgctgctctcccatctcccatcttcctctcgcagcttgatgagccccggtgtgtcccaggagtcggagaagctggaaagtgtgaatgctgaactgaaggctcagattgaggagctcaagaacgagaagcagcatttgatatacatgctcaaccttcatcggcccacgtgtattgtccgggctcagaatgggaggactccagaagatgagagaaacctctttatccaacagataaaagaaggaacattgcagagctaagcagtcgtggtatgggggcgactggggagtcctcattgaatcctcattttatacccaaaaccctgaagccattggagagctgtcttcctgtgtacctctagaatcccagcagcagagaaccatcaaggcgggagggcctgcagtgattcagcaggcccttcccattctgccccagagtgggtcttggaccagggcaagtgcatctttgcctcaactccaggatttaggccttaacacactggccattcttatgttccagatggcccccagctggtgtcctgcccgcctttcatctggattctacaaaaaaccaggatgcccaccgttagattcaggcagcagtgtctgtacctcgggtgggagggatggggccatctccttcaccgtggctaccattgtcactcgtaggggatgtggagtgagaacagcatttagtgaagttgtgcaacggccagggttgtgctttctagcaaatatgctgttatgtccagaaattgtgtgtgcaagaaaactaggcaatgtactcttccgatgtttgtgtcacacaacactgatgtgacttttatatgctttttctcagatctggtttctaagagttttggggggcggggctgtcaccacgtgcagtatctcaagatattcaggtggccagaagagcttgtcagcaagaggaggaacagaattctcccagcgttaacacaaaatccatgggcagcatgatggcaggtcctctgttgcaaactcagttccaaagtcacaggaagaaagcagaaagttcaacttccaaagggttaggactctccactcaatgtcttaggtcaggagttgtgtctaggctggaagagccaaagaaatattccattttcctttccttgtggttgaaaccacagtcagtggagagatgtttggaacacagtcagtggagctggtggtaccaggtttagcattattggatgtcaaaagcattttttttgtcatgtagctgttttaagaaatctggcccagggtgtttgcagctgtgagaagtcactcacactggccacaaggacgctggctactgtctattaaaattctgatgtttctgtgaaattctcagagtgtttaattgtactcaatggtatcattacaattttctgtaagagaaaatattacttatttatcctagtattcctaacctgtcagaataataaatattgtggtaaaa

SEQ ID NO: 10988 - protein, 181 aa, Homo sapiens
  ref <308>: DATABASE ACCESSION NUMBER: SWISS-Prot / P18847
  ref <309>: DATABASE ENTRY DATE: 2002-06-15
MMLQHPGQVSASEVSASAIVPCLSPPGSLVFEDFANLTPFVKEELRFAIQNKHLCHRMSSALESVTVSDRPLGVSITKAEVAPEEDERKKRRRERNKIAAAKCRNKKKEKTECLQKESEKLESVNAELKAQIEELKNEKQHLIYMLNLHRPTCIVRAQNGRTPEDERNLFIQQIKEGTLQS

SEQ ID NO: 10989 - DNA, 1350 bp, Rattus norvegicus; identical to SEQ ID NO: 3816
  ref <308>: DATABASE ACCESSION NUMBER: Refseq / NM_012627
  ref <309>: DATABASE ENTRY DATE: 2002-11-14

SEQ ID NO: 10990 - protein, 70 aa, Rattus norvegicus; identical to SEQ ID NO: 3817
  ref <308>: DATABASE ACCESSION NUMBER: SWISS-Prot / P27775
  ref <309>: DATABASE ENTRY DATE: 2001-10-16

SEQ ID NO: 10991 - DNA, 1057 bp, Homo sapiens; identical to SEQ ID NO: 3818
  ref <308>: DATABASE ACCESSION NUMBER: EMBL / AF225513
  ref <309>: DATABASE ENTRY DATE: 2001-02-04

SEQ ID NO: 10992 - protein, 78 aa, Homo sapiens; identical to SEQ ID NO: 3819
  ref <308>: DATABASE ACCESSION NUMBER: SWISS-Prot / Q9C010
  ref <309>: DATABASE ENTRY DATE: 2002-06-15

SEQ ID NO: 10993 - DNA, 3662 bp, Rattus norvegicus; identical to SEQ ID NO: 3820
  ref <308>: DATABASE ACCESSION NUMBER: EMBL / M64301
  ref <309>: DATABASE ENTRY DATE: 2000-03-04

SEQ ID NO: 10994 - protein, 720 aa, Rattus norvegicus; identical to SEQ ID NO: 3821
  ref <308>: DATABASE ACCESSION NUMBER: SWISS-Prot / P27704
  ref <309>: DATABASE ENTRY DATE: 2001-10-16

SEQ ID NO: 10995 - DNA, 4193 bp, Homo sapiens; identical to SEQ ID NO: 3822
  ref <308>: DATABASE ACCESSION NUMBER: Refseq / NM_002748
  ref <309>: DATABASE ENTRY DATE: 2001-10-22

SEQ ID NO: 10996 - protein, 721 aa, Homo sapiens; identical to SEQ ID NO: 3823
  ref <308>: DATABASE ACCESSION NUMBER: SWISS-Prot / Q16659
  ref <309>: DATABASE ENTRY DATE: 2002-06-15

SEQ ID NO: 10997 - DNA, 1002 bp, Rattus norvegicus; identical to SEQ ID NO: 3828
  ref <308>: DATABASE ACCESSION NUMBER: EMBL / M64376
  ref <309>: DATABASE ENTRY DATE: 2000-03-04

SEQ ID NO: 10998 - protein, 333 aa, Rattus norvegicus; identical to SEQ ID NO: 3829
  ref <308>: DATABASE ACCESSION NUMBER: SWISS-Prot / P23265
  ref <309>: DATABASE ENTRY DATE: 1993-07-01

SEQ ID NO: 10999 - DNA, 960 bp, Homo sapiens; identical to SEQ ID NO: 3830
  ref <308>: DATABASE ACCESSION NUMBER: Refseq / NM_012377
  ref <309>: DATABASE ENTRY DATE: 2001-04-14

SEQ ID NO: 11000 - DNA, 1385 bp, Rattus norvegicus
  ref <308>: DATABASE ACCESSION NUMBER: EMBL / M64711
  ref <309>: DATABASE ENTRY DATE: 2000-03-04
cgcgacgcttcgctccggtgaaggggccactttttgaagaccgcgctgagatctccaaaagccagaggcgatcagagcaaccagacaccatcctcttcgttttgcattgagttccatttgcaaccgagttttctttcttttttttttctttttttccctcctcttcttctgatccctttgcagaatggattattttcccgtgatcttctctctgctgtttgtggctttccaaggagctccagaaacagctgtcttgggagcagagctcagcccccgagctgagaaggaagtgcagagcccccctcccagcacatcctggagaccccgcaggtccaagcgttgctcctgctcctccttgatggacaaggagtgtgtctacttctgccacctggacatcatctgggtcaacactcccgagcgcgtcgtcccgtatggactaggaagcccttctaggtctaagcgatccttgaaagacttacttcccacaaagaccacagaccaagggaacagatgccagtgtgctcaccaaaaagacaagaagtgctggaatttctgccaagcagacaaagaactccgagcccaaagtaccatgcagaaaggcgtaaaagacttcaagaagggaaaaccctgtcccaagctgggaaagaagtgtatctatcagcagctggtggagggaagaaaactaagaaggttggaggccatcagcaacagcatcaagacctcctttcgagttgcaaagttgaaagcggaactctacagagaccagaagttgatacacaaccgagcacattgactacagagccccgtggtgttttggaagccatgacttacatagagcgagccctatggccaactctgcgctctccatgctggctgggatcttagcaagaacatctgtccggcttctacagtttcttgttcagactggcagaggaccagcgtccttgttccaaacattccaagagaggttgaggtgttccctaacctgtcttcgtttgcatccgctggtagcaagtgattctcttgcctcttcttgctgtctggggatggcctcggacctctcggagagcagagacacagtgccattcctgagtggcatcatccagagagccaggagattccatagcagggcggagtttctgtagaaagtccttagggagtgttcgtgtctgactcaggcgcctggcacatttcagggagaaactccaaagtccatgcaaaaaattttctgaggaatgcacaaattgaaaacatactcgaaggacaaacacttgagtttttttttttttaaggacttttttttaagttgtaaaatgcaaaactcaaagcaactgttactactgtacattaggatatgtttcatgaatatgagtctacccaccttt

SEQ ID NO: 11001 - protein, 202 aa, Rattus norvegicus
  ref <308>: DATABASE ACCESSION NUMBER: SWISS-Prot / P22388
  ref <309>: DATABASE ENTRY DATE: 2001-10-16
MDYFPVIFSLLFVAFQGAPETAVLGAELSPRAEKEVQSPPPSTSWRPRRSKRCSCSSLMDKECVYFCHLDIIWVNTPERVVPYGLGSPSRSKRSLKDLLPTKTTDQGNRCQCAHQKDKKCWNFCQADKELRAQSTMQKGVKDFKKGKPCPKLGKKCIYQQLVEGRKLRRLEAISNSIKTSFRVAKLKAELYRDQKLIHNRAH

SEQ ID NO: 11002 - DNA, 1334 bp, Homo sapiens
  ref <308>: DATABASE ACCESSION NUMBER: EMBL / BC009720
  ref <309>: DATABASE ENTRY DATE: 2001-10-30
cgccgcgtgcgcctgcagacgctccgctcgctgccttctctcctggcaggcgctgccttttctccccgttaaagggcacttgggctgaaggatcgctttgagatctgaggaacccgcagcgctttgagggacctgaagctgtttttcttcgttttcctttgggttcagtttgaacgggaggtttttgatccctttttttcagaatggattatttgctcatgattttctctctgctgtttgtggcttgccaaggagctccagaaacagcagtcttaggcgctgagctcagcgcggtgggtgagaacggcggggagaaacccactcccagtccaccctggcggctccgccggtccaagcgctgctcctgctcgtccctgatggataaagagtgtgtctacttctgccacctggacatcatttgggtcaacactcccgagcacgttgttccgtatggacttggaagccctaggtccaagagagccttggagaatttacttcccacaaaggcaacagaccgtgagaatagatgccaatgtgctagccaaaaagacaagaagtgctggaatttttgccaagcaggaaaagaactcagggctgaagacattatggagaaagactggaataatcataagaaaggaaaagactgttccaagcttgggaaaaagtgtatttatcagcagttagtgagaggaagaaaaatcagaagaagttcagaggaacacctaagacaaaccaggtcggagaccatgagaaacagcgtcaaatcatcttttcatgatcccaagctgaaaggcaatccctccagagagcgttatgtgacccacaaccgagcacattggtgacagaccttcggggcctgtctgaagccatagcctccacggagagccctgtggccgactctgcactctccaccctggctgggatcagagcaggagcatcctctgctggttcctgactggcaaaggaccagcgtcctcgttcaaaacattccaagaaaggttaaggagttcccccaaccatcttcactggcttccatcagtggtaactgctttggtctcttctttcatctggggatgacaatggacctctcagcagaaacacacagtcacattcgaattcgggtggcatcctccggagagagagagaggaaggagattccacacaggggtggagtttctgacgaaggtcctaagggagtgtttgtgtctgactcaggcgcctggcacatttcagggagaaactccaaagtccacacaaagattttctaaggaatgcacaaattgaaaacacactcaaaagacaaacatgcaagtaaagaaaaaaaaaaaaaaaaa

SEQ ID NO: 11003 - protein, 212 aa, Homo sapiens
  ref <308>: DATABASE ACCESSION NUMBER: SWISS-Prot / P05305
  ref <309>: DATABASE ENTRY DATE: 2002-06-15
MDYLLMIFSLLFVACQGAPETAVLGAELSAVGENGGEKPTPSPPWRLRRSKRCSCSSLMDKECVYFCHLDIIWVNTPEHVVPYGLGSPRSKRALENLLPTKATDRENRCQCASQKDKKCWNFCQAGKELRAEDIMEKDWNNHKKGKDCSKLGKKCIYQQLVRGRKIRRSSEEHLRQTRSETMRNSVKSSFHDPKLKGKPSRERYVTHNRAHW

SEQ ID NO: 11004 - DNA, 4593 bp, Rattus norvegicus
  ref <308>: DATABASE ACCESSION NUMBER: EMBL / M73049
  ref <309>: DATABASE ENTRY DATE: 2000-03-04
gaattctgaactacaaagcaaagcgcttcacatttccctgacttgtgccataggctggaaggtaaactcagacaactgagccatccattgttcaggctctactctgtccttaccgggtgtggcgagggtggccagttctgtcagccgtgctcctgcttcactcctggaattgaatcaaagactaatccccacagaaaatggttctcccatctaattcaaaatggaatgtcaaacgcatacagggccagacagatgaaaagacgaggtggaaagggtagctctggagtgctgggagctgtgaggaacaccgcacttaaacaaaggcactcacttccgccctctgcagtcatcctaaaccttctactttcaagagtggcaggggctgggcattaaaaggtcaaaatcaatccagtctctttttagatgaaacctcctgactaaaaattcattaaaaaaaaacattttgaaatctattgttttgttggtttgggtctttttgtttaaaccaaagcctgcagactcctttctaccagcctgcggtcctgggatgcgcggttgattggaggtctagagatgaaccctgctaattctcaacgctttgctccttttccaggcctagcctctttccctccccgtaacccttcgcacccttggaaataagcctcttgttcttcaccaatgtccggagcatctcacgctctctgcgaatcctcccgtttactgtggctgcggagctgagagatgctctctgaagtggacccactttctccgaaaaggaccaggagacacctaagtccagaagataaagaggagggtgcttctccccctgaaaagggtggggacagggcctcacccttgggaactctgggatgcagatgagaacagagacacctttcagaaaaacctactctccttgggggataagcacagaaaaggaaggacaggctctaaagccatcaaagagctgagtgctctgggctgggaagccaaggttgttggggcactccctcccctccggtcattccctaggcagattcttggggcacaggcgcagcggccagggacggcccaggtcggtggcgcgcagctgcggtggcactgcgcttccccgcccccgcaggccccccttcctctccccgctagatctgaagatgaagctccacccctagcgcgtcgccccagccccgcgccttaaaagccccgcacaccgccccgccgcacccagccttgccgcaccttcgcgtcctcgccaggtccgccgcagccgcgcacccggccccgaccccggcaccatgagcttcggatcagagcactacttgtgctccgcctcctcctaccgcaaggtgttcggggatggctcgcgcctgtctgcgcgcctgtccgggccgggagcgtccggcagctttcgctcgcagtcgctgtcccgcagcaatgtggcctccacggccgcttgctcctcggcctcgtctctcggcctgggcctggcctaccgccgcctgccggcctccgacgggctggacctgagccaagcagcggcgcgcaccaacgagtacaagatcatccgcactaacgagaaggagcagctgcagggcctcaacgaccgcttcgcggtgttcatcgaaaaggtgcaccagctggagacgcagaaccgcgcgctcgaggccgagctggccgcgctgcgccagcgccacgccgagccgtcgcgcgtcggcgagctcttccagcgcgagctgcgcgagctgcgcgcgcagctggaggaggcgagctccgcgcgcgcgcaggccctgctggagcgcgacgggctggccgaggaggtgcagcgactgcgggcgcgctgcgaggaggagagccgcgggcgcgaaggcgcggagcgcgccctgaaggcgcagcagcgcgacgtggacggcgccactctggcccgcctggatctggagaagaaggtggagtcgctgctggacgagctggccttcgtgcgccaggtgcacgacgaggaggtggccgagctcctggccacgctgcaggcgtcttcgcaagccgccgccgaggtggacgtggctgtggctaaaccagacctgacttcggcgctgagggagatccgcgcccagtatgagtccttggccgctaagaacctgcagtcggccgaggagtggtacaagtccaagttcgccaacctgaacgagcaggctgcgcgcagcacggaagccatccgagccagccgagaggagatccacgagtaccggcgccagctccaggctcgtaccattgagatagagggcctgcgcggagccaatgaatccctggagaggcagatcttggaactggaggagcggcacagcgctgaggtggccggctaccaggatagcattgggcagctggagagtgacctgaggaacaccaagagcgagatggcccgccaccttcgggaataccaggacttgctcaatgtcaaaatggctcttgacattgagatagcagcttacaggaagctgctggaaggcgaagagacacgatttagcaccagcgggttaagcatctcagggctgaatccacttcccaatcccagttatttgctccctcctagaatccttagttctacaacctccaaagtctcatccgctgggctgtccctgaaaaaggaggaggaggaggaggaggaagaggaagaaggggcttctaaggaagtcactaagaaaacatccaaggtaggggaaagtttcgaagaaacactggaggaaacggtggtatctacgaagaaaaccgaaaagtcaactatagaagaaatcaccaccagttccagccaaaaaatgtaatgctgttgcttaaaaaaaaaaaacaaaaaaaggcgatgcctaagagggaatgcacttggcttattcacagcttactcctgaaccacacctaccaccgcaatagaatgtcttcaaggcttcaatgtcatagtctgtaccgaatcctcgctctctccagtaggaaggccactgtagctgggagcaaactgcagtgctggaggaggagcaggaggagctctctaagatcacagctttcctacctacagctcaggcctcatagtgacaggtgacccaggtgcagaggaggctcaaacgaaggtgctaaatctggtcatcgctcgctgtgagctgaaatcgaaacctgtttctccaccgtaccccgccagtacccagccatagaacctcactgtagatgtctaaaaatatacagtcactgccgaggacaagctagtgctccagacaccattctcccatccccctctgatagagctgagtcacaaaacgacggtcgtctctcatgggcaggtttccttcctctctcttcaatcccgtattgccatttctcccacctgagaggaaggaacaaagtttagtgtggtatccccttctagacacgcatagaacttacgccctttagtcctcactccgtgggtaaattagatgcatgttgaccattcccgtgatttgtataacgcacccttgtccatttcatgacctttcatgtccgtagcttaaaaaatagaaagtgattaatgataatggcagtgattggttttaagggttttcctaaaataatactaattataataataatcataaaagggatctctagactttaggctttcagcttatccagatccacttaattagagaggaaaaaaattaccttaaatgatgtagcatttcaccttaaatttagaggcacggtgatagttgccctactctgcgcttaagctgaccttagacctcgtatcgtaagtagagtgagtgagtgagtgctctgaaagggaaagaacaaggtctcctctgtgttggtttctatgtagtgctatagaattagctttctcatacccttgccctaggatctacataattcccttcccattagggtagtatgctatgtataggacattttatcaccagacacaacgctactgcccaaaagtgaaaaacacacacttctggtcaatcaacaccaccagcaaatatttaaaaaaaataaaaaaggaaggaagaaagaaagaaagaaagaaagaaagaaagagagagagagagagaaagagagaaagaaagagaaagattgattctcagagtcttttcctaacagggttacattgcttcagttggtggatgtccctcccctgaaggaaagacagaaacattattcagggtccaggaggggtatgcacacttctcccccacctcaagaaggcaggctggaaagtcagctcttcgtgcactcaactgtggcatccacatgacctgtctgcctcgcgtgccaaacttgatgcagggtttgccctgtctctgctcactcccaccaagctgtagaactgtctgtcctgtccccgcccaccccatcgcaagctctgtgctgataaggacatgatgcttctactgaattcacattctagcacgtgcttcaatatagctcaaggaaccggaaagacacttcgtttttcctgacccatcccctcttgaccccccccccacactgtaagacattagtaatattaagaaattaaaagtcattaatcctatgtggttcttgtctgtggtctctatagctcctgaggtgtgcatt

SEQ ID NO: 11005 - DNA, 3197 bp, Homo sapiens
  ref <308>: DATABASE ACCESSION NUMBER: EMBL / S78296
  ref <309>: DATABASE ENTRY DATE: 2000-03-04
tgtagctcgcgttgaagccgcacgtccggccccgatcccggcaccatgagcttcggctcggagcactacctgtgctcctcctcctcctaccgcaaggtgttcggggatggctctcgcctgtccgcccgcctctctggggccggcggcgcgggggcttccgtcgagtcgctgtcccgcagcaatgtggcctcctcggccgcctgctcctcggcctcgtcgctcggcctcggactggcctatgcccggccgccggcgtccgacgggctggacctgagccaggcggcggcgcgcaccaacgagtacaagatcatccgctccaacgagaaggagcagctgcagggcctcaacgaccgcttcgccgtgttcatcgagaaggtgcatcagctggagacgcagaaccgcgcgttggaggccgagctggcgcgctgcgacacccacgctgagccgtcgcgcgtcgggcagctcttccagcgcgagcctcgccacctgccgcagctggaggaggccagctcggctcgctcgcaggccctgctggagcgcgacgggctggcggaggaggtgcagcggctgcgggcgcgctgcgaggaggagagccgcggacgcgaacgccgagcgcgcctgaagcggcagcagcgcgacgtggacggcgccacgctggcccgcctggacctggagaagaaggtggagtcgctgctggacgagctggccttcgtacgccaggtgcacgacgaggaggtagccgagctgctggccacgctgcagcggtcgtcgcaggccgcggccgaggtggacgtgactgtggctaaaccagacctgaccgcggctctgagggagatccgcgcccagtatgagtccctggccgctaagaacctgcagtccgcggaagaatggtacaagtccaagtttgccaacctgaacgagcaggcggcgcgcacgaccgaggccatccgggccagccgcgaccagatccacgagtatcggcgcctgcaggcgcgcaccatcgagatcgagggcctgcgcggggccaacgagtccttggagaggcagatcctggagctggaggagcggcacagtgccgaggtagctggctaccaggatagcattgggcagctggagaatgatctgaggaacaccaagagtgagatggcacgccaccttcgggaataccaggacttgctcaatgtcaaaatggctcttgacattgagatagcagcttacaggaaactgctggaaggcgaggagacacgttttagcaccagtgggttaagcatttcggggctgaatccacttcccaatccaagttacctgctcccacctagaatcctcagtgctacaacctccaaagtctcatccactgggctatcacttaagaaagaggaggaggaggaggaggcatctaaggtagcctctaagaaaacctcccagataggggaaagttttgaagaaatattagaggagacagtaatatctactaagaaaaccgagaaatcaaatatagaagaaaccaccatttcaagccaaaaaatataattccattgctttgaaaaagttaatgcttaagagggaatgatatgcatttgacttgttaaacagcctattcctgaactataacacctgccaccactataaaatgtcttcaaggcttcagtctcatatttagtattgaatacttacattctctaataagaaaaccaccccttagattgaagtaaactgcagtctggagcaatacagatgagttatctaagaatacagctttctgaccttcagctcacgttcacagtgatcgatgattcaggtgcagaggaagtacaaactaaggtgctaaatctgagatcatcgtcatttgctgtgaactgaaattaaaactattcatgctacccagccattacccagctaaataatcttactctagatacctaaaacataagatcactgccagagataaactaatggtccacacccaattccactctgatagaattatttcacaaataataggtgtttgtttaatggacacttttcacctccttcaattccatatatccttttcttctatgtaggaaaaaaatagtctagtgtagtattcttcccttttaaacacattttggttcttgctcaaaagaacttacccccattcgcgctctgctcagtgggtaaaattagatgcatgttgaccatgtctatgattcgtgtaattacttatccctgcccatttcatattctttcaattctgtaggttaaaaaaatggcagtgatgaattttaagggtttcccccaacatataaaataatgcaaagaatccctagactttaggctttcagcttacacaaatctatttaattaggaaaaaaactattaaggatgtagcttttcacctttactttagaagcacagtaaatatcccaaactgtgatgaagccgaccttagatttagtagtgtaagctagaagaagtgagtgtttctatgagtggaaaaagccaaggtgtcatttatgtgtcagttcatttgtggtgatatagaattagctttttcatccccttacccttagaatccacgtattcagcttcccactagcctaggtcataaagaggcgttgctttcactctcctatgccttttacgagtgctaagtgtaggatattttgtcaccagaacacaactgtaccgccccaaagtaaaagaaaccacttctggtcaatcaacactaccagcgtatatataagaaagacatctttctcttttctaaaagacttccctaacacttaccccatggctgcacagttggtggggtcctgccggagaggaagagacactcagaccagagaaggggtgtgcatgcgcctactcgcttgctagaagtagattctggacagtcagctcttcatctgcccaactgtgtagcatctcgattgccagtcttcatgtgtgccaaggctgatgcaggatttgttctctgtccagcagtcacttcggccagagctgaagagttgccccgtctctgttccatgtctcctttaagagctctggtgataaggacatgatgcttttactgaactttcttatcctagcacatgcttcaatagttcaaggaacttgaaaaatacttttccttacctttaccccatccctgtctttactcctcacacttactgtaagacattagtaacataataaattaaaagtcacagatctca

SEQ ID NO: 11006 - protein, 499 aa, Homo sapiens; identical to SEQ ID NO: 5359
  ref <308>: DATABASE ACCESSION NUMBER: SWISS-Prot / Q16352
  ref <309>: DATABASE ENTRY DATE: 2002-06-15

SEQ ID NO: 11007 - DNA, 2507 bp, Rattus norvegicus; identical to SEQ ID NO: 3871
  ref <308>: DATABASE ACCESSION NUMBER: EMBL / M74223
  ref <309>: DATABASE ENTRY DATE: 2000-03-04

SEQ ID NO: 11008 - protein, 617 aa, Rattus norvegicus; identical to SEQ ID NO: 3872
  ref <308>: DATABASE ACCESSION NUMBER: SWISS-Prot / P20156
  ref <309>: DATABASE ENTRY DATE: 2002-06-15

SEQ ID NO: 11009 - DNA, 265 bp, Homo sapiens; identical to SEQ ID NO: 3873
  ref <308>: DATABASE ACCESSION NUMBER: EMBL / BF223121
  ref <309>: DATABASE ENTRY DATE: 2001-04-02

SEQ ID NO: 11010 - DNA, 2065 bp, Rattus norvegicus
  ref <308>: DATABASE ACCESSION NUMBER: Refseq / NM_020073
  ref <309>: DATABASE ENTRY DATE: 2002-11-05
ggcgggggccgcggcggcgagctcggaggccggcggcggctgccccgagggacgcggccctaggcggtggcgatgggggccgcccggatcgcacccagcctggcgctcctactctgctgcccagtgctcagctccgcatatgcgctggtggatgcggacgatgtctttaccaaagaggaacagattttcctgctgcaccgtgcccaggcgcaatgtgacaagctgctcaaggaagttctgcacacagcagccaacataatggagtcagacaagggctggacaccagcatctacgtcagggaagcccaggaaagagaaggcatcgggaaagttctaccctgagtctaaagagaacaaggacgtgcccaccggcagcaggcgcagagggcgtccctgtctgcccgagtgggacaacatcgtttgctggccattaggggcaccaggtgaagtggtggcagtaccttgtcccgattacatttatgacttcaatcacaaaggccatgcctacagacgctgtgaccgcaatggcagctgggaggtggttccagggcacaaccggacgtgggccaactacagcgagtgcctcaagttcatgaccaatgagacgcgggaacgggaggtatttgaccgcctaggcatgatctacaccgtgggatactccatgtctctcgcctccctcacggtggctgtgctcatcctggcctattttaggcggctgcactgcacgcgcaactacatccacatgcacatgttcctgtcgtttatgctgcgcgccgcgagcatcttcgtgaaggacgctgtgctctactctggcttcacgctggatgaggccgagcgcctcacagaggaagagttgcacatcatcgcgcaggtgccacctccgccggccgctgccgccgtaggctacgctggctgccgcgtggcggtgaccttcttcctctacttcctggctaccaactactactggattctggtggaggggctgtacttgcacagcctcatcttcatggcctttttctcagagaagaagtacctgtggggcttcaccatctttggctggggtctaccggctgtcttcgtggctgtgtgggtcggtgtcagagcaaccttggccaacactgggtgctgggatctgagctccgggcacaagaagtggatcatccaggtgcccatcctggcatctgttgtgctcaacttcatcctttttatcaacatcatccgggtgcttgccactaagcttcgggagaccaatgcgggccggtgtgacaccaggcagcagtaccggaagctgctcaggtccacgttggtgctcgtgccgctctttggtgtccactacaccgtcttcatggccttgccgtacaccgaggtctcagggacattgtggcagatccagatgcattatgagatgctcttcaactccttccagggattttttgttgccatcatatactgtttctgcaatggtgaggtgcaggcagagattaggaagtcatggagccgctggacactggcgttggacttcaagcgcaaagcacgaagtgggagtagcagctacagctatggcccaatggtgtctcacacgagtgtgaccaatgtgggcccccgtgcaggactcagcctccccctcagcccccgcctgcctcctgccactaccaatggccactcccagctgcctggccatgccaagccaggggctccagccactgagactgaaaccctaccagtcactatggcggttcccaaggacgatggattccttaacggctcctgctcaggcctggatgaggaggcctccgggtctgcgcggccgcctccattgttgcaggaagaatgggaaacagtcatgtgactgggcactagggggctagactgctggcctgggcacatggacagatggaccaagaagccagtgtttggctggttgtctatcgggactggaccaggaagataaccaaaggaaaatggaagtggacgaagcagagaagaaggaagaggttttgcaggaattaaatatgtttcctcagttggatgatgaggacacaaggaaggcctattataaggaattc

SEQ ID NO: 11011 - protein, 591 aa, Rattus norvegicus
  ref <308>: DATABASE ACCESSION NUMBER: SWISS-Prot / P25961
  ref <309>: DATABASE ENTRY DATE: 2001-10-16
MGAARIAPSLALLLCCPVLSSAYALVDADDVFTKEEQIFLLHRAQAQCDKLLKEVLHTAANIMESDKGWTPASTSGKPRKEKASGKFYPESKENKDVPTGSRRRGRPCLPEWDNIVCWPLGAPGEVVAVPCPDYIYDFNHKGHAYRRCDRNGSWEVVPGHNRTWANYSECLKFMTNETREREVFDRLGMIYTVGYSMSLASLTVAVLILAYFRRLHCTRNYIHMHMFLSFMLRAASIFVKDAVLYSGFTLDEAERLTEEELHIIAQVPPPPAAAAVGYAGCRVAVTFFLYFLATNYYWILVEGLYLHSLIFMAFFSEKKYLWGFTIFGWGLPAVFVAVWVGVRATLANTGCWDLSSGHKKWIIQVPILASVVLNFILFINIIRVLATKLRETNAGRCDTRQQYRKLLRSTLVLVPLFGVHYTVFMALPYTEVSGTLWQIQMHYEMLFNSFQGFFVAIIYCFCNGEVQAEIRKSWSRWTLALDFKRKARSGSSSYSYGPMVSHTSVTNVGPRAGLSLPLSPRLPPATTNGHSQLPGHAKPGAPATETETLPVTMAVPKDDGFLNGSCSGLDEEASGSARPPPLLQEEWETVM

SEQ ID NO: 11012 - DNA, 2171 bp, Homo sapiens
  ref <308>: DATABASE ACCESSION NUMBER: EMBL / U17418
  ref <309>: DATABASE ENTRY DATE: 1999-07-02
tcaacacgtgaattcccacagaagctgctcagggactatccatggcctccccgtggccaacttgagtctgctctgcagctttaggcccgacttggaaggcccatgggctgcagatgaggaaactgaggtccagacagccgaagagtggtagtgtccaggacacacaactgggccggcggcggcggctgccccgagggacgcggccctaggcggtggcgatggggaccgcccggatcgcacccggcctggcgctcctgctctgctgccccgtgctcagctccgcgtacgcgctggtggatgcagatgacgtcatgactaaagaggaacagatcttcctgctgcaccgtgctcaggcccagtgcgaaaaacggctcaaggaggtcctgcagaggccagccagcataatggaatcagacaagggatggacatctgcgtccacatcagggaagcccaggaaagataaggcatctgggaagctctaccctgagtctgaggaggacaaggaggcacccactggcagcaggtaccgagggcgcccctgtctgccggaatgggaccacatcctgtgctggccgctgggggcaccaggtgaggtggtggctgtgccctgtccggactacatttatgacttcaatcacaaaggccatgcctaccgacgctgtgaccgcaatggcagctgggagctggtgcctgggcacaacaggacgtgggccaactacagcgagtgtgtcaaatttctcaccaatgagactcgtgaacgggaggtgtttgaccgcctgggcatgatttacaccgtgggctactccgtgtccctggcgtccctcaccgtagctgtgctcatcctggcctactttaggcggctgcactgcacgcgcaactacatccacatgcacctgttcctgtccttcatgctgcgcgccgtgagcatcttcgtcaaggacgctgtgctctactctggcgccacgcttgatgaggctgagcgcctcaccgaggaggagctgcgcgccatcgcccaggcgcccccgccgcctgccaccgccgctgccggctacgcgggctgcagggtggctgtgaccttcttcctttacttcctggccaccaactactactggattctggtggaggggctgtacctgcacagcctcatcttcatggccttcttctcagagaagaagtacctgtggggcttcacagtcttcggctggggtctgcccgctgtcttcgtggctgtgtgggtcagtgtcagagctaccctggccaacaccgggtgctgggacttgagctccgggaacaaaaagtggatcatccaggtgcccatcctggcctccattgtgctcaacttcatcctcttcatcaatatcgtccgggtgctcgccaccaagctgcgggagaccaacgccggccggtgtgacacacggcagcagtaccggaagctgctcaaatccacgctggtgctcatgcccctctttggcgtccactacattgtcttcatggccacaccatacaccgaggtctcagggacgctctggcaagtccagatgcactatgagatgctcttcaactccttccagggattttttgtcgcaatcatatactgtttctgcaacggcgaggtacaagctgagatcaagaaatcttggagccgctggacactggcactggacttcaagcgaaaggcacgcagcgggagcagcagctatagctacggccccatggtgtcccacacaagtgtgaccaatgtcggcccccgtgtgggactcggcctgcccctcagcccccgcctactgcccactgccaccaccaacggccaccctcagctgcctggccatgccaagccagggaccccagccctggagaccctcgagaccacaccacctgccatggctgctcccaaggacgatgggttcctcaacggctcctgctcaggcctggacgaggaggcctctgggcctgagcggccacctgccctgctacaggaagagtgggagacagtcatgtgaccaggcgctgggggctggacctgctgacatagtggatggacagatggaccaaaagatgggtggttgaatgatttcccactcagggcctggggccaagaggaaaaacagggaaaaaaagaaaaaaaaaaagaaaagaaaaaaaggaaaaaaaaaaaaaaaaaaaaaaaaaaa

SEQ ID NO: 11013 - protein, 593 aa, Homo sapiens
  ref <308>: DATABASE ACCESSION NUMBER: SWISS-Prot / Q03431
  ref <309>: DATABASE ENTRY DATE: 2002-06-15
MGTARIAPGLALLLCCPVLSSAYALVDADDVMTKEEQIFLLHRAQAQCEKRLKEVLQRPASIMESDKGWTSASTSGKPRKDKASGKLYPESEEDKEAPTGSRYRGRPCLPEWDHILCWPLGAPGEVVAVPCPDYIYDFNHKGHAYRRCDRNGSWELVPGHNRTWANYSECVKFLTNETREREVFDRLGMIYTVGYSVSLASLTVAVLILAYFRRLHCTRNYIHMHLFLSFMLRAVSIFVKDAVLYSGATLDEAERLTEEELRAIAQAPPPPATAAAGYAGCRVAVTFFLYFLATNYYWILVEGLYLHSLIFMAFFSEKKYLWGFTVFGWGLPAVFVAVWVSVRATLANTGCWDLSSGNKKWIIQVPILASIVLNFILFINIVRVLATKLRETNAGRCDTRQQYRKLLKSTLVLMPLFGVHYIVFMATPYTEVSGTLWQVQMHYEMLFNSFQGFFVAIIYCFCNGEVQAEIKKSWSRWTLALDFKRKARSGSSSYSYGPMVSHTSVTNVGPRVGLGLPLSPRLLPTATTNGHPQLPGHAKPGTPALETLETTPPAMAAPKDDGFLNGSCSGLDEEASGPERPPALLQEEWETVM

SEQ ID NO: 11014 - DNA, 912 bp, Rattus norvegicus; identical to SEQ ID NO: 3930
  ref <308>: DATABASE ACCESSION NUMBER: EMBL / M80601
  ref <309>: DATABASE ENTRY DATE: 2000-03-04

SEQ ID NO: 11015 - protein, 287 aa, Rattus norvegicus; identical to SEQ ID NO: 3931
  ref <308>: DATABASE ACCESSION NUMBER: SWISS-Prot / P47816
  ref <309>: DATABASE ENTRY DATE: 2002-06-15

SEQ ID NO: 11016 - DNA, 3254 bp, Homo sapiens; identical to SEQ ID NO: 3932
  ref <308>: DATABASE ACCESSION NUMBER: EMBL / AK055180
  ref <309>: DATABASE ENTRY DATE: 2002-08-06

SEQ ID NO: 11017 - DNA, 3224 bp, Rattus norvegicus
  ref <308>: DATABASE ACCESSION NUMBER: EMBL / M83143
  ref <309>: DATABASE ENTRY DATE: 2000-03-04
ctcaaggggcctctgggttctatttccaaagttctcggtgtgttccgtaatacttacgttacatctctcgggtgtggagctaggaatctccagtaagagagaacatgcgatatttgttgttctggtatggattgcctcactcgtattctcagtgtgtctgtcattggaccccagccagtggcatctttgaaaatgagccattattatctttattgcttctggtcctgggcaagttagtcaccacagaaaagcgcttcctcaaggacagtttgtacaccgaaggaatcctaattgtatgggacccatccgtgtatcatgcagatatcccaaagtggtatcagaaaccagactacaatttcttcgaaacctataagagttaccgaaggctgaaccccagccagccattttatatcctcaagccccagatgccatgggaactgtgggacatcattcaggaaatctctgcagatctgattcagccaaatcccccatcctccggcatgctgggtatcatcatcatgatgacgctgtgtgaccaggtagatatttacgagttcctcccatccaagcgcaagacggacgtgtgctattatcaccaaaagttctttgacagcgcttgcacgatgggtgcctaccacccgctcctcttcgagaagaatatggtgaagcatctcaatgagggaacagatgaagacatttatttgtttgggaaagccaccctttctggcttccggaacattcgttgttgagtacctagccaggcacccttatccttctccatacgtcattttatggctactctcctggttaccgctgcttgaaggagtgtttttattcaacaggcccagcctgcttcctgcgctctagggaattttgttggcaagagttctggggcctccagcctgcctccctggggccaccgaggatgggagtccagattcttgccacactcattcctcctagacagcgtcctcctctccttctgcatgggtagggaaagatccacatttctcaccagggttgcgaaaactagactttgttttctccaactggatgatgtcatcctcgcaaggcagcacgtcctctgtggcttgaactctccctaggtattgatttcacatccgaaagaaattctcccagatcatgatttgtgtttcacagatgcagggtggcgggaggggagaaaaataattggggcaggatggggaagcctactcagttactccagaagggcgtcaaggtgctcccaactcccttgggacatagtcctgttgtcaccctgtctggctaggctgatccttaatgcaaaggaccctgggtgcttatgatttgggtagcccacttccaactccctgtggagatgaaaggtacaaaacctcctgatcacctgaccatctgtctccagcatggacgagagagacacccaacaggcagctaaaatgcaaacattccgtagcctgttgtctgtgtgctcctccctaagacacccaggaggggccagctctactgtgttcttgtagagctgcggcacggaggaagaagggatactggggaagctcttacaccttctgcgtcagaagatctcttttcattttcccctttatgaacactgtatggcctgttacattgatgttatatttggaggcccaaggagtttttgttaggaagtccctaccaccgtcagatgtagacagcaggttaaagtgctgccccacaagactggggttcttattttattttttttaaatgtctacctctcccctactaattgctattgttatcccaaaccttctccagcaggctcccctctcgaattttaatctttttctttaggggcaccccatcaactttccctgaccgtttgacaaatacccgaaaggtctctcagggcatggggagtatgtaataaatgattcttcccttagaatcttaatcattcctgggacttaggggggtgaagtgtgtgatcacagattgccaagcatacccaccctgtttggctctgggcaggaagcactgctcttcctggttccctcacaaggattttctgagatgtggagtggtttacctagcctctgatgaagccacagtgggcttctctaccaggtggcaataacctatggtcaaaactcaaggctggcacaatctgttcgattcaaggctactaagacttaatgctattgaacctgtgttctcacaggcttctgtttactgctgacctagagctcagaaactcagaccccactgtctcagtgtttcaagctgcttgccttattcgggcaatagaaagcccggagtgaaaagccctgggtttccaggttgacctctcacttcctcactgtgccactttgtttctgtatctgtaaaatgggggtgacaatcctacctcacagggctgtgtggggacaacaggaaaacatggctgcgatgtatgagaaccactggaaagcgcgtggctgggctgtgaccacagtgtataggaagtaggtaccctgctgtccttcctgtttccttatgaagaacctaccaggtgatcacacccgtgctgggccttgctacaagggagggcagtggagaggaacaggacattctttctgttgtgagacaactgcatcatttgcaatatgcaggggcctactatcttgttgcctgcaccccaggtctatttgtgctggggttgggggtgcacagagcattgagctgcttggccgctgtgtggaataaatctagagaattcctggctcacttcttctgatctcacacgctcattataaggcattaggactgtggatggagtggccaggaagttgatgttccttctgtcagcaagaggtacattagagatggagactacactgggtagattctagtttttaattcttattaatgtggggggaataaattaataagtataatatgattctgatgtctattagactttctctgtgctctttgtgagtaaggtgggccacggaggtatgagggcatcactgttagtttggtgaggtggttagtgactgatgtacaggaagtgtcttctacgtgggcactgacgtcagtagccatctatgcatcctaaatgcaggatcctcttgattctttctgccaatcaaatatatcgttgctcttggttcaggtttgtgtcagaaactttaaaaacatacctattaattctaaattatccaaagattatgtacaaattttaaaataaatgtctttttcag

SEQ ID NO: 11018 - protein, 403 aa, Rattus norvegicus
  ref <308>: DATABASE ACCESSION NUMBER: SWISS-Prot / P13721
  ref <309>: DATABASE ENTRY DATE: 2002-06-15
MIHTNLKKKFSLFILVFLLFAVICVWKKGSDYEALTLQAKEFQMPKSQEKVAMGSASQVVFSNSKQDPKEDIPILSYHRVTAKVKPQPSFQVWDKDSTYSKLNPRLLKIWRNYLNMNKYKVSYKGPGPGVKFSVEALRCHLRDHVNVSMIEATDFPFNTTEWEGYLPKENFRTKVGPWQRCAVVSSAGSLKNSQLGREIDNHDAVLRFNGAPTDNFQQDVGSKTTIRLMNSQLVTTEKRFLKDSLYTEGILIVWDPSVYHADIPKWYQKPDYNFFETYKSYRRLNPSQPFYILKPQMPWELWDIIQEISADLIQPNPPSSGMLGIIIMMTLCDQVDIYEFLPSKRKTDVCYYHQKFFDSACTMGAYDPLLFEKNMVKHLNEGTDEDIYLFGKATLSGFRNIRC

SEQ ID NO: 11019 - DNA, 491 bp, Homo sapiens
  ref <308>: DATABASE ACCESSION NUMBER: EMBL / AA705426
  ref <309>: DATABASE ENTRY DATE: 2000-03-03
tgaaagtgtacaaactttattgaaacgcacacgcgcacacacacaaacacccctgtggatagggaaaagcacctggccacagggtccactgaaacggggaggggatggcagcttacgataagtcttgtagttgttaaagaaattataatccggattctggtaccactttgggatatctgagtggtatacagatgggtcccatacaattaggattccttcattgtacaaactgtctttgaggaagcgcttctctgtggtaaccaactgagagttcatcaggcgaatggtagtttttgtgcccacatcttgttggaagttggctgtgggtgccccattaaacctcaggactgcgtcatgatcatcgatttctctgcctagttgggaggacttcagagatcccgctgacgacacaacagcacacctgccccaaggcccagccttggtcctaatgctctccttgggcagataaccctcccttcagaggtattgaa

SEQ ID NO: 11020 - protein, 406 aa, Homo sapiens
  ref <308>: DATABASE ACCESSION NUMBER: SWISS-Prot / P15907
  ref <309>: DATABASE ENTRY DATE: 2002-06-15
MIHTNLKKKFSCCVLVFLLFAVICVWKEKKKGSYYDSFKLQTKEFQVLKSLGKLAMGSDSQSVSSSSTQDPHRGRQTLGSLRGLAKAKPEASFQVWNKDSSSKNLIPRLQKIWKNYLSMNKYKVSYKGPGPGIKFSAEALRCHLRDHVNVSMVEVTDFPFNTSEWEGYLPKESIRTKAGPWGRCAVVSSAGSLKSSQLGREIDDHDAVLRFNGAPTANFQQDVGTKTTIRLMNSQLVTTEKRFLKDSLYNEGILIVWDPSVYHSDIPKWYQNPDYNFFNNYKTYRKLHPNQPFYILKPQMPWELWDILQEISPEEIQPNPPSSGMLGIIIMMTLCDQVDIYEFLPSKRKTDVCYYYQKFFDSACTMGAYHPLLYEKNLVKHLNQGTDEDIYLLGKATLPGFRTIHC

SEQ ID NO: 11021 - DNA, 857 bp, Rattus norvegicus; identical to SEQ ID NO: 3993
  ref <308>: DATABASE ACCESSION NUMBER: EMBL / M83678
  ref <309>: DATABASE ENTRY DATE: 2000-03-04

SEQ ID NO: 11022 - protein, 164 aa, Rattus norvegicus; identical to SEQ ID NO: 3994
  ref <308>: DATABASE ACCESSION NUMBER: SWISS-Prot / P35286
  ref <309>: DATABASE ENTRY DATE: 1996-10-01

SEQ ID NO: 11023 - DNA, 1238 bp, Homo sapiens; identical to SEQ ID NO: 3995
  ref <308>: DATABASE ACCESSION NUMBER: EMBL / X75593
  ref <309>: DATABASE ENTRY DATE: 1994-02-02

SEQ ID NO: 11024 - protein, 203 aa, Homo sapiens; identical to SEQ ID NO: 3996
  ref <308>: DATABASE ACCESSION NUMBER: SWISS-Prot / P51153
  ref <309>: DATABASE ENTRY DATE: 2002-06-15

SEQ ID NO: 11025 - DNA, 1219 bp, Rattus norvegicus
  ref <308>: DATABASE ACCESSION NUMBER: EMBL / M86341
  ref <309>: DATABASE ENTRY DATE: 2002-02-07
atgggtgggggcctgattgagaggtatgtggctgccatggtgctgagtgcggctggtgataccctgggctacttcaacgggaagtgggaattccttcgggatggggagaagatacaccggcagttggcccagatgggtgacttggaagccatagatgtggcccagtggagagtcagcgatgacaccatcatgcacctggctacagcagaagccctcatggaagccggcagttccccggatttgcctcagctgtattccctactagctaaacattaccgggactgcatgggagacatggatggccgggcaccaggtggtgcttgcatgcagaatgccatgcagctggaccccgacagggctgacggctggaggattcccttcaacagtcacgagggcggctgtggagccgccatgcgcgccatgtgcatcgggctgaggtttcctcaccccagccagctggacactctgatccaagtgagcatcgagagcggccggatgacccaccaccaccccacaggctacctcggaagcctagcgtcagctctttttaccgcatatgccgtgaacggcaaatcaccacggcagtgggggaaggggctgatggaggtgctgccagaggccaaagcgtatgtcacccagtcaggctactttgtgaaggaaaatctccaacactggtcctacttcgagaaagaatgggaaaagtacctggaacttagaggaattttggatggcaagtccgctcccgtcttcccgcaaccctttggtgtgaaggaaagggatcagttctatatcgaagtgagctactcaggctggggtggcagcagtggacacgatgcccccatgattgcctatgatgccctcctggctgcaggggattcctggaaggagctcgcacacagagcctttttccatggtggagacagtgattccacggccaccattgctggatgctggtggggagttatgcacggtttcaaaggggtaaacccttctaactatgagaagctcgaataccgacagcggctagaagaggccggaagagctttgtattctctggggtcaaaagaagacactatactaggtccctagggaaagggtggtttgttttggcggttttttcccctgtatccccgacactcattctcttcagcttttccagcgtcaagaatcctaattttgtgtttgaagaattctgtgtaaacaagtcccttgggcggct

SEQ ID NO: 11026 - protein, 362 aa, Rattus norvegicus
  ref <308>: DATABASE ACCESSION NUMBER: SWISS-Prot / Q02589
  ref <309>: DATABASE ENTRY DATE: 2002-06-15
MGGGLIERYVAAMVLSAAGDTLGYFNGKWEFLRDGEKIHRQLAQMGDLEAIDVAQWRVSDDTIMHLATAEALMEAGSSPDLPQLYSLLAKHYRDCMGDMDGRAPGGACMQNAMQLDPDRADGWRIPFNSHEGGCGAAMRAMCIGLRFPHPSQLDTLIQVSIESGRMTHHHPTGYLGSLASALFTAYAVNGKSPRQWGKGLMEVLPEAKAYVTQSGYFVKENLQHWSYFEKEWEKYLELRGILDGKSAPVFPQPFGVKERDQFYIEVSYSGWGGSSGHDAPMIAYDALLAAGDSWKELAHRAFFHGGDSDSTATIAGCWWGVMHGFKGVNPSNYEKLEYRQRLEEAGRALYSLGSKEDTILGP

SEQ ID NO: 11027 - DNA, 1365 bp, Homo sapiens
  ref <308>: DATABASE ACCESSION NUMBER: EMBL / L13291
  ref <309>: DATABASE ENTRY DATE: 1999-06-30
agagtcgttgttttttctgattcttcttgctcctcatcctatttcctttgtcttaatttccccacaaagacaccctctccagagcccagcaattgtgagggactgatggagaagtatgtggctgctatggtgctgagtgcagctggagatgccctggggtactacaatgggaagtgggagttcctccaggatggggagaagatacaccggcagttggcccagctgggcggcttggatgccctagacgtgggaaggtggagagttagtgacgacacagtgatgcacttggccacagcagaagctcttgtggaagctgggaaagcccctaagttgactcaactgtattacctccttgctaagcattaccaagactgcatggaagacatggatgggcgggcaccaggtggtgcctcggtgcacaacgccatgcagctgaagccgggcaagcccaatggctggaggattcccttcaacagccatgagggcggctgtggggctgccatgcgggccatgtgcatcggtctcaggttcccacaccatagccaactggacacactgatccaagtgagcatcgagagtggtcggatgacccaccaccacccaacaggctacctgggggcccttgcgtctgctctttttacagcctatgctgtgaatagcagaccacccttgcagtggggaaaaggactgatggagctgctaccagaagctaaaaagtacattgtccaatcaggctactttgtagaggaaaatcttcaacactggtcctacttccaaaccaaatgggaaaattacctaaaacttagagggattttggatggagaatcagcccctaccttccctgagtctttcggtgtgaaggagagggatcagttctacacctccctgagctactctggctggggtggcagcagtgggcacgatgcccccatgattgcctacgatgctgttcttgctgcaggagactcctggaaggagcttgcccaccgagcctttttccatggtggagacagtgattctacagctgccattgctggctgctggtggggagttatgtatggttttaaaggagtgagtccctccaactatgagaaactagaatacagaaaccggctggaagagacagctagggctttatattctctcgggtcaaaagaagacactgtaatttccctttagggagacgtgatgttcacttctgatggattcttcttttgtgtatttccttttctgctatttcttttcagtttttccaaagtcaagagtcttaaccttgtactcagggaattttgagataacaagtcccttgggcaccttaagctcagttttttcaggctcatcctgttcttccagaatctatccctt

SEQ ID NO: 11028 - protein, 357 aa, Homo sapiens
  ref <308>: DATABASE ACCESSION NUMBER: SWISS-Prot / P54922
  ref <309>: DATABASE ENTRY DATE: 2002-06-15
MEKYVAAMVLSAAGDALGYYNGKWEFLQDGEKIHRQLAQLGGLDALDVGRWRVSDDTVMHLATAEALVEAGKAPKLTQLYYLLAKHYQDCMEDMDGRAPGGASVHNAMQLKPGKPNGWRIPFNSHEGGCGAAMRAMCIGLRFPHHSQLDTLIQVSIESGRMTHHHPTGYLGALASALFTAYAVNSRPPLQWGKGLMELLPEAKKYIVQSGYFVEENLQHWSYFQTKWENYLKLRGILDGESAPTFPESFGVKERDQFYTSLSYSGWGGSSGHDAPMIAYDAVLAAGDSWKELAHRAFFHGGDSDSTAAIAGCWWGVMYGFKGVSPSNYEKLEYRNRLEETARALYSLGSKEDTVISL

SEQ ID NO: 11029 - DNA, 787 bp, Rattus norvegicus
  ref <308>: DATABASE ACCESSION NUMBER: EMBL / M86389
  ref <309>: DATABASE ENTRY DATE: 2001-10-15
cagtgcttctagatcctgagccctgaccagctcagccaagaccatgaccgagcgccgcgtgcccttctcgctactgcggagccccagctgggagccgttccgggactggtaccctgcccacagccgcctcttcgatcaagctttcggggtgcctcggtttcccgatgagtggtctcagtggttcagctccgctggttggcccggctatgtgcgccctctgcccgccgcgaccgccgagggccccgcagcagtgaccctggccaggcccgccttcagccgggcgctcaaccggcaactcagcagcggtgtctcagagatccgacagacggccgatcgctggcgcgtgtccctggacgtcaaccacttcgctcctgaggagctcacagttaagaccaaggaaggcgtggtggagatcactggcaagcacgaagaaaggcaggatgaacatggctacatctctcggtgcttcacccggaaatacacgctccctccaggtgtggaccccaccctggtgtcctcttccctgtcccctgagggcacactcaccgtggaggctccgctgcccaaagcagtcacacaatcagcggagatcaccattccggtcactttcgaggcccgtgcccaaattggaggcccagagtcggaacagtctggagccaagtagaagccttcagcttgctacccatccccagtagccgtcaccagccctccctctctgtcaatcgatatgctcttttgatacatgtactttctgaaaaactcaaataaaagttggaaactactgctc

SEQ ID NO: 11030 - protein, 206 aa, Rattus norvegicus
  ref <308>: DATABASE ACCESSION NUMBER: SWISS-Prot / P42930
  ref <309>: DATABASE ENTRY DATE: 2002-06-15
MTERRVPFSLLRSPSWEPFRDWYPAHSRLFDQAFGVPRFPDEWSQWFSSAGWPGYVRPLPAATAEGPAAVTLARPAFSRALNRQLSSGVSEIRQTADRWRVSLDVNHFAPEELTVKTKEGVVEITGKHEERQDEHGYISRCFTRKYTLPPGVDPTLVSSSLSPEGTLTVEAPLPKAVTQSAEITIPVTFEARAQIGGPESEQSGAK

SEQ ID NO: 11031 - DNA, 2496 bp, Homo sapiens
  ref <308>: DATABASE ACCESSION NUMBER: EMBL / L39370
  ref <309>: DATABASE ENTRY DATE: 2002-01-08
gaattcatttgcttttccttaacgagagaaggttccagatgagggctgaaccctcttcgccccgcccacggcccctgaacgctgggggaggagtgcatggggaggggcggccctcaaacgggtcattgccattaatagagacctcaaacaccgcctgctaaaaatacccgactggaggagcataaaagcgcagccgagcccagcgccccgcacttttctgagcagacgtccagagcagagtcagccagcatgaccgagcgccgcgtccccttctcgctcctgcggggccccagctgggaccccttccgcgactggtacccgcatagccgcctcttcgaccaggccttcgggctgccccggctgccggaggagtggtcgcagtggttaggcggcagcagctggccaggctacgtgcgccccctgccccccgccgccatcgagagccccgcagtggccgcgcccgcctacagccgcgcgctcagccggcaactcagcagcggggtctcggagatccggcacactgcggaccgctggcgcgtgtccctggatgtcaaccacttcgccccggacgagctgacggtcaagaccaaggatggcgtggtggagatcaccggtgagcccccctgctcctgcaggggagaggaggaggctagcagggcgggcagggccgggggcgtgcggttgaaacgggggtcccgggggcctggggagttaaacgttggcccagcaccgggaaaaacaggactcctgattcccttgctcaggaattgggagtgcgggtcgcttctaagggcgctttctgctctgtaatcccagcgctttgggaggccgagacgggaggatcgcttgaggccaggagttcaagactagcctgggcaacatagcgagacgcgcccccccgccccgaccccgcgccattacaaaaaaaaagcaaacaaaaatttttttaaagatcatcgatgaagagagaaaatgcgcttttctacagagtccccttcccacccacagccccatccccagataagcggggagttccctggcgcggtgccagtttctagccgctgagtgggcgtgtgcgcggctccaagtgcgcctgcgtactgctcactccccagctccgcgccctgctccgttcctcccaaaactctgaatcgaagaactttccggaagtttctgagagcccagaccggcgggcacgcccccatccccaaccccctctgttaatccctaccagcctgcagtcctggctgcttccaagcaggaggtggggcctctggctagcggggccgaaaaagtcccctcccccgcatgtctgatttccctcttccccccaaaggcaagcacgaggagcggcaggacgagcatggctacatctcccggtgcttcacgcggaaatacacgtgagtcctggcgccaggtcggggtgggtgggtggcgtgggggtggggtcagggaagagggcacagggacccacccggtgtgtaatgtaacgcttgcctttcctctctgcacgtccaggctgccccccggtgtggaccccacccaagtttcctcctccctgtcccctgagggcacactgaccgtggaggcccccatgcccaagctagccacgcagtccaacgagatcaccatcccagtcaccttcgagtcgcgggcccagcttgggggcagaagctgcaaaatccgatgagactgccgccaagtaaagccttagcccggatgcccacccctgctgccgccactggctgtgcctcccccgccacctgtgtgttcttttgatacatttatcttctgtttttctcaaataaagttcaaagcaaccacctgtcactggcccaggccctggtgtttgtggaaggaagcctcaggcacctgccatttgctggctttcaggagtcatctttgctcaggcccgtgctgggccatgtgggtacactggtgtaggttgctggacacaggctgactcacatccataaagacagaggtcttagggccgggcgcagtggctcatacctacaatcccagcactttggggggttgaagcaggaggagtgcttgaagccaagagttctagaccagcctggacaacatagtaagactgtctctaaaaaataaaaattaggcagggtggtactgcacgcctgtagtcccagctactcaggaggctgaggcaggaggatcgcttgagcccagagttgtgaaggtacagtgagctaacatcgtgccattgcactccagcctgggcaacagaacaagatcctgtctcaaaacaaccaaaagcccagagagaaagagtgagaccccatctttaaaagaaaaaaaaaaaaggtcatgattgcaaggtcacgattgcaattaaaactgtaaggtggggaaggaggaggaaataagagaagcacctgaggcttgagttctcaggagcacctaggttgggtcccaggtgaaggggcacagaggtaattgcacctcagagctgatgggaggattactatgtca

SEQ ID NO: 11032 - protein, 205 aa, Homo sapiens
  ref <308>: DATABASE ACCESSION NUMBER: SWISS-Prot / HHHU27
  ref <309>: DATABASE ENTRY DATE: 2002-06-15
MTERRVPFSLLRGPSWDPFRDWYPHSRLFDQAFGLPRLPEEWSQWLGGSSWPGYVRPLPPAAIESPAVAAPAYSRALSRQLSSGVSEIRHTADRWRVSLDVNHFAPDELTVKTKDGVVEITGKHEERQDEHGYISRCFTRKYTLPPGVDPTQVSSSLSPEGTLTVEAPMPKLATQSNEITIPVTFESRAQLGGPEAAKSDETAAK

SEQ ID NO: 11033 - DNA, 3804 bp, Rattus norvegicus
  ref <308>: DATABASE ACCESSION NUMBER: EMBL / M86621
  ref <309>: DATABASE ENTRY DATE: 2000-03-04
tcggccccgcccggccggcccgcccgtgccctgccctgcccgcctctctcctcgcgccctccggcagacgtcggcgccccggctcagtccctcgccgcgtgcagctccgcccgctccgggccggcagggagggcactgatcttcgatcgcgaagatggctgctggctgcctgctggccttgactctgacacttttccaatcttggctgatcggcccctcgagcgaggagcccttcccttcgcccgtcactatcaagtcatgggtggataaaatgcaggaagaccttgtcacactggcaaagacagcaagtggagtgactcagcttgctgacatttatgaaaaataccaagatttgtatactgtggagccaaataatgcacgccaactggttgaaattgcagctagagacattgagaaacttctgagcaacagatctaaagccctggtgcgcctggctatggaagcagagaaagtccaagccgcccaccaatggagggaagattttgcaagcaacgaagttgtctactacaacgctaaagacgatcttgatcctgaaagaaatgagagtgagtcaggcagccaacggattaaacctgttttcatcgaagacgctaattttggacgccagatatcctatcaacatgcagcggtccatattcccacggacatctatgagggctcaaccatagtgttaaacgaactcaactggacaagtgccttagatgaagttttcaaaagaaatcgagatgaagaccctacattgctgtggcaagtgtttgcagccgaccgcctggcccgatattatccagcttctccgtgggtggataacagcagaactccaaacaagatcgatctctacgatgtacgcagaagaccatggtacatccagggagctgcatcccccaaagacatgctcattctggtggacgtgagtggaagtgtgagcggattgactctgaaactcatccggacatctgtctctgagatgttagaaaccctttccgatgatgatttcgtgaatgtagcttcatttaacagcaatgctcaggatgtgagttgtttccagcacctggttcaagcgaatgtaaggaacaagaaggtgctgaaggatgcggtgaataacatcacagcaaaggggataacagattacaagaaaggctttacgttcgcgtttgaacagctacttaattataatgtttccagagccaattgtaataagatcatcatgttattcacggatggaggagaagagagagcccaggagatatttgccaagtacaataaagacaaaaaagtccgcgtgtttacattttctgttggtcaacataattatgacagaggacctattcagtggatggcttgtgaaaacaaaggttattattatgagattccctctattggtgcaataagaatcaatactcaggaatatctagatgttctgggaagaccaatggttttagccggggacaaagcaaagcaagtccagtggacaaatgtgtatttggatgctctggagctgggacttgtcattactggaactctaccggtcttcaacgtcactggccagtctgaaaataagactaacttgaagaaccagttgattcttggtgtgatgggcgttgatgtgtctctggaagatattaagagattgacaccacgttttacactgtgccccaacggttactattttgcaatcgatcctaatggttatgtcttactgcatccaaatcttcagccaaagaaccccaaatctcaggagccggtcacactggattttctcgatgctgagttagagaatgatattaaagtggagattcgaaataaaatgatagacggagaaagtggagaaaaaacattcagaactctggtcaaatctcaagatgagagatatattgacaaaggaaatcgaacatacacatggacacctgtcaatggcacagattacaggtatttggccttggtattgccaacctacagtttttactatataaaagccaaaatagaagagacaataactcaggccagatcaaaaaaggggaaaatgaaggattcagaaaccctgaagccagacaattttgaagaatctggctacactttcatagcaccaagggaatactgcaatgacctgaaaccttcagataataacactgaatttcttttaaatttcaatgaatttattgataggaaaactccaaacaacccttcctgtaatacagatttgattaatagaatcttgctggatgcgggttttacaaatgaacttgtccaaaattattggagtaaacagaaaaatatcaaaggagtgaaggcacgctttgtggtgactgatggcggaattacaagagtttaccccaaagaggctggagaaaactggcaagagaacccagagacgtatgaggacagcttctacaaacggagcctagataacgataactacgttttcactgcgccctacttcaacaaaagtggacctggtgcctatgaatctggaattatggtaagcaaagctgtagaactgtacatccaaggaaaacttcttaagcctgcagttgtgggaattaaaattgacgtaaactcctggatagaaaattttaccaaaacttcaatcagggatccgtgtgctggtccagtttgtgactgcaaaagaaacagtgatgtaatggactgtgtcattctagatgatggtggatttcttctgatggccaatcatgatgattacactaatcagattggacgtttttttggagagattgacccgcgcatgatgagacacctggttaatatatcactttatgcattcaataaatcatatgactatcagtctgtgtgtgatccaggggcagcaccaaagcaaggagcaggacatcgctcagcctatgtgccatcaattacagacatactccagattggctggtgggccactgctgccgcctggtctattctccagcagctactcttgagtttgacatttccacggctccttgaggcagttgaaatggaagaggatgacttcacagcttccctgtctaagcagagctgcatcacagaacaaactcagtacttcttcaagaacgatactaaatcattcagtggtttactggactgtggaaactgttccaggatctttcatgttgagaagcttatgaacaccaacctagtgttcataatggtggagagcaagggaacatgtccgtgtgacacgcggctgctcatgcaagcagaacagacttctgatggtccagatccttgcgacatggttaagcagcccagataccgaaaaggacctgatgtctgctttgataacaatgtgctggaggattataccgactgtggtggtgtttctggattaaacccttccttatggtctatctttggactccaatttatactcctttggctggtatctggcagcagacactatctatggtgaccctctaaacccatgatctgcaacttaattccatgccctgccaaaacatgagccctcagttacattaaaatagagcccgttgaagaagctccacagaaccttagctgggcctctaccctgatgtaactgtgaggcttagattcctgaccatcgctggctgcatgtcagggtgttggaaactgaaactcgtgtgaacatgctgcatcatctgtgtccaacatcaaagcaaagctctactcattctctgtgggaggtttgggagttcgctgttgcactgttggagattacgtggaaaaggctcccccacgcaggccttatgaaaagaagcagtcttgactttgacctagcatttcaacctgctgcagttttaccaa

SEQ ID NO: 11034 - protein, 1091 aa, Rattus norvegicus
  ref <308>: DATABASE ACCESSION NUMBER: SWISS-Prot / P54290
  ref <309>: DATABASE ENTRY DATE: 2002-06-15
MAAGCLLALTLTLFQSWLIGPSSEEPFPSPVTIKSWVDKMQEDLVTLAKTASGVTQLADIYEKYQDLYTVEPNNARQLVEIAARDIEKLLSNRSKALVRLAMEAEKVQAAHQWREDFASNEVVYYNAKDDLDPERNESESGSQRIKPVFIEDANFGRQISYQHAAVHIPTDIYEGSTIVLNELNWTSALDEVFKRNRDEDPTLLWQVFAADRLARYYPASPWVDNSRTPNKIDLYDVRRRPWYIQGAASPKDMLILVDVSGSVSGLTLKLIRTSVSEMLETLSDDDFVNVASFNSNAQDVSCFQHLVQANVRNKKVLKDAVNNITAKGITDYKKGFTFAFEQLLNYNVSRANCNKIIMLFTDGGEERAQEIFAKYNKDKKVRVFTFSVGQHNYDRGPIQWMACENKGYYYEIPSIGAIRINTQEYLDVLGRPMVLAGDKAKQVQWTNVYLDALELGLVITGTLPVFNVTGQSENKTNLKNQLILGVMGVDVSLEDIKRLTPRFTLCPNGYYFAIDPNGYVLLHPNLQPKNPKSQEPVTLDFLDAELENDIKVEIRNKMIDGESGEKTFRTLVKSQDERYIDKGNRTYTWTPVNGTDYRYLALVLPTYSFYYIKAKIEETITQARSKKGKMKDSETLKPDNFEESGYTFIAPREYCNDLKPSDNNTEFLLNFNEFIDRKTPNNPSCNTDLINRILLDAGFTNELVQNYWSKQKNIKGVKARFVVTDGGITRVYPKEAGENWQENPETYEDSFYKRSLDNDNYVFTAPYFNKSGPGAYESGIMVSKAVELYIQGKLLKPAVVGIKIDVNSWIENFTKTSIRDPCAGPVCDCKRNSDVMDCVILDDGGFLLMANHDDYTNQIGRFFGEIDPRMMRHLVNISLYAFNKSYDYQSVCDPGAAPKQGAGHRSAYVPSITDILQIGWWATAAAWSILQQLLLSLTFPRLLEAVEMEEDDFTASLSKQSCITEQTQYFFKNDTKSFSGLLDCGNCSRIFHVEKLMNTNLVFIMVESKGTCPCDTRLLMQAEQTSDGPDPCDMVKQPRYRKGPDVCFDNNVLEDYTDCGGVSGLNPSLWSIFGLQFILLWLVSGSRHYLW

SEQ ID NO: 11035 - DNA, 1546 bp, Homo sapiens
  ref <308>: DATABASE ACCESSION NUMBER: EMBL / M76560
  ref <309>: DATABASE ENTRY DATE: 1999-07-02
atggtccagaagaccagcatgtcccggggcccttacccaccctcccaggagatccccatgggagtcttcgaccccagcccgcagggcaaatacagcaagaggaaagggcgattcaaacggtcagatgggagcacgtcctcggataccacatccaacagctttgtccgccagggctcagcggagtcctacaccagccgtccatcagactctgatgtatctctggaggaggaccgggaagccttaaggaaggaagcagagcgccaggcattagcgcagctcgagaaggccaagaccaagccagtggcatttgctgtgcggacaaatgttggctacaatccgtctccaggggatgaggtgcctgtgcagggagtggccatcaccttcgagcccaaagacttcctgcacatcaaggagaaatacaataatgactggtggatcgggcggctggtgaaggagggctgtgaggttggcttcattcccagccccgtcaaactggacagccttcgcctgctgcaggaacagaagctgcgccagaaccgcctcggctccagcaaatcaggcgataactccagttccagtctgggagatgtggtgactggcacccgccgccccacaccccctgccagtgccaaacagaagcagaagtcgacagagcatgtgcccccctatgacgtggtgccttccatgaggcccatcatcctggtgggaccgtcgctcaagggctacgaggttacagacatgatgcagaaagctttatttgacttcttgaagcatcggtttgatggcaggatctccatcactcgtgtgacggcagatatttccctggctaagcgctcagttctcaacaaccccagcaaacacatcatcattgagcgctccaacacacgctccagcctggctgaggtgcagagtgaaatcgagcgaatcttcgagctggcccggacccttcagttggtcgctctggatgctgacaccatcaatcacccagcccagctgtccaagacctcgctggcccccatcattgtttacatcaagatcacctctcccaaggtacttcaaaggctcatcaagtcccgaggaaagtctcagtccaaacacctcaatgtccaaatagcggcctcggaaaagctggcacagtgcccccctgaaatgtttgacatcatcctggatgagaaccaattggaggatgcctgcgagcatctggcggagtacttggaagcctattggaaggccacacacccgcccagcagcacgccacccaatccgctgctgaaccgcaccatggctaccgcagccctggctgccagccctgcccctgtctccaacctccaggtacaggtgctcacctcgctcaggagaaacctcggcttctggggcgggctggagtcctcacagcggggcagtgtggtgccccaggagcaggaacatgccatgtagtgggcgccctgcccgtcttccctcctgctctggggtcggaactggagtgcagggaacatggaggaggaagggaagagctttattttgtaaaaaaataagatgagcggca

SEQ ID NO: 11036 - protein, 598 aa, Homo sapiens
  ref <308>: DATABASE ACCESSION NUMBER: SWISS-Prot / Q02641
  ref <309>: DATABASE ENTRY DATE: 2002-06-15
MVQKTSMSRGPYPPSQEIPMEVFDPSPQGKYSKRKGRFKRSDGSTSSDTTSNSFVRQGSAESYTSRPSDSDVSLEEDREALRKEAERQALAQLEKAKTKPVAFAVRTNVGYNPSPGDEVPVQGVAITFEPKDFLHIKEKYNNDWWIGRLVKEGCEVGFIPSPVKLDSLRLLQEQKLRQNRLGSSKSGDNSSSSLGDVVTGTRRPTPPASAKQKQKSTEHVPPYDVVPSMRPIILVGPSLKGYEVTDMMQKALFDFLKHRFDGRISITRVTADISLAKRSVLNNPSKHIIIERSNTRSSLAEVQSEIERIFELARTLQLVALDADTINHPAQLSKTSLAPIIVYIKITSPKVLQRLIKSRGKSQSKHLNVQIAASEKLAQCPPEMFDIILDENQLEDACEHLAEYLEAYWKATHPPSSTPPNPLLNRTMATAALAASPAPVSNLQGPYLASGDQPLERATGEHASMHEYPGELGQPPGLYPSSHPPGRAGTLRALSRQDTFDADTPGSRNSAYTELGDSCVDMETDPSEGPGLGDPAGGGTPPARQGSWEDEEEDYEEELTDNRNRGRNKARYCAEGGGPVLGRNKNELEGWGRGVYIR

SEQ ID NO: 11037 - DNA, 2041 bp, Rattus norvegicus
  ref <308>: DATABASE ACCESSION NUMBER: EMBL / M87067
  ref <309>: DATABASE ENTRY DATE: 2000-03-04
gcggccgcctctttgtatccaacatccgggtttccccgcaggctcggctccgtggccaccgctcaggagccattttggactcggttcagctcccctccccctcccccccttcatggcccctccggactcggcccctgcgcccggggcccgggcccagccccgttgcgccatgcccgcgtcgggcgcgccctggcccgcgccccgccgccgccccccggctcccgcgtcgccccatagcccgggccgcactgtgcgccgcccgcagcggccctgagcccttatccccgcacgctgcctgggaaccgaagcgcagaagcgcgcgcgtctggaagcgagacccagagaaggagcgggaagcagagcgcagccgccgccgggccctgcgcgcccggggagcgcagcgcggccctgcccgcgggctccgggtgtccgcggggcggccccgcggaacatgacggcgccctgggcggccctcgcccttctctggggatcgctgtgcgccggttccgggcgaggggaagctgagactcgggagtgcatctactacaacgccaactgggagctggagcgcaccaaccagagcggcctggagcgctgcgagggggaacaggacaagcggctgcactgctatgcctcgtggcccaacagctcgggcaccatcgagctggtgaagaagggctgctggctagatgacttcaattgctacgacaggcaggagtgtgtggccactgaggagaacccccaggtgtatttctgctgctgtgaaggcaatttctgcaacgagcgcttcacccatttgccggagcctgggggcccagaagtcacgtacgagccacccccgacagcccccaccctgctcacggtgctggcctattcgctgctgcccattggaggcctctctctcatcgtcctgctggccttctggatgtaccgacatcgaaagcctccctacggccacgtggacatccatgaggaccctgggcctcctcccccatcgcctctggtgggcctgaagccgctacagttgctggagatcaaggctcgaggtcgctttggctgcgtctggaaggctcagctcatgaacgactttgtggctgtgaagatcttcccacttcaggacaagcagtcgtggcagagtgagcgggagatcttcagcacaccgggcatgaagcacgaaaacctcctgcagttcattgctgcagagaaacgaggatgctccaacctggaggtggagctgtggctcatcacagttccttccacgacaagggctccctcacggattacctcaaggggaacatcatcacgtggaacgagctgtgtcatgtggcagagacgatgtcacgaggcctctcgtacctgcatgaggatgtgccgtggtgtcgtggcgagggccacaagccttctattgcccacagggacttcaaaagcaagaatgtcctgctgaagagcgacctcaccgcggtgctggctgactttggcctggctgttcggtttgagccggggaagcctccaggggatacccatgggcaggttggcaccagacggtacatggcccccgaggtgctggagggggccatcaacttccagagagacgccttcctgcgtatcgacatgtacgccatgggcctggtgctgtgggagctcgtttctcgttgcaaggccgcagatgggcctgtcgatgagtacatgctgcctttcgaggaagagattggccaacacccttcactggaggagcttcaggaggtggttgtccacaagaagatgaggcccaccattaaggatcactggctgaaacatccgggcctggcccagctctgcgtgaccatcgaggagtgctgggaccatgatgcagaggctcgtctgtctgcaggctgtgtggaagagcgggtatccctgatcaggaggtcggtcaacggctctacctcggactgtctcgtctctctggtgacctcctcgaccaatgtggacctgctccctaaagagtccagcatctaagcccaggacactaggctttctccagactcagtggatctgaagaaga

SEQ ID NO: 11038 - DNA, 1587 bp, Homo sapiens
  ref <308>: DATABASE ACCESSION NUMBER: EMBL / X77533
  ref <309>: DATABASE ENTRY DATE: 1994-11-16
gaacatgacggcgccctgggtggccctcgccctcctctggggatcgctgtggcccggctctgggcgtggggaggctgagacacgggagtgcatctactacaacgccaactgggagctggagcgcaccaaccagagcggcctggagcgctgcgaaggcgagcaggacaagcggctgcactgctacgcctcctgggccaacagctctggcaccatcgagctcgtgaagaagggctgctggctagatgacttcaactgctacgataggcaggagtgtgtggccactgaggagaacccccaggtgtacttctgctgctgtgaaggcaacttctgcaacgagcgcttcactcatttgccagaggctgggggcccggaagtcacgtacgagccacccccgacagcccccaccctgctcacggtgctggcctactcactgctgcccatcgggggcctttccctcatcgtcctgctggccttttggatgtaccggcatcgcaagcccccctacggtcatgtggacatccatgaggaccctgggcctccaccaccatcccctctggtgggcctgaagccactgcagctgctggagatcaaggctcgggggcgctttggctgtgtctggaaggcccagctcatgaatgactttgtagctgtcaagatcttcccactccaggacaagcagtcgtggcagagtgaacgggagatcttcagcacacctggcatgaagcacgagaacctgctacagttcattgctgccgagaagcgaggctccaacctcgaagtagagctgtggctcatcacggccttccatgacaagggctccctcacggattacctcaaggggaacatcatcacatggaacgaactgtgtcatgtagcagagacgatgtcacgaggcctctcatacctgcatgaggatgtgccctggtgccgtggcgagggccacaagccgtctattgcccacagggactttaaaagtaagaatgtattgctgaagagcgacctcacagccgtgctggctgactttggcttggctgttcgatttgagccagggaaacctccaggggacacccacggacaggtaggcacgagacggtacatggctcctgaggtgctcgagggagccatcaacttccagagagatgccttcctgcgcattgacatgtatgccatggggttggtgctgtgggagcttgtgtctcgctgcaaggctgcagacggacccgtggatgagtacatgctgccctttgaggaagagattggccagcacccttcgttggaggagctgcaggaggtggtggtgcacaagaagatgaggcccaccattaaagatcactggttgaaacacccgggcctggcccagctttgtgtgaccatcgaggagtgctgggaccatgatgcagaggctcgcttgtccgcgggctgtgtggaggagcgggtgtccctgattcggaggtcggtcaacggcactacctcggactgtctcgtttccctggtgacctctgtcaccaatgtggacctgccccctaaagagtcaagcatctaagcccaggacatgagtgtctctccagactcagtggatctgaagaa

SEQ ID NO: 11039 - protein, 512 aa, Homo sapiens
  ref <308>: DATABASE ACCESSION NUMBER: SWISS-Prot / Q13705
  ref <309>: DATABASE ENTRY DATE: 2002-06-15
MTAPWVALALLWGSLCAGSGRGEAETRECIYYNANWELERTNQSGLERCEGEQDKRLHCYASWANSSGTIELVKKGCWLDDFNCYDRQECVATEENPQVYFCCCEGNFCNERFTHLPEAGGPEVTYEPPPTAPTLLTVLAYSLLPIGGLSLIVLLAFWMYRHRKPPYGHVDIHEDPGPPPPSPLVGLKPLQLLEIKARGRFGCVWKAQLMNDFVAVKIFPLQDKQSWQSEREIFSTPGMKHENLLQFIAAEKRGSNLEVELWLITAFHDKGSLTDYLKGNIITWNELCHVAETMSRGLSYLHEDVPWCRGEGHKPSIAHRDFKSKNVLLKSDLTAVLADFGLAVRFEPGKPPGDTHGQVGTRRYMAPEVLEGAINFQRDAFLRIDMYAMGLVLWELVSRCKAADGPVDEYMLPFEEEIGQHPSLEELQEVVVHKKMRPTIKDHWLKHPGLAQLCVTIEECWDHDAEARLSAGCVEERVSLIRRSVNGTTSDCLVSLVTSVTNVDLPPKESSI

SEQ ID NO: 11040 - DNA, 3069 bp, Rattus norvegicus
  ref <308>: DATABASE ACCESSION NUMBER: EMBL / M88709
  ref <309>: DATABASE ENTRY DATE: 2000-03-04
cggggcgaagctggctgcatcctgggctggagaccaggaaggcggaatgataaggctttggcatgggtattagttaatttctgccaggaagcagccttttcctgttccttgtgtcctgagacctgctagggtaagatttagggaagggcattagacccctcccgctgcccacccaggagcgggtgtgcccatgcgagtcacactggcatactcacacaaatcccagcagtactgctgcgcggtgagggggtgcgcaagggacaggcttcaactccccttggagtggagccttcccaacaggaaagtctcccggtgtcgctcaggagagtggagccaatgtgtggcttggaggtggtctgctgtgctcccagtgaagattggtgctgatgattcttaccagttgtgtgtatgtgcaagggggaaaaaatcagagacgctgtctgcctgctcccatctcgcgcgcgctctctctcttctgctctctccctccctttgcaaacattggatttaaacctgctcagaattcagtacagaggaagcagcctcggtggtagcagcagcagcaccagcagcagcagcaccagcagcaccagcaccagcaggagctcgccgggccgccgcgcaccacagcctcgagatgtaccatcccgcctactggatcgtcttctcggccaccactgccctgctcttcatcccaggagtgccggtgcgcagcggagatgccacctttcccaaagctatggacaacgtgacggtccggcagggagagagcgccaccctcaggtgtaccatagatgaccgggtcaccagagtagcctggctaaaccgcagcacaatcctctacgctgggaatgacaagtggtccatagaccctcgagtgatcatcttggtcaacacgcctacccagtacagtatcatgatccagaatgtggatgtttatgacgaaggtccgtacacctgctctgtgcagacagacaatcaccccaaaacctcccgggtccacctcatagtgcaagttcctccccagataatgaacatctcttcagacattactgtgaatgagataagcagtgtgaccttgttatgtctcgcaattggcagaccagaaccaacagtgacatggcgacacctgtcagtcaaggaaggccagggctttgtgagtgaagatgaatacctggaaatctcagacatcaaacgcgaccaatctggagagtatgagtgcagcgccttgaatgatgtcgctgcacctgatgttcggaaagtaaaaatcactgtaaactatcctccctatatctcaaaagcgaagaacactggcgtttcagtaggccagaagggcatcctgagctgtgaagcctctgctgtccccatggctgaattccagtggttcaaggaagataccaggttagccactggcctggatggcgtgagaattgagaacaaaggccgcatatccactttgactttcttcaatgtctcagagaaggattatgggaactatacctgtgtggccacaaacaagcttgggaacaccaatgccagcatcaccctgtatgggcctggagcagtcattgatggtgtaaactcggcctctagagcactggcttgtctctggctctcagggaccttctttgcccacttcttcatcaagttttgataagaaaccttaggtcctctgagcatcgcctgcttctccatatcacagactttaatctacactgcggaggggcaaaccagtttgggctttcttttggttatttttttgttcttcttgactgtttagttttttggtttgatttctgggattttcaatttgatttgtttttcttttttcgtttgaatggaccggggttgggggttgggatgggcagggttctaccacgagtaggataatcaggtattggtgggcccccaaatggaatatattcctgctaccttggccttccttttctctacttctcttcctaccaccattaacacacaaacacacaagcacacgccctaaagatggcctaaaaaatgtcccatgacacgcaccctgaaggtacaacttggcccacagtgcagtacacaataagagttgcatctacatttcctgttttctttgtcctttaagttttcaataagacagtttaaaaagagcacatccttatccctatgtttgtatcacctatcccattaagctgcacaccttttctaagaaactttcttactacatcctcaatgtgcacacatgtacattctcataaaaattttaccatcttctctggccattctgcttaatctgcattttccactagcagtaagacttacaggcttgatgaaatatacatgtatccaaagctacaaatttagaagtcacgagggaagtctatctaggggtagtacttcccttaaaatgctaatgcaactcataaaaaagtgatcaatagctagctaattatatcaagctatcaaagcaatcatattattatccagttactcaattgatttctctctccatctccttctacatacctatctttcttataatctatttgttcaatttatctaactactctttttctcttcccactgcactatccattcatctcatttaaatctctaatcatattgtgactgtgcccttatattgtgtctctgcactaccaccaagacattgccaccttcaaaattgcctagcaacttcttatgtgaaagccagtaatgtctcgggctaactacccagaagaacaatttcctataccatggatccttgggaatgcactaacccatccacccaaattaggccttgtgaacagatggaccaaagtagcaatctatggatcagtcactcatgattttccgagagactgttcccttagccaccttctcaggaggcaggtcagccccgaagaagccttgattatgctgaatttctcctttaacagctggaaaattaaggtaccaaccctgtgcttctctcagcctttcaagaaaagtacatgtcaggaacttggagaaacttcttcatggctggcttttattagcagaaagaacctgaccaaaaaaaaaaccaaaaaaaaaaaaaaa

SEQ ID NO: 11041 - protein, 345 aa, Rattus norvegicus
  ref <308>: DATABASE ACCESSION NUMBER: SWISS-Prot / P32736
  ref <309>: DATABASE ENTRY DATE: 2001-10-16
MGVCGYLFLPWKCLVVVSLRLLFLVPTGVPVRSGDATFPKAMDNVTVRQGESATLRCTIDDRVTRVAWLNRSTILYAGNDKWSIDPRVIILVNTPTQYSIMIQNVDVYDEGPYTCSVQTDNHPKTSRVHLIVQVPPQIMNISSDITVNEISSVTLLCLAIGRPEPTVTWRHLSVKEGQGFVSEDEYLEISDIKRDQSGEYECSALNDVAAPDVRKVKITVNYPPYISKAKNTGVSVGQKGILSCEASAVPMAEFQWFKEDTRLATGLDGVRIENKGRISTLTFFNVSEKDYGNYTCVATNKLGNTNASITLYGPGAVIDGVNSASRALACLWLSGTFFAHFFIKF

SEQ ID NO: 11042 - DNA, 1478 bp, Homo sapiens
  ref <308>: DATABASE ACCESSION NUMBER: EMBL / L34774
  ref <309>: DATABASE ENTRY DATE: 1999-07-02
gaccaggactgtgcggctgccggagtcctgggaagttgtggctgtcgagaatgggggtctgtgggtacctgttcctgccctggaagtgcctcgtggtcgtgtctctcaggctgctgttccttgtacccacaggagtgcccgtgcgcagcggagatgccaccttccccaaagctatggacaacgtgacggtccggcagggggagagcgccaccctcaggtgtaccatagatgaccgggtaacccgggtggcctggctaaaccgcagcaccatcctctacgctgggaatgacaagtggtccatagaccctcgtgtgatcatcctggtcaatacaccaacccagtacagcatcatgatccaaaatgtggatgtgtatgacgaaggtccgtacacctgctctgtgcagacagacaatcatcccaaaacgtcccgggttcacctaatagtgcaagttcctcctcagatcatgaatatctcctcagacatcactgtgaatgagggaagcagtgtgaccctgctgtgtcttgctattggcagaccagagccaactgtgacatggagacacctgtcagtcaaggaaggccagggctttgtaagtgaggatgagtacctggagatctctgacatcaagcgagaccagtccggggagtacgaatgcagcgcgttgaacgatgtcgctgcgcccgatgtgcggaaagtaaaaatcactgtaaactatcctccctatatctcaaaagccaagaacactggtgtttcagtcggtcagaagggcatcctgagctgtgaagcctctgcagtccccatggctgaattccagtggttcaaggaagaaaccaggttagccactggtctggatggaatgaggattgaaaacaaaggccgcatgtccactctgactttcttcaatgtttctgaaaaggattatgggaactatacttgtgtggccacgaacaagcttgggaacaccaatgccagcatcacattgtatgggcctggagcagtcattgatggtgtaaactcggcctccagagcactggcttgtctctggctatcagggaccctcttagcccacttcttcatcaagttttgataagaaatcctaggtcctctgagcaacgcctgcttctcatatcacagactttaatctacactgcggagagcaaaccagcttgggcttctttttgtttttttctgttattctagatttgttttctttttgtttttgtttatttgtttgtttgcttttatttccagcttgaatgagtggggttgggggcggggtgggcagggttctaccacgtgtaggataatcattcattggtgtgtccaaaaatggggtctgctcctgctaccttgacccttccctttcctctgcttctctcctcatcatcattcccaacaacatcctctgccacacacaacaaaacgtaagtttcatttgggcaaaaattgagcctcacaataaacaccctgaagacac

SEQ ID NO: 11043 - protein, 345 aa, Homo sapiens
  ref <308>: DATABASE ACCESSION NUMBER: SWISS-Prot / Q14982
  ref <309>: DATABASE ENTRY DATE: 2001-10-16
MGVCGYLFLPWKCLVVVSLRLLFLVPTGVPVRSGDATFPKAMDNVTVRQGESATLRCTIDDRVTRVAWLNRSTILYAGNDKWSIDPRVIILVNTPTQYSIMIQNVDVYDEGPYTCSVQTDNHPKTSRVHLIVQVPPQIMNISSDITVNEGSSVTLLCLAIGRPEPTVTWRHLSVKEGQGFVSEDEYLEISDIKRDQSGEYECSALNDVAAPDVRKVKITVNYPPYISKAKNTGVSVGQKGILSCEASAVPMAEFQWFKEETRLATGLDGMRIENKGRMSTLTFFNVSEKDYGNYTCVATNKLGNTNASITLYGPGAVIDGVNSASRALACLWLSGTLLAHFFIKF

SEQ ID NO: 11044 - DNA, 2793 bp, Rattus norvegicus; identical to SEQ ID NO: 4079
  ref <308>: DATABASE ACCESSION NUMBER: EMBL / M91652
  ref <309>: DATABASE ENTRY DATE: 2000-03-04

SEQ ID NO: 11045 - protein, 373 aa, Rattus norvegicus; identical to SEQ ID NO: 4080
  ref <308>: DATABASE ACCESSION NUMBER: SWISS-Prot / P09606
  ref <309>: DATABASE ENTRY DATE: 1998-12-15

SEQ ID NO: 11046 - DNA, 1366 bp, Homo sapiens; identical to SEQ ID NO: 4081
  ref <308>: DATABASE ACCESSION NUMBER: EMBL / Y00387
  ref <309>: DATABASE ENTRY DATE: 1993-09-12

SEQ ID NO: 11047 - protein, 373 aa, Homo sapiens; identical to SEQ ID NO: 4082
  ref <308>: DATABASE ACCESSION NUMBER: SWISS-Prot / P15104
  ref <309>: DATABASE ENTRY DATE: 2002-06-15

SEQ ID NO: 11048 - DNA, 729 bp, Rattus norvegicus
  ref <308>: DATABASE ACCESSION NUMBER: EMBL / M98049
  ref <309>: DATABASE ENTRY DATE: 2000-07-07
agagttaagatgttgcatcgcttggccttcccagtcatgtcctggatgctgctctcctgcctgatgctcttatcacaggtgcaaggagaagactctccgaagaaaataccctctgcacgcattagttgccccaaaggctcccaggcatatggctcctactgctatgccctgtttcagataccacagacctggtttgatgcagaactggcctgccagaagagacctgaaggacaccttgtatctgtgctcaatgtagctgaagcttcattcttggcatccatggtcaagaacactggaaacagctaccaatatacctggattggactccatgaccccactcttggtggagaacccaatggaggtggatgggagtggagtaacaatgacataatgaattatgtcaactgggagaggaacccatctactgccttagaccgcggattctgtggcagcttgtcaagatcttctggatttctaagatggagagataccacatgtgaagtgaagttgccctacgtctgcaaatttacaggttaaaattaccagacagcaaacagctttagtttgtcctgaagcacatcctgtcaaggggcaaaatatgaagacttgcgtagaaaaagtgtattctatctacagtccacattggagctctaatcattctttagccaattttgtataagttgtgtcctcatgtcttggaaagcagtaataaacctcagtctctcttcg

SEQ ID NO: 11049 - protein, 175 aa, Rattus norvegicus
  ref <308>: DATABASE ACCESSION NUMBER: SWISS-Prot / P25031
  ref <309>: DATABASE ENTRY DATE: 2002-06-15
MLHRLAFPVMSWMLLSCLMLLSQVQGEDSPKKIPSARISCPKGSQAYGSYCYALFQIPQTWFDAELACQKRPEGHLVSVLNVAEASFLASMVKNTGNSYQYTWIGLHDPTLGGEPNGGGWEWSNNDIMNYVNWERNPSTALDRGFCGSLSRSSGFLRWRDTTCEVKLPYVCKFTG

SEQ ID NO: 11050 - DNA, 784 bp, Homo sapiens
  ref <308>: DATABASE ACCESSION NUMBER: EMBL / D13510
  ref <309>: DATABASE ENTRY DATE: 1999-05-24
agtgactcctgattgccatcctcaagtcgcagacactatgctgcctcccatggccctgcccagtgtatcttggatgctgctttcctgcctcatgctgctgtctcaggttcaaggtgaagaaccccagagggaactgccctctgcacggatccgctgtcccaaaggctccaaggcctatggctcccactgctatgccttgtttttgtcaccaaaatcctggacagatgcagatctggcctgccagaagcggccctctggaaacctggtgtctgtgctcagtggggctgagggatccttcgtgtcctccctggtgaagagcattggtaacagctactcatacgtctggattgggctccatgaccccacacagggcaccgagcccaatggagaaggttgggagtggagtagcagtgatgtgatgaattactttgcatgggagagaaatccctccaccatctcaagccccggccactgtgcgagcctgtcgagaagcacagcatttctgaggtggaaagattataactgtaatgtgaggttaccctatgtctgcaagttcactgactagtgcaggagggaagtcagcagcctgtgtttggtgtgcaactcatcatgggcatgagaccagtgtgaggactcaccctggaagagaatattcgcttaattcccccaacctgaccacctcattcttatctttcttctgtttcttcctccccgctgtcatttcagtctcttcattttgtcatacggcctaaggctttaaagagcaataaaatttttagtctgc

SEQ ID NO: 11051 - protein, 175 aa, Homo sapiens
  ref <308>: DATABASE ACCESSION NUMBER: SWISS-Prot / Q06141
  ref <309>: DATABASE ENTRY DATE: 2002-06-15
MLPPMALPSVSWMLLSCLMLLSQVQGEEPQRELPSARIRCPKGSKAYGSHCYALFLSPKSWTDADLACQKRPSGNLVSVLSGAEGSFVSSLVKSIGNSYSYVWIGLHDPTQGTEPNGEGWEWSSSDVMNYFAWERNPSTISSPGHCASLSRSTAFLRWKDYNCNVRLPYVCKFTD

SEQ ID NO: 11052 - DNA, 2243 bp, Rattus norvegicus
  ref <308>: DATABASE ACCESSION NUMBER: EMBL / M99418
  ref <309>: DATABASE ENTRY DATE: 2000-03-04
tgaccctgcttgctcaactctacgtcttgtttcgttttctgttctgcgccgttacagatccaagctcctcgagcccgggctgcaggaattctgcggccgccgcttagcagagctaagtgggacttcactggagccatggagctgctcaagctgaaccgcagcgtgcagggaccaggacccgggtcggggtcttctttgtgccgcccgggtgtctcccttctcaacagcagtagtgccgggaacctcagctgtgacccccctcgtatccgcggaaccgggaccagagaattggagatggcgattagaatcaccctttatgcagtgatctttctgatgagtgttggcggaaacgtgctcatcatcgtggtcctgggactgagccgacgcctaagaacggtcaccaacgccttcctgctctccctggcagtcagcgacctcctgctggccgtggcttgcatgcccttcacactcctgcccaacctcatgggcacattcatcttcggcacagtcatctgcaaggccatttcctacctcatgggggtatcagtgagtgtatccactctaaatctcgtggccatagccctggagcgatacagcgccatctgccgaccactgcaagcacgagtatggcaaacacgctcccacgcagctcgggtgatcttagccacgtggctgctgtctggactgcttatggtaccctaccctgtgtacaccatggtacagccagtgggacctcgagtgctgcagtgcatgcatcgctggcccagtgcacgtgtccaacaaacctggtccgtgctactgctactgcttttgttcttcatcccgggtgtggttattgcggtggcctatggactcatctcccgcgaactctacctaggactccactttgatggtgaaaatgacagcgagacccaaagccgggcccgaaaccaagggggcctgccgggtggggcagcaccagggcctgtccaccagaacgggggctgccggcctgtaaccagcgtagctggggaagacagtgatggctgctgtgtgcaacttccgcgttcccgactggagatgacaacgctaaccacacccactcctgggccagtccctggccctcggcccaaccaggccaagctgctggctaagaagcgggtggtgcgaatgctgctagtgattgttttgcttttcttcctgtgttggctgccagtgtacagcgtcaacacgtggcgcgccttcgatggcccaggcgcacaacgagcactctcaggggcccctatctctttcatccacttgctgagctacgtctctgcttgtgtcaaccccctggtctactgtttcatgcaccgccgcttccgccaggcctgcctggacacatgtgcccgctgttgcccacgccctccacgagctcgcccacagcctcttccagatgaggatcctcctaccccctccatcgcttcgctgtccaggctaagctataccaccatcagcacactggggcctggctgaggggttgggagattggagaaagagacaagatacataattactatcaaatgacccatccaaacacataagaaacaaaattcagaattaatcaggtgaacacccaacaccatggacagacccctacacacagaaaatagtatctttgctgccctacctgaaacagataggagtctcataggaaaggaggctcacttctgataaggggctgagtcccttcctagacatcttgcactgaccccattacatggacagacacaaggtccgtagcagtaaactttacctataaaggggaactctgacaagggctgattggctcctcatatgaacatattactgacactattctgtagtgcccatagcctagtgcagaagtgacttaggacattgtggctgttcccgtttgacttcattattgccttcctcatccagcactgaaattatcaaccacacgcctttcacctttcggagctgccgatcgttcagcactgaaaagtcccccccccccactcctttccattggagactgtggaaagtcctcttccctcctgcctctcctccctcaccagaccacatcataaaaggataagtgacttagtgtcctcctggacttcttgaggtaggtgaacaggtgtggtttatgggaagcttcttcatttattggctcccatgactaatctaccccatatccaaccttgtgcaaaaaggccagggtatgaagatagggatgagcgtaccctctcttggttgtc

SEQ ID NO: 11053 - protein, 452 aa, Rattus norvegicus
  ref <308>: DATABASE ACCESSION NUMBER: SWISS-Prot / P30553
  ref <309>: DATABASE ENTRY DATE: 1998-07-15
MELLKLNRSVQGPGPGSGSSLCRPGVSLLNSSSAGNLSCDPPRIRGTGTRELEMAIRITLYAVIFLMSVGGNVLIIVVLGLSRRLRTVTNAFLLSLAVSDLLLAVACMPFTLLPNLMGTFIFGTVICKAISYLMGVSVSVSTLNLVAIALERYSAICRPLQARVWQTRSHAARVILATWLLSGLLMVPYPVYTMVQPVGPRVLQCMHRWPSARVQQTWSVLLLLLLFFIPGVVIAVAYGLISRELYLGLHFDGENDSETQSRARNQGGLPGGAAPGPVHQNGGCRPVTSVAGEDSDGCCVQLPRSRLEMTTLTTPTPGPVPGPRPNQAKLLAKKRVVRMLLVIVLLFFLCWLPVYSVNTWRAFDGPGAQRALSGAPISFIHLLSYVSACVNPLVYCFMHRRFRQACLDTCARCCPRPPRARPQPLPDEDPPTPSIASLSRLSYTTISTLGPG

SEQ ID NO: 11054 - DNA, 1969 bp, Homo sapiens
  ref <308>: DATABASE ACCESSION NUMBER: EMBL / L04473
  ref <309>: DATABASE ENTRY DATE: 1999-07-02
atggagctgctcaagctgaaccggagcgtgcagggaaccggacccgggccgggggcttccctgtgccgcccgggggcgcctctcctcaacagcagcagtgtgggcaacctcagctgcgagccccctcgcattcgcggagccgggacacgagaattggagctggccattagaatcactctttacgcagtgatcttcctgatgagcgttggaggaaatatgctcatcatcgtggtcctgggactgagccgccgcctgaggactgtcaccaatgccttcctcctctcactggcagtcagcgacctcctgctggctgtggcttgcatgcccttcaccctcctgcccaatctcatgggcacattcatctttggcaccgtcatctgcaaggcggtttcctacctcatgggggtgtctgtgagtgtgtccacgctaagcctcgtggccatcgcactggagcggtacagcgccatctgccgaccactgcaggcacgagtgtggcagacgcgctcccacgcggctcgcgtgattgtagccacgtggctgctgtccggactactcatggtgccctaccccgtgtacactgtcgtgcaaccagtggggcctcgtgtgctgcagtgcgtgcatcgctggcccagtgcgcgggtccgccagacctggtccgtactgctgcttctgctcttgttcttcatcccgggtgtggttatggccgtggcctacgggcttatctctcgcgagctctacttagggcttcgctttgacggcgacagtgacagcgacagccaaagcagggtccgaaaccaaggcgggctgccaggggctgttcaccagaacgggcgttgccggcctgagactggcgcggttggcgaagacagcgatggctgctacgtgcaacttccacgttcccggcctgccctggagctgacggcgctgacggctccagggccgggatccggctcccggcccacccaggccaagctgctggctaagaagcgcgtggtgcgaatgttgctggtgatcgttgtgcttttttttctgtgttggttgccagtttatagtgccaacacgtggcgcgcctttgatggcccgggtgcacaccgagcactctcgggtgctcctatctccttcattcacttgctgagctacgcctcggcctgtgtcaaccccctggtctactgcttcatgcaccgtcgctttcgccaggcctgcctggaaacttgcgctcgctgctgcccccggcctccacgagctcgccccagggctcttcccgatgaggaccctcccactccctccattgcttcgctgtccaggcttagctacaccaccatcagcacactgggccctggctgaggagtagaggggccgtgggggttgaggcagggcaaatgacatgcactgacccttccagacatagaaaacacaaaccacaactgacacaggaaaccaacacccaaagcatggactaaccccaacgacaggaaaaggtagcttacctgacacaagaggaataagaatggagcagtacatgggaaaggaggcatgcctctgatatgggactgagcctggcccatagaaacatgacactgaccttggagagacacagcgtccctagcagtgaactatttctacacagtgggaactctgacaagggctgacctgcctctcacacacatagattaatggcactgattgttttagagactatggagcctggcacaggactgactctgggatgctcctagtttgacctcacagtgacccttcccaatcagcactgaaaataccatcaggcctaatctcatacctctgaccaacaggctgttctgcactgaaaaggttcttcatccctttccagttaaggaccgtggccctgccctctccttccttcccaaactgttcaagaaataataaattgtttggcttcctcctgaaaaaaaaaaaaaaaaaaaaaaaaaaaaaaaaaaaaaggaattcc

SEQ ID NO: 11055 - protein, 447 aa, Homo sapiens
  ref <308>: DATABASE ACCESSION NUMBER: SWISS-Prot / P32239
  ref <309>: DATABASE ENTRY DATE: 2001-10-16
MELLKLNRSVQGTGPGPGASLCRPGAPLLNSSSVGNLSCEPPRIRGAGTRELELAIRITLYAVIFLMSVGGNMLIIVVLGLSRRLRTVTNAFLLSLAVSDLLLAVACMPFTLLPNLMGTFIFGTVICKAVSYLMGVSVSVSTLSLVAIALERYSAICRPLQARVWQTRSHAARVIVATWLLSGLLMVPYPVYTVVQPVGPRVLQCVHRWPSARVRQTWSVLLLLLLFFIPGVVMAVAYGLISRELYLGLRFDGDSDSDSQSRVRNQGGLPGAVHQNGRCRPETGAVGEDSDGCYVQLPRSRPALELTALTAPGPGSGSRPTQAKLLAKKRVVRMLLVIVVLFFLCWLPVYSANTWRAFDGPGAHRALSGAPISFIHLLSYASACVNPLVYCFMHRRFRQACLETCARCCPRPPRARPRALPDEDPPTPSIASLSRLSYTTISTLGPG

SEQ ID NO: 11056 - DNA, 853 bp, Rattus norvegicus; identical to SEQ ID NO: 3808
  ref <308>: DATABASE ACCESSION NUMBER: EMBL / M63983
  ref <309>: DATABASE ENTRY DATE: 2000-03-04

SEQ ID NO: 11057 - protein, 218 aa, Rattus norvegicus; identical to SEQ ID NO: 3809
  ref <308>: DATABASE ACCESSION NUMBER: SWISS-Prot / P27605
  ref <309>: DATABASE ENTRY DATE: 2002-06-15

SEQ ID NO: 11058 - DNA, 654 bp, Homo sapiens; identical to SEQ ID NO: 3810
  ref <308>: DATABASE ACCESSION NUMBER: EMBL / L29382
  ref <309>: DATABASE ENTRY DATE: 1999-07-02

SEQ ID NO: 11059 - protein, 217 aa, Homo sapiens; identical to SEQ ID NO: 3811
  ref <308>: DATABASE ACCESSION NUMBER: SWISS-Prot / AAB59392
  ref <309>: DATABASE ENTRY DATE: 2002-06-15

SEQ ID NO: 11060 - DNA, 591 bp, Rattus norvegicus; identical to SEQ ID NO: 4220
  ref <308>: DATABASE ACCESSION NUMBER: EMBL / AA799406
  ref <309>: DATABASE ENTRY DATE: 2000-03-03

SEQ ID NO: 11061 - DNA, 250 bp, Rattus norvegicus; identical to SEQ ID NO: 4247
  ref <308>: DATABASE ACCESSION NUMBER: EMBL / AA799448
  ref <309>: DATABASE ENTRY DATE: 2000-03-03

SEQ ID NO: 11062 - DNA, 497 bp, Homo sapiens; identical to SEQ ID NO: 4248
  ref <308>: DATABASE ACCESSION NUMBER: EMBL / BF109813
  ref <309>: DATABASE ENTRY DATE: 2000-10-23

SEQ ID NO: 11063 - protein, 295 aa, Homo sapiens; identical to SEQ ID NO: 4249
  ref <308>: DATABASE ACCESSION NUMBER: SWISS-Prot / P13726
  ref <309>: DATABASE ENTRY DATE: 2002-06-15

SEQ ID NO: 11064 - DNA, 612 bp, Rattus norvegicus
  ref <308>: DATABASE ACCESSION NUMBER: EMBL / AA799505
  ref <309>: DATABASE ENTRY DATE: 2000-03-03
cctcaacacacatgatctttaattactttgatagagctagaggggaacaagcttcattagtccactggcctgtcacttccctttctctgcagctgagaggatgctgagctaacagtgggtgacacacattttgttagcctaacacctcagctggggcagactggttagtggatgacacacctggctcagaggtaaaggagtgttgagaggtacagtggagtggcaggcctcaggcttcacacagactcctttgtcctgaagatggtctaccctgggcatgctctggagtcactaattccaaactcactattctaatccagtatgtattcaaagattgcacaatagggacagggattgggctggatctccaggatgtggagctggccagaatatagtgctaggcagagagactaagaactggtctctacagcagacagcaggcccggaatatcagcagattctttggtacggtaagcttcagtaagacagtctcattggccccaatgaagagcattccaacacgggacagagggatttctcttggcctgaaggtatatactgtcatgtccttggacaacagaggagctggaaatctatgtcagacttgtatca

SEQ ID NO: 11065 - DNA, 1771 bp, Homo sapiens
  ref <308>: DATABASE ACCESSION NUMBER: EMBL / X76057
  ref <309>: DATABASE ENTRY DATE: 1994-02-02
cgagcatggccgctccgcgagtattcccactttcctgtgcggtgcagcagtatgcctgggggaagatgggttccaacagcgaagtggcgcggctgttggccagcagtgatccactggcccagatcgcagaggacaagccttatgcagagttgtggatggggactcacccccgaggggatgccaagatccttgacaaccgcatctcacagaagaccctaagccagtggattgctgagaaccaggacagcttgggctcaaaggtcaaggacacctttaatggcaacctgcccttcctcttcaaagtgctctcagttgaaacacccctgtccatccaggcacaccctaacaaggagctggcagagaagctgcacctccaggctccgcagcactaccccgatgccaaccacaagccagagatggccattgccctcacccccttccagggcttgtgtggcttccggccagttgaggagattgtaacctttctaaagaaggtgcctgagtttcagttcctgattggagatgaggcagcaacacacctgaagcagaccatgagccatgactcccaggctgtggcctcctctctgcagagctgtttctcccacctgatgaagagtgagaagaaggtggtggtggaacagctcaacctgttggtgaagcggatctcccagcaagcggctgccggaaacaacatggaggacatctttggggagcttttgctacagctgcaccagcagtacccaggtgatatcggctgctttgccatctacttcctgaacctgcttaccctgaagcctggggaggccatgtttctggaggccaacgtaccccatgcctacctgaaaggagactgcgtggagtgcatggcgtgttcagacaacacagttcgtgctggcctgacacccaagttcattgatgtgccaaccctgtgtgaaatgctcagctatacccctagctccagcaaggacaggctctttctcccaacacggagtcaggaagacccctacctctcaatctatgacccccctgtaccagacttcaccattatgaagacggaggtccctggctctgtcactgaatacaaggtcttggcactggactctgccagcatcctcctgatggtacaggggacagtaatagccagcacacccacaacccagacaccaatccctctgcaacgtggtggcgtgctcttcattggggccaatgagagtgtctcactgaagcttactgagccgaaggacctgctgatattccgtgcctgctgtctgctgtaaaggctgcagcctccccagctctcctctgccagccaccctaaattccagccaacctcacctcctcgggcccagctcaagcccccttccttgctctggaccccttaggtataccctggaagagctggggtgggggaggagggagcgtgaaggtagtgactcctgaacacacccaggtggaaccatctttggggaggagaggcccgtgtgaggggtctgatactccctttgtcttccctctctactcctcgctacacctgagccaggctcttgccaactctgttccagcctatggctttaggctagctgttaaatatgtgacccagcattagctcagcatctgtcagagcaagagaccaggtaatttctaagaacagggttctagcgatgggactgcccatttcctcagctgcagaggaggaaagggaaagggtaggcctgtagactaacgctgtttacacccttgttctgtcaaagcaattaaagatcacttgtgt

SEQ ID NO: 11066 - protein, 422 aa, Homo sapiens
  ref <308>: DATABASE ACCESSION NUMBER: SWISS-Prot / P34949
  ref <309>: DATABASE ENTRY DATE: 2002-06-15
AAPRVFPLSCAVQQYAWGKMGSNSEVARLLASSDPLAQIAEDKPYAELWMGTHPRGDAKILDNRISQKTLSQWIAENQDSLGSKVKDTFNGNLPFLFKVLSVETPLSIQAHPNKELAEKLHLQAPQHYPDANHKPEMAIALTPFQGLCGFRPVEEIVTFLKKVPEFQFLIGDEAATHLKQTMSHDSQAVASSLQSCFSHLMKSEKKVVVEQLNLLVKRISQQAAAGNNMEDIFGELLLQLHQQYPGDIGCFAIYFLNLLTLKPGEAMFLEANVPHAYLKGDCVECMACSDNTVRAGLTPKFIDVPTLCEMLSYTPSSSKDRLFLPTRSQEDPYLSIYDPPVPDFTIMKTEVPGSVTEYKVLALDSASILLMVQGTVIASTPTTQTPIPLQRGGVLFIGANESVSLKLTEPKDLLIFRACCLL

SEQ ID NO: 11067 - DNA, 1900 bp, Rattus norvegicus
  ref <308>: DATABASE ACCESSION NUMBER: Refseq / NM_011358
  ref <309>: DATABASE ENTRY DATE: 2002-09-19
ctcaggcgtccgtcaggttcgggtgctctgcggcggcgttgcggctccctcccgacccacgaggactgtagctaccgagtgcctgacggagccgcgtttccggagagcgagggcctgtccggggcgttagggtctcggcgccgcttcgcagccatgagctacggccgcccgcctcccgatgtggagggcatgacctccctcaaggtggacaacctgacctaccgcacctcgcccgacaccctgaggcgcgtcttcgagaagtacgggcgcgtcggcgacgtgtacattccgcgggaccgctacaccaaggagtcccggggcttcgccttcgtccggttccacgacaagcgcgacgccgaagacgccatggacgccatggacggggcggtgctcgacggccgcgagctacgggtgcagatggcgcgctacggccgcccgcccgactcgcaccacagccgccggggcccgccaccccgtcggtacggcggcggcggctacgggcggcggagccgcagccctcggcgacgccggcgcagccgatctcgaagccggagccggtccaggtcgcgaagccgctcccgctacagccgctccaagtctcggtcccgcactcgctcgcgctccagatcaacctccaagtccagatctgcccgaagatccaagtccaagtcctcctcggtctccagatcccgctcgaggtcaaggtccaggtcgcgatcgagaagccctccgcccgtgtcgaagcgagagtccaagtctaggtcgcggtccaagagcccacccaagtctccagaagaagagggagcagtttcttcctaagaaaatgatgaatcggcaagcggcttaacagaggacattgggggaaaggaccacaaactcagtccatcggtccatggaagagtccttggaacaagcaactggctattaaaaaggttattttgtaacatttgtctaactttttacttgttttaatctgcctcaggtggcaaacttcattttatgtgccattttgttgctgttattcaaatttcttgtaatttagtgaggtgagcgacttcagatttcattattggattggatatttgaggtaaaatttcatttttgtttatagtgctgacttttttgtttgaaattaaacagattggtaacctaatttgtggcctcctgacttaataaggaaacatgtacagccattacatacagcctaaagctgtcagcagaatgactcaacattgccttcacttcttaataattaaaaacctatgaaagttggtgtaatttgttcatatatgttatttaccttcaggtctatatgataatctgaacccaaatttgtataaagacttttcaggtgaaaagacttaattttttttttaaaggattgtttacccaacacaattctaatctcttctcttatgtatttttgtgcactaggcgcagttgtgtagcagttgagtaatgctggttagctgttaaggtggcgtgttgcagtgcagagtgcttggctgtttcctgttttctcctgattgctcctgtgtaaagatgccttgtcgtgcagaaacaaatggctgtccagtttattaaaatgcctgacaactgcacttccagtcacccgggccttgcatataaataatggagcatacagtgagcacatctagctgatgataaatataccccccttccctcaaaaaatgcaaaatggtaaatctgatcatccttgtgttgtgaacttttaaaaaaaatcaaaatgttaaggaagcaaatggtttgtaactttgtaagtacttaaaacatggtgtatcttttgcttatggatattctgtactataaccattgtttctgtagtttgattaaagtgttttcttggtgttagctttttaaaaaaaaaaaaaaaaaaaaa

SEQ ID NO: 11068 - protein, 221 aa, Rattus norvegicus
  ref <308>: DATABASE ACCESSION NUMBER: SWISS-Prot / Q62093
  ref <309>: DATABASE ENTRY DATE: 2001-10-16
MSYGRPPPDVEGMTSLKVDNLTYRTSPDTLRRVFEKYGRVGDVYIPRDRYTKESRGFAFVRFHDKRDAEDAMDAMDGAVLDGRELRVQMARYGRPPDSHHSRRGPPPRRYGGGGYGRRSRSPRRRRRSRSRSRSRSRSRSRSRYSRSKSRSRTRSRSRSTSKSRSARRSKSKSSSVSRSRSRSRSRSRSRSPPPVSKRESKSRSRSKSPPKSPEEEGAVSS

SEQ ID NO: 11069 - DNA, 615 bp, Rattus norvegicus; identical to SEQ ID NO: 4316
  misc_feature (1)..(615): n=a, c, g or t
  ref <308>: DATABASE ACCESSION NUMBER: EMBL / AA799539
  ref <309>: DATABASE ENTRY DATE: 2000-03-03

SEQ ID NO: 11070 - DNA, 2344 bp, Homo sapiens; identical to SEQ ID NO: 4317
  ref <308>: DATABASE ACCESSION NUMBER: EMBL / AK000931
  ref <309>: DATABASE ENTRY DATE: 2002-08-06

SEQ ID NO: 11071 - protein, 673 aa, Homo sapiens; identical to SEQ ID NO: 4318
  ref <308>: DATABASE ACCESSION NUMBER: Refseq / NP_005997
  ref <309>: DATABASE ENTRY DATE: 2002-11-05

SEQ ID NO: 11072 - DNA, 553 bp, Rattus norvegicus; identical to SEQ ID NO: 4319
  ref <308>: DATABASE ACCESSION NUMBER: EMBL / AA799542
  ref <309>: DATABASE ENTRY DATE: 2000-03-03

SEQ ID NO: 11073 - DNA, 28567 bp, Homo sapiens; identical to SEQ ID NO: 4320
  ref <308>: DATABASE ACCESSION NUMBER: EMBL / AJ132695
  ref <309>: DATABASE ENTRY DATE: 2000-11-09

SEQ ID NO: 11074 - protein, 192 aa, Homo sapiens; identical to SEQ ID NO: 4321
  ref <308>: DATABASE ACCESSION NUMBER: SWISS-Prot / CAA10733
  ref <309>: DATABASE ENTRY DATE: 2002-06-15

SEQ ID NO: 11075 - DNA, 616 bp, Rattus norvegicus; identical to SEQ ID NO: 4323
  ref <308>: DATABASE ACCESSION NUMBER: EMBL / AA799551
  ref <309>: DATABASE ENTRY DATE: 2000-03-03

SEQ ID NO: 11076 - protein, 201 aa, Rattus norvegicus; identical to SEQ ID NO: 4324
  ref <308>: DATABASE ACCESSION NUMBER: PIR / S06147
  ref <309>: DATABASE ENTRY DATE: 2001-02-02

SEQ ID NO: 11077 - DNA, 780 bp, Homo sapiens; identical to SEQ ID NO: 4325
  ref <308>: DATABASE ACCESSION NUMBER: EMBL / AF322067
  ref <309>: DATABASE ENTRY DATE: 2001-02-19

SEQ ID NO: 11078 - protein, 259 aa, Homo sapiens; identical to SEQ ID NO: 4326
  ref <308>: DATABASE ACCESSION NUMBER: SWISS-Prot / Q9BZG1
  ref <309>: DATABASE ENTRY DATE: 2002-06-15

SEQ ID NO: 11079 - DNA, 4402 bp, Rattus norvegicus
  ref <308>: DATABASE ACCESSION NUMBER: EMBL / AF206162
  ref <309>: DATABASE ENTRY DATE: 2002-04-09
ggcacgagcgccagccgggtgacccattccgctgttcgctatcttggtccgccggagtcgggggagggtggaaaacgggtccttgaaccgcttggagaattggaagttgcagcgagagcactggaaggagcggcactggaccctcagaagagtccaaatggcgcagtgggagatgttgcagaaccttgacagcctgttcctggaccagttacaccaggtctactcacagagcatcctgccaatggacgttcgacagcatttggctacctggattgaagaccagaactggagggaagctgcgctgggcagtgatgacgccaaggccaacatgctatacttcagcatcctggaccaactgaaccagtgggaccactacagctcagactccaatcactttttattacagcataacttgcgaaaattcagccgggatattcagacctttcccaatggccctacccagttggctgagatgatctttaatcttcttctggaagagcaaaggattctgaatcaggctcaaagagctcaagaggtgcagcccccaccagcccccgaagcagttgtggagagccagcagcttgagattgaaaatcgaatccagggtttacatgtggacattgagttcttggtgagatccatcaggcagctgaaggacgaacaggatgtcttcagcttcagatacacagttttcagtctgaagaagacgtcgtcttcagacccccatcagagccaacaggcgcagcttgtgcaggcaacagccaacaaagtcgacagaatgagaaaggaggtgctggacatctccaaaggactggttggccgattaaccaccctggtcgacctattgctgcccaagctggacgagtggaaggtgcagcagcagaagtcctgcattggagccccgccccccgagctgcagctggaacagctggaacagtggttgacggctggagcaaagttcttgttccaccttcggcagctactgaagcagctgaaggagatgagtcacatgcttcggtataagggtgacatgtttggccaaggggtggacctgcagaatgcccaagtcatggagttacttcagcgtctgctccaaaggtcctttgtagtagaaacccagccctgcatgccccagactctccaccgacccctcatcctgaagactgggaacaagttcaccgtccgaacaagacttctggtgagactccaggaaggcagcgaatcactcaaagcagaagtctctgtcgacaggaattcagacttaccaggcttccggaagttcaacattctgacctcaaaccaaaaaaccttgaccccggaggagggccagagacagggcttaatttgggacttcggcttcttgactctggtggagcaacgcgctgtgggtgcaggaaagggcaacaaggggccgctggcagtgacagaggagttacatgtcatcagcttcgtggttgagtacgtgtaccagggtctgaagatgaagctgcagacggacactctccctgttgtgattatttctaacatgaaccaactctccattgcctgggcctccattctctggttcaacatgctcagcccaaatcccaagaaccagcagttcttctgccaagctccgaaagccccctggagtttgctgggacctgtgctcagctggcagttctcctcttacgttggccgaggcctcgattctgagcagctgggcatgctgagaaccaagctgtttggaaagagctgcaagatggaggatgcgctgttgtcctgggtagacttttgcaagcgagagagcccccctggtaagatccctttctggacctggctggacaaaattctggagctggtgcacgaccacctgaaggatctctggaaggatgggcgcatcatgggctttgtgagccgcaaccaggaacgcagactgctgaagaagatgttgtctggcaccttcctactgcgcttcagtgaaacttctgaagggggcattacttgttcttgggtggagcaccaggatgacgataaagtcgaaatctactcagtgcagccctacaccaaggaagtgttacagtcactcccactgacagagatcatccgccactaccaggttcttgccgaagagaacatccccgagaacccactccgcttcctctatccccgaatccctcgggacgaagcttttgggtgttactaccaggaaaaagttaattttgaagaacagaggaaatatttgaaacataaactcattgtgatctctaacagacaggtggacgagctgcagcagcctctggagctcaaacaggattcagagtccttagaagtgaatgcagagctcttgttagcacacgaccaggagttgccattgatgatgcagactgggctggttctgggcacagagctgaaagtggaccccatactgagtacagccccacaagtcctgctggagccagccccacaagtcctgctggagccagccccacaagtcccgctggagccagccccacaagtcctgctggagccagccccacaagtcctgctggagccagccccacaagtcctgctggagccagccccacaagtcctgctggagccagccccacaagtccagctggagccagccccacaagtcctgctggagctagccccacaagtcctgctggagccagccccacaagtcctgctggagctagccccacaagtccagctggagccagcacacttgctgcagcagccatcagagtcagatttgcctgaggacctgcagcagattagcgtggaggatctgaaaaaattaagcaacccgagtactgaatacatcacaaccaacgaaaacccaatgttggctggcgagagcagtggagatgagacttccataccctaccacagccattttgatgcggatggactcttgggatggactcttgataccttctgaggactaggagctatgtttctgttttgttcctcctaactccaacatcaagatgttgcttccgacagtggggatcggggtcttctaagctggtttacatgaactttggaataagaggtaaaagcctaacatggttttgaaggtgcaccaaagagtcagaacagacactggccataatctttctaggatcctgaggctacctaccatgctgggagacgcaggggtcttgagggctggtcaggacatttgcgaggtccttagagggtctggggcagtggtgtctttcaggttggaacgactttaatgttttgataattggctaagttggtgcaaagcagcatcgggcctttgtggggagttcagacatgaatggaattctgttcttcctcctccattgctaccctgggtcctgtcaaacccagagccctgcccgtggtaggcaaccacggtggccctgagccatacctgggcccttcagttctctcttccagttacctcaggtgtactcccttcgctcctgactccagttctataaatttccttctcttcctatagaggctgagcgctgtctgcttcagcccaccatgtaaaacagaattcatgctagcagctcccttgccatgatcaattccccacctacaaagtaatcctgacactctcatgaagatgtgaagctctgctgctctaggccatgccgtctctacctcccccagcgcttgagagaatcactcctggaggtttgaatggtttctgagcacttgggaattactccttatagtactcagtagagctgagagcttgaagagaacttagctattttattattttatgaataagagggcatcatttcttttgcacagtgttttgttaacatgaaaggaaaaaaaaaaacccaaaacttctgttccttaggagtgacctaggcaaggaccaggttccttgggtctcagaaccttgaaggtttatcagacatctttatgccttagccattgttggggaacccaggaggcaattgccttgccgctgctctacggtgtgcttgtggtacaacttgtgggaaacgaatgtgaggacctgcactgtggccgttctctaacggcgcatcagaacagtccaggaaggggttaataataactgggacaggggacagcagtgccatgcccagcctcaaaggcggcacgagccaaccaagaaccaaggaggcagacaaagaagatacacacaggagcagaagctcaaggagccagaagcaaaagtcgtgagaaaaaggtgcccggccaacaggtgaaattaagaaattcagcaaaaccaaggcacaacagcatagtgggaccaagagaatggcactgcttctttctgctcctttgtaagtccctggttctctgctgtaccatctctcaccaagctctgaatagttagaaagaactgttgtcctgaagtccttcgtacgtcataataaacttttgttaaaacaacaac

SEQ ID NO: 11080 - protein, 923 aa, Rattus norvegicus
  ref <308>: DATABASE ACCESSION NUMBER: SWISS-Prot / Q9WVL2
  ref <309>: DATABASE ENTRY DATE: 2002-06-15
MAQWEMLQNLDSPFLDQLHQVYSQSFLPMDFRQHLASWIEDQNWREAALESDDAKANMLYFSILDQLNQWDHYSSDPKSLLLQHNLRKFSRDIQPFPNGPSQLAEMIFNLLLEEQRILIQAQRAQEVQPPPAPEAVVESQQLEIENRIQGLHVDIEFLVRSIRQLKDEQDVFSFRYTVFSLKKTSSSDPHQSQQAHVVQATANKVDRMRKEVLDISKGLVGRLTTLVDLLLPKLDEWKVQQQKSCIGAPPPVKSAAEQLEQWLTAGAKFLFHLRQLLKQLKEMSCLRYQGDMFAKGVDLRNAQVMELLQRLLQRSFVVETQPCMPQTLHRPLILKTGNKFTVRTRLLVRLQEGSESLKAEVSVDRNSDLPGFRKFNILTSNQKTLTPEKGQRQGLIWDFGFLTLVEQRAVGAGKGNNKGPLAVTEELHVISFVVEYTYQGLKMKLQTDTLPVVIISNMNQLSFAWASILWFNMLSPNPKNQQFFCQAPKAPWSLLGPVLSWQFSSYVARGLDSEQLGMLRTKLFGKSCKMEDALLSWVDFCKRESPPGKIPFWTWLDKILELVHDHLKDLWKDGRIMGFVSRNQERRLLKKMLSGTFLLRFSETSEGGITCSWVEHQDDHKVEIYSVQPYTKEVLQSLPLTEIIRHYQVLAEENIPENPLRFLYPRIPRDEAFGCYYQEKVNLEEQEEYLKHKLIVISNRQVDELQQPLELKQDSESLEVNAELLLAHDQELPLMMQTGLVLGTELKVDPILSTAPQVLLEPAPQVLLEPAPQVLLEPAPQVLLEPAPQVLLEPAPQVLLEPAPQVLLEPAPQVQLEPAPQVLLELAPQVLLEPAPQVLLELAPQVQLEPAHLLQQPSESDLPEDLQQISVEDLKKLSNPSTEYITTNENPMLAGESSGDETSIPYHSHFDADGLLGWTLDTF

SEQ ID NO: 11081 - DNA, 3291 bp, Homo sapiens
  ref <308>: DATABASE ACCESSION NUMBER: Refseq / NM_005419
  ref <309>: DATABASE ENTRY DATE: 2002-11-05
aagtcgcgaccagagccattggagggcgcggggactgcaaccctaatcagagcccaaatggcgcagtgggaaatgctgcagaatcttgacagcccctttcaggatcagctgcaccagctttactcgcacagcctcctgcctgtggacattcgacagtacttggctgtctggattgaagaccagaactggcaggaagctgcacttgggagtgatgattccaaggctaccatgctattcttccacttcttggatcagctgaactatgagtgtggccgttgcagccaggacccagagtccttgttgctgcagcacaatttgcggaaattctgccgggacattcagcccttttcccaggatcctacccagttggctgagatgatctttaacctccttctggaagaaaaaagaattttgatccaggctcagagggcccaattggaacaaggagagccagttctcgaaacacctgtggagagccagcaacatgagattgaatcccggatcctggatttaagggctatgatggagaagctggtaaaatccatcagccaactgaaagaccagcaggatgtcttctgcttccgatataagatccaggccaaagggaagacaccctctctggacccccatcagaccaaagagcagaagattctgcaggaaactctcaatgaactggacaaaaggagaaaggaggtgctggatgcctccaaagcactgctaggccgattaactaccctaatcgagctactgctgccaaagttggaggagtggaaggcccagcagcaaaaagcctgcatcagagctcccattgaccacgggttggaacagctggagacatggttcacagctggagcaaagctgttgtttcacctgaggcagctgctgaaggagctgaagggactgagttgcctggttagctatcaggatgaccctctgaccaaaggggtggacctacgcaacgcccaggtcacagagttgctacagcgtctgctccacagagcctttgtggtagaaacccagccctgcatgccccaaactccccatcgacccctcatcctcaagactggcagcaagttcaccgtccgaacaaggctgctggtgagactccaggaaggcaatgagtcactgactgtggaagtctccattgacaggaatcctcctcaattacaaggcttccggaagttcaacattctgacttcaaaccagaaaactttgacccccgagaaggggcagagtcagggtttgatttgggactttggttacctgactctggtggagcaacgttcaggtggttcaggaaagggcagcaataaggggccactaggtgtgacagaggaactgcacatcatcagcttcacggtcaaatatacctaccagggtctgaagcaggagctgaaaacggacaccctccctgtggtgattatttccaacatgaaccagctctcaattgcctgggcttcagttctctggttcaatttgctcagcccaaaccttcagaaccagcagttcttctccaacccccccaaggccccctggagcttgctgggccctgctctcagttggcagttctcctcctatgttggccgaggcctcaactcagaccagctgagcatgctgagaaacaagctgttcgggcagaactgtaggactgaggatccattattgtcctgggctgacttcactaagcgagagagccctcctggcaagttaccattctggacatggctggacaaaattctggagttggtacatgaccacctgaaggatctctggaatgatggacgcatcatgggctttgtgagtcggagccaggagcgccggctgctgaagaagaccatgtctggcacctttctactgcgcttcagtgaatcgtcagaagggggcattacctgctcctgggtggagcaccaggatgatgacaaggtgctcatctactctgtgcaaccgtacacgaaggaggtgctgcagtcactcccgctgactgaaatcatccgccattaccagttgctcactgaggagaatatacctgaaaacccactgcgcttcctctatccccgaatcccccgggatgaagcttttgggtgctactaccaggagaaagttaatctccaggaacggaggaaatacctgaaacacaggctcattgtggtctctaatagacaggtggatgaactgcaacaaccgctggagcttaagccagagccagagctggagtcattagagctggaactagggctggtgccagagccagagctcagcctggacttagagccactgctgaaggcagggctggatctggggccagagctagagtctgtgctggagtccactctggagcctgtgatagagcccacactatgcatggtatcacaaacagtgccagagccagaccaaggacctgtatcacagccagtgccagagccagatttgccctgtgatctgagacatttgaacactgagccaatggaaatcttcagaaactgtgtaaagattgaagaaatcatgccgaatggtgacccactgttggctggccagaacaccgtggatgaggtttacgtctcccgccccagccacttctacactgatggacccttgatgccttctgacttctaggaaccacatttcctctgttcttttcatatctctttgcccttcctactcctcatagcatgatattgttctccaaggatgggaatcaggcatgtgtcccttccaagctgtgttaactgttcaaactcaggcctgtgtgactccattggggtgagaggtgaaagcataacatgggtacagaggggacaacaatgaatcagaacagatgctgagccataggtctaaataggatcctggaggctgcctgctgtgctgggaggtataggggtcctgggggcaggccagggcagttgacaggtacttggagggctcagggcagtggcttctttccagtatggaaggatttcaacattttaatagttggttaggctaaactggtgcatactggcattggccttggtggggagcacagacacaggataggactccatttctttcttccattccttcatgtctaggataacttgctttcttctttcctttactcctggctcaagccctgaatttcttcttttcctgcaggggttgagagctttctgccttagcctaccatgtgaaactctaccctgaagaaagggatggataggaagtagacctctttttcttaccagtctcctcccctactctgccccctaagctggctgtacctgttcctcccccataaaatgatcctgccaatct

SEQ ID NO: 11082 - protein, 851 aa, Homo sapiens
  ref <308>: DATABASE ACCESSION NUMBER: SWISS-Prot / P52630
  ref <309>: DATABASE ENTRY DATE: 2002-06-15
MAQWEMLQNLDSPFQDQLHQLYSHSLLPVDIRQYLAVWIEDQNWQEAALGSDDSKATMLFFHFLDQLNYECGRCSQDPESLLLQHNLRKFCRDIQPFSQDPTQLAEMIFNLLLEEKRILIQAQRAQLEQGEPVLETPVESQQHEIESRILDLRAMMEKLVKSISQLKDQQDVFCFRYKIQAKGKTPSLDPHQTKEQKILQETLNELDKRRKEVLDASKALLGRLTTLIELLLPKLEEWKAQQQKACIRAPIDHGLEQLETWFTAGAKLLFHLRQLLKELKGLSCLVSYQDDPLTKGVDLRNAQVTELLQRLLHRAFVVETQPCMPQTPHRPLILKTGSKFTVRTRLLVRLQEGNESLTVEVSIDRNPPQLQGFRKFNILTSNQKTLTPEKGQSQGLIWDFGYLTLVEQRSGGSGKGSNKGPLGVTEELHIISFTVKYTYQGLKQELKTDTLPVVIISNMNQLSIAWASVLWFNLLSPNLQNQQFFSNPPKAPWSLLGPALSWQFSSYVGRGLNSDQLSMLRNKLFGQNCRTEDPLLSWADFTKRESPPGKLPFWTWLDKILELVHDHLKDLWNDGRIMGFVSRSQERRLLKKTMSGTFLLRFSESSEGGITCSWVEHQDDDKVLIYSVQPYTKEVLQSLPLTEIIRHYQLLTEENIPENPLRFLYPRIPRDEAFGCYYQEKVNLQERRKYLKHRLIVVSNRQVDELQQPLELKPEPELESLELELGLVPEPELSLDLEPLLKAGLDLGPELESVLESTLEPVIEPTLCMVSQTVPEPDQGPVSQPVPEPDLPCDLRHLNTEPMEIFRNCVKIEEIMPNGDPLLAGQNTVDEVYVSRPSHFYTDGPLMPSDF

SEQ ID NO: 11083 - DNA, 464 bp, Rattus norvegicus
  ref <308>: DATABASE ACCESSION NUMBER: EMBL / AA799581
  ref <309>: DATABASE ENTRY DATE: 2000-03-03
agataaagaggtgactttattcagattgctgggaaacccaggccaaagggcagcgatccagactggtaccatctcattgtactctgtgttatgtttttctttctgttgttcaccaattaccctggagccttgtagccagcaggcgaaaggactcctcacctcaaatccattccacagtacccgcccgcccaacaaccagcaagtgaagccttgtgatgaggttccaaggtaacatcctggtttgctgagttttgacaggatctccaacacatccttcaccttggacacaaacagatgggagcccgtcctatactaccaggccactggtcatcctttgccagaaggtgcctgctcatgtttcctgcccaaagactgtataggcgactggtgttctctcggaggaccgacagagtgtgggaaagtgactcctctttgaccctggcaatctctcgaactgtgtgcaa

SEQ ID NO: 11084 - DNA, 4689 bp, Homo sapiens
  ref <308>: DATABASE ACCESSION NUMBER: EMBL / D86972
  ref <309>: DATABASE ENTRY DATE: 2001-10-10
ggcggaggccgggccaggcggggctgtagggctggggcaggcggcgcccgggtctggccctggcctacgggctaagcgcccggccccggggccgcggatccggcagccatgtgtggatcttgaagcgccatgtggtcttctgaagcgctttgacagttctaaagggctttatattgcaaactgatcaaagcgcttcgtagccccggaagcgcttaggcatctccgaagtagcgctgggcaaagtgaaggcttcctgatctcagaagcacgttgtgggcttggaaacctacggcagcctttagtcaattttggatcgctttgacttctccaacacggtttggcatctctgaaaccttgagaactgtgatgggcagtggaaagaagagggaaaggtgcccatggcgtccgagcggggcaaggtcaagcacaactggagcagcacgtcggaagggtgtccccgcaagcgcagctgcctccgggagccctgtgatgtggccccctccagccggccagctcagaggtctgcgtcgcgttctggagggcccagcagccccaagcgcctgaaagcccagaaggaggacgatgtggcttgctcgcggaggttatcctggggctcatcccgccgcagaaataactcctcctcctccttctccccacatttcttgggccctggtgtgggcggggccgcctccaaaggctgcctgattcggaacactcgggggttcctgtcttcagggggatcccctctgcgtcctgccaacgcctctttggaagaaatggcttctctagaggaggaagcctgcagccttaaggttgattccaaagatagttctcataactccacaaactctgaatttgcagctgaagctgagggtcagaatgatacaattgaggaacccaacaaggtccagaaaaggaagagggatagacttcgagaccagggctccacaatgatctacctgaaggctatccagggcatcctggggaaatcgatgccaaaaaggaagggagaggctgccactcgggcaaaaccaagcgcagcagagcatcccagccatggagaaggaccagccaggagtgaaggaccagccaagactgcagaaggagcagccaggagtgtcacagtcactgctgctcagaaggagaaagacgcaaccccagaggtcagcatggaggaggataagacagtgccagagaggagcagcttctatgacaggagagtagttatagaccctcaagagaaacccagtgaggagccccttggggaccgaaggactgtcattgacaaatgctctccacccctagagttcttggatgactctgactctcatttagaaatccaaaagcataaagatagggaggtggtgatggagcacccctcttctggaagtgactggtctgatgttgaggagatctccacagtcagattctctcaggaggaacctgtctccctgaaaccttcagccgttctggagccttcttccttcaccaccgactatgtcatgtaccctcctcatttgtacagtagtccttggtgtgactacgccagctattggaccagcagccccaagccttctagctacccctccacaggcagcagcagcaacgatgcagcccaggttgggaagagcagccggagccgcatgagtgattattcccccaactctacagggagtgtccaaaacacctccagagacatggaggcctcagaggaaggctggtcccagaattctcgttcatttcgcttctccagaagctcagaagaaagagaggtgaaggagaaaagaacattccaagaggagatgcctccgcgtccttgtggaggacacgcatccagctccctgccaaagagccacctggagccaagcctagaggagggcttcattgacactcattgtcacctggacatgctctattccaagctatctttccaagggacctttacaaagttcagaaaaatttacagcagctccttccctaaggaatttcagggctgcatctctgacttctgtgatccccgcaccctgacagattgcctatgggaggagctgttgaaagaggatctggtctggggggcctttggctgtcaccctcattttgcacgttactacagtgagagtcaagaaagaaatcttttgcaagccttaaggcaccctaaggctgtggcatttggagaaatgggcttggattactcttacaagtgcaccacgcctgtcccagaacagcacaaggtatttgagagacagctgcagctggctgtgtctctaaagaagcccttggtgatccactgccgagaagctgatgaagatctgctagaaatcatgaaaaagtttgtgccccctgactacaagatccataggcattgcttcaccggcagctacccggtcattgagcccctgctgaagtactttcccaacatgtctgtgggcttcacggcagtgctgacatactcctctgcctgggaggcccgggaagccttgaggcagatcccactggagagaatcatcgtggaaacggatgctccctatttcctccctcgccaggttcccaaaagcctttgccagtatgcccacccgggcctggccttgcatacggtccgagagattgccagagtcaaagatcagccactctccctcaccttggctgccttgcgtgagaacaccagtcgcctctacagtctttaagcagagaagggcgaccagcagcctgacagaacacaggctggcttgaagtctgtgtctcaggtcgaggatgtgtttagagagctgattggaacacagaaaaccaggacaggatgttttcctccaagcgggtcataaggcttcagcttctgggtggtgggtggggtggggtgggcatggaatgaggggtatggggactgcctgtaatagcactgggattttgcctcccagccaaaatgctccagggtaggcagcaaagaagaaagagtgcgatatgagggtacagtgagtttggcagtccaaattctgttctctgcagcctgtttttgagtagttggtgaataaagtcacccgcctacttgtctaagcacatgtgggtgtgtaactcagttcctggttctcggttctaaaaacagacttccaactgggaaactttttgggggaaattaactggacacctatctcggaggtttattttcttgcaaccagtgaagtcgtcctcctcccttccctggataactcttcagtttgactgtcactgttctggtgtcaactccagcgtcggcacaggcagaaggacttcagctgctggtctcattggttccactgccattgatatgggggggtgcagaggagcactcattgtccatgatggagatccaggacagactgggggactccgggaagaggctttcttggggaagaggaccccaaaggaggtacttcctcctcactgatgccctcagggctgctgtgtgggtgtgttaagctgataaggttcagtttgcggcggaaactacctgctagtcttgtgtcaggggctgccagcctccttttgttttacttttgcccccttcttgggaacatttgaccaaaaataatcctcatttcatcttgtgtacagtcctttgtgtaccccgcccaggttgagaggtgaatcagcgtaattctccgaagctctgctgggcagctcagccatgttacattgtctatgcagaataagcaggcctggtgtctgcaaatgtaccagtccttctcccgcatctcctgggtgcccccttggctttgcctctcctgtgtcctgtctttctgcgttttagaagtgagagcctctccttcaccttttgagcaactgagtcatctcaagtcctgagctctgctctgccgcctgctggtgccttgtaaaggtatactcgttacaggccctagaggttctaatggtccagggttaagtgagaggagactgtactttgtttcaaaggatccttcaccctgatctgcagtgaggtggatagatcacctggagtccctcgtctgtggtcttggaggcttaaattgtaaaatacatcccttatggaatcctaaattcctctaggtgtttttggaaggcgcatttgagccttgtgagctaaaatggaatggatttaatatttcctatctggcatttccatcttgcccctggtacacaagtcactggcctggaactcagccttgattcactgtccgtcttcacggattagctgtgctgttatgttgtctgtgctgcagattggcccatgtgggaagtcgggggggacctgatttcctgcttggaagacttgggggactgccgagcatatcaaagtgtttatagtcaccaagtgaactgcagcacaaccatctcctctccagcaagccctgaagtcagtagtgcctgcaggtgaaaccaaccagccctgtgttagaggaggaaaagcggagatgacatggaagtctccaagcctgtgccatccacctgccaaggaaaagcacaaggtgctatctacttttctctctaggatttagattatcatttatgtgctgttgcacagtgaaacctcacctgtgtgggcgtgaaagctgattggcattgtttttgattcagctttttggatggctaattgttttcactgtgctgtgggaatgcctctgtattttttcccctctttggccatctttttctgaaaataaagtgatggatcctctagcc

SEQ ID NO: 11085 - protein, 761 aa, Homo sapiens
  ref <308>: DATABASE ACCESSION NUMBER: SWISS-Prot / Q93075
  ref <309>: DATABASE ENTRY DATE: 2002-06-15
MASERGKVKHNWSSTSEGCPRKRSCLREPCDVAPSSRPAQRSASRSGGPSSPKRLKAQKEDDVACSRRLSWGSSRRRNNSSSSFSPHFLGPGVGGAASKGCLIRNTRGFLSSGGSPLRPANASLEEMASLEEEACSLKVDSKDSSHNSTNSEFAAEAEGQNDTIEEPNKVQKRKRDRLRDQGSTMIYLKAIQGILGKSMPKRKGEAATRAKPSAAEHPSHGEGPARSEGPAKTAEGAARSVTVTAAQKEKDATPEVSMEEDKTVPERSSFYDRRVVIDPQEKPSEEPLGDRRTVIDKCSPPLEFLDDSDSHLEIQKHKDREVVMEHPSSGSDWSDVEEISTVRFSQEEPVSLKPSAVLEPSSFTTDYVMYPPHLYSSPWCDYASYWTSSPKPSSYPSTGSSSNDAAQVGKSSRSRMSDYSPNSTGSVQNTSRDMEASEEGWSQNSRSFRFSRSSEEREVKEKRTFQEEMPPRPCGGHASSSLPKSHLEPSLEEGFIDTHCHLDMLYSKLSFQGTFTKFRKIYSSSFPKEFQGCISDFCDPRTLTDCLWEELLKEDLVWGAFGCHPHFARYYSESQERNLLQALRHPKAVAFGEMGLDYSYKCTTPVPEQHKVFERQLQLAVSLKKPLVIHCREADEDLLEIMKKFVPPDYKIHRHCFTGSYPVIEPLLKYFPNMSVGFTAVLTYSSAWEAREALRQIPLERIIVETDAPYFLPRQVPKSLCQYAHPGLALHTVREIARVKDQPLSLTLAALRENTSRLYSL

SEQ ID NO: 11086 - DNA, 590 bp, Rattus norvegicus
  misc_feature (1)..(590): n=a, c, g or t
  ref <308>: DATABASE ACCESSION NUMBER: EMBL / AA799599
  ref <309>: DATABASE ENTRY DATE: 2000-03-03
aacggccacaatagtttatttacaattgaactctttataagatatttacaagacagccgactttacacatcagaaatggtatcaaaagtatgaattacagcacagacaacgatatgaaacaggcataaaacaaagctgaggtggagagacaagcactttctcttttaatttattaacactagcttaaactttgttaaagaaagagtaaggaactatgttttaggagaactgcagggcctctctttctgttgaaggctgaatctcacacagtgttgtatcccatgtaggggaaaataaaattaattccccacacactccacacactgtgctctcgctcctggaactttgctccaacctcctcctcaaccaacctcagcatctccaaaccanaagacagctaggagaggacataatcaaatattaggtcctcagggaaaggagaaccaaagcaatagaatccacttcagtcctgccagatagcacctcatggattcctctcagtctagcanaaacaggatatgaggactcctctgaatagggcagaaactggcggttagtctattaacccataccaaattaggaatcgacaa

SEQ ID NO: 11087 - DNA, 591 bp, Rattus norvegicus; identical to SEQ ID NO: 4362
  ref <308>: DATABASE ACCESSION NUMBER: EMBL / AA799600
  ref <309>: DATABASE ENTRY DATE: 2000-03-03

SEQ ID NO: 11088 - protein, 409 aa, Rattus norvegicus; identical to SEQ ID NO: 36
  ref <308>: DATABASE ACCESSION NUMBER: SWISS-Prot / P43035
  ref <309>: DATABASE ENTRY DATE: 2002-06-15

SEQ ID NO: 11089 - DNA, 359 bp, Homo sapiens; identical to SEQ ID NO: 4364
  ref <308>: DATABASE ACCESSION NUMBER: EMBL / L13388
  ref <309>: DATABASE ENTRY DATE: 1999-07-01

SEQ ID NO: 11090 - DNA, 663 bp, Rattus norvegicus; identical to SEQ ID NO: 4367
  ref <308>: DATABASE ACCESSION NUMBER: EMBL / AA799609
  ref <309>: DATABASE ENTRY DATE: 2000-03-03

SEQ ID NO: 11091 - DNA, 599 bp, Rattus norvegicus
  misc_feature (1)..(599): n=a, c, g or t
  ref <308>: DATABASE ACCESSION NUMBER: EMBL / AA799616
  ref <309>: DATABASE ENTRY DATE: 2000-03-03
ctaaggcactgggtgtgatgggctcggttctgtggctgctctccctgctgctcagaggcaggcacagacagctcctgcgagcatctctaccaacatctctaggctggagaattaaatactccgattttagcagttggttactctaacaccagctcagcaacctaactgatacaatgtatggtgctacatattaataccaagttcatcaaggcctgtgacgagggttccctttcaacagatgaaagataactctcaacggctgttacaatacttaggaagtgtttgacaatgctttcaattccatcaaatgcctaacaaggcggaaatgtaagactcccttagttttggaaatcagaagagagaaatgttaatccctggacagactgacagttggaaggctactgagctgctaggtgaggcctcaggcatgaggggagcctacagtgagaccacctcatctgctggtggctgctttcccgctgctttcctaggggcagtatcttccctccttaccttgacatagggtggtcatctgcttactanggacacatctggatttcagagaactgttcagtgtggacggaatcacggggacctga

SEQ ID NO: 11092 - DNA, 2617 bp, Homo sapiens
  ref <308>: DATABASE ACCESSION NUMBER: EMBL / Z50022
  ref <309>: DATABASE ENTRY DATE: 1998-04-30
tagaggatccaagcttacgtacgcgtccggagaccgcttgtgctggagtcggagttgtaacgctccactgactgatagagcgaccggccgaccatggcgcccggagtggcccgcgggccgacgccgtactggaggttgcgcctcggtggcgccgcgctgctcctgctgctcatcccggtggccgccgcgcaggagcctcccggagctgcttgttctcagaacacaaacaaaacctgtgaagagtgcctgaagaacgtctcctgtctttggtgcaacactaacaaggcttgtctggactacccagttacaagcgtcttgccaccggcttccctttgtaaattgagctctgcacgctggggagtttgttgggtgaactttgaggcgctgatcatcaccatgtcggtagtcgggggaaccctcctcctgggcattgccatctgctgctgctgctgctgcaggaggaagaggagccggaagccggacaggagtgaggagaaggccatgcgtgagcgggaggagaggcggatacggcaggaggaacggagagcagagatgaagacaagacatgatgaaatcagaaaaaaatatggcctgtttaaagaagaaaacccgtatgctagatttgaaaacaactaaagcgctccagcacatcagtcccgacgcttcctgtgaggtgcactccgcagcccagcccagccgggagaccacgtggccattgcggtctcctgaccttggccagtgaacctgccagccttccaggacaggcggccggagagctgcccctgaaggacagtcctctcgtcttgcagactggtgaccttctattccctgttcatctctgtttctagatttagtcacttgaaataagaaatctttggggtttgggcttttttatactcttctcagtttgtgaaacgctaactgcacacgaagccgcctgacggcacccagcgctgtggctgtcattctcccagggcagaaccctgcgtttctctctgtccactaacaagcttcacacgcaacacagggaagtcggtttgacttttgtcatgaggagaactgaccagccctcatcattccccataaaaccacggacagcgtctgtgtgcgcatcttgagtcttcacacctgttgactcacacggcttttgctgatgacacggggctccagtacacagtctgataaggacttaacgtcctaacctcaattgtattaaatagcattggggaatagctaaacctttttaaaaaaatttattggattttcctccctgcttaaaagatttcaccagaaaaccttcatataaaaattcaggccctttttggacaatttttaaaatttgtatctttactagaacatgagaatctttttcccttggaagcttgaattataaatgtggtgtttggcctgcctcagcagcaccagttgactgctcgtgtgccagcggtgtggggaggacggggcaggacgctgcagctctctccagccctgttggcatcctcagtgcctgcaggcctctcgctgcctcttgggctgtctggggggtggccatttagggatcgtggggacggggtccaccccaagaagaaagaaaggcccgtccacaggcccggctctggccacgtgccccggaagcaggtgtgtccagagtcagctgagggctctccccacaccacccagcaggcgctggtgctccttctgcctcatgggaccagtccagcttccagccgctctggctcgagggtggtctgaccacttccttctgagtgggcttctctgggagctctccagtggcactgctggacctgcccacgtttctgtaaaatcaggatacgtggctttagtaagcagaccaagcgcttcgtggcagggaaagcagcgtgcggggaagtcactgaaaagtgctgcctaaggaagtttggaaatagtccccgttccagattgccttgaattttaaaacattttgctttgggaaagtaggtcagcagcacctaagatcaaggatgcgttccattttcacacttcacagtcatgaaaactgagaagactgtcttcagcgtgaactaaagttcacaggcagatcactgatccagaacacttcaagaactcgccaaacagctcgataagcctttttgactgtgtacatctgtaccgggaataacattcctaggctgaaatttccacaaagaatagaacctgtacccagttcttcaggctgatttccctgacctcttgggcatttgtatttgtagtaaagtattgcagagattcctaagtattttatagcagccatcaaaattggactttgtattgtttattcataaaagacacttggtaatagacttcagtgaactctgtatgaatgcagtagtgtgtgtgcaaaatccgcttcctgagcgtagggtgctgagctggcgctagggctcggttgtgaaatacagcgtagtcagcccttgcgctcagtgtagaaacccacgtctgtaaggtcggtcttcgtccatctgcttttttctgaaatacactaagagcagccacaaaactgtaacctcaaggaaaccataaagcttggagtgccttaatttttaaccagtttccaataaaacggtttactacctga

SEQ ID NO: 11093 - protein, 180 aa, Homo sapiens
  ref <308>: DATABASE ACCESSION NUMBER: SWISS-Prot / P53801
  ref <309>: DATABASE ENTRY DATE: 2001-10-16
MAPGVARGPTPYWRLRLGGAALLLLLIPVAAAQEPPGAACSQNTNKTCEECLKNVSCLWCNTNKACLDYPVTSVLPPASLCKLSSARWGVCWVNFEALIITMSVVGGTLLLGIAICCCCCCRRKRSRKPDRSEEKAMREREERRIRQEERRAEMKTRHDEIRKKYGLFKEENPYARFENN

SEQ ID NO: 11094 - DNA, 1696 bp, Rattus norvegicus
  ref <308>: DATABASE ACCESSION NUMBER: EMBL / AF095585
  ref <309>: DATABASE ENTRY DATE: 1999-02-08
gcacgaggatcccagcgcggctcctggaggccgccaggcagccgcccagccgggcattcaggagcaggtaccatggattccttcaaggtagtgctggagggacctgccccttggggcttccgtctgcaagggggcaaggacttcaacgtgcccctctccatctctcggctcactcctggaggcaaggccgcacaggccggtgtggccgtgggagactgggtactgagtatcgacggtgagaacgccggaagcctcacacacattgaagcccagaacaagatccgtgcctgtggggagcgcctcagcctgggtcttagcagagcccagcctgctcagagcaaaccacagaaggccctgacccctcccgccgaccccccgaggtacacttttgcaccaagcgcctccctcaacaagacggcccggcccttcggggcacccccacctactgacagcgccctgtcgcagaatggacagctgctcagacagctggtccctgatgccagcaagcagcggctgatggagaatactgaagactggcgcccgcggccagggacaggccagtcccgttccttccgcatccttgctcacctcacgggcacagagttcatgcaagacccggatgaggaattcatgaagaagtcaagccaggtgcccaggacagaagccccagccccagcctcaaccataccccaggaatcctggcctggccccaccacccccagccccaccagccgcccaccctgggccgtagatcctgcatttgctgagcgctatgccccagacaaaaccagcacagtgctgacccgacacagccagccagccacacctacgcctctgcagaaccgcacctccatagttcaggctgcagctggagggggcacaggaggaggcagcaacaatggcaagacgcctgtatgccaccagtgccacaagatcatccgcggccgatacctggtagcactgggccacgcgtaccatcctgaggaatttgtgtgcagccagtgtgggaaggtcctggaagagggtggcttcttcgaggagaagggagctatcttttgcccctcctgctatgatgtgcgctatgcacccagctgtgccaaatgcaagaagaagatcactggagagatcatgcatgcgctgaagatgacctggcatgttccctgcttcacctgtgcagcctgcaaaacccctatccgcaacagggctttctacatggaggagggggctccctactgcgagcgagattacgagaagatgtttggcacaaagtgtcgcggctgtgacttcaagatcgatgccggggaccgtttcctggaagccctgggtttcagctggcatgatacgtgttttgtttgcgcaatatgtcaaatcaacttggaaggaaagaccttctactccaagaaggacaagcccctgtgcaagagccatgccttttcccacgtatgagcacctcctcacactactgccaccctactctgccagaagggtgataaaatgagagagctctctctccctcgacctttctgggtggggctggcagccattgtcctagccttggctcctggccagatcctggggctccctcctcacagtcccctttcccacacttcctccaccaccaccaccgtcactcacaggtgctagcctcctagccccagttcactctggtgtcacaataaacctgtatgtagctgtg

SEQ ID NO: 11095 - protein, 457 aa, Rattus norvegicus; identical to SEQ ID NO: 4378
  ref <308>: DATABASE ACCESSION NUMBER: SWISS-Prot / AAD13197
  ref <309>: DATABASE ENTRY DATE: 2003-02-01

SEQ ID NO: 11096 - DNA, 1567 bp, Homo sapiens
  ref <308>: DATABASE ACCESSION NUMBER: EMBL / AF345905
  ref <309>: DATABASE ENTRY DATE: 2001-04-09
cgacgcagagcagcgccctggccgggccaagcaggagccggcatcatggattccttcaaggtagtgctggaggggccagcaccttggggcttccggctgcaagggggcaaggacttcaatgtgcccctctccatttcccggctcactcctgggggcaaagcggcgcaggccggagtggccgtgggtgactgggtgctgagcatcgatggcgagaatgcgggtagcctcacacacatcgaagctcagaacaagatccgggcctgcggggagcgcctcagcctgggcctcagcagggcccagccggttcagagcaaaccgcagaaggtgcagacccctgacaaacagccgctccgaccgctggtcccagatgccagcaagcagcggctgatggagaacacagaggactggcggccgcggccggggacaggccagtcgcgttccttccgcatccttgcccacctcacaggcaccgagttcatgcaagacccggatgaggagcacctgaagaaatcaagccaggtgcccaggacagaagccccagccccagcctcatctacaccccaggagccctggcctggccctaccgcccccagccctaccagccgcccgccctgggctgtggaccctgcgtttgccgagcgctatgccccggacaaaacgagcacagtgctgacccggcacagccagccggccacgcccacgccgctgcagagccgcacctccattgtgcaggcagctgccggaggggtgccaggagggggcagcaacaacggcaagactcccgtgtgtcaccagtgccacaaggtcatccggggccgctacctggtggcgttgggccacgcgtaccacccggaggagtttgtgtgtagccagtgtgggaaggtcctggaagagggtggcttctttgaggagaagggcgccatcttctgcccaccatgctatgacgtgcgctatgcacccagctgtgccaagtgcaagaagaagattacaggcgagatcatgcacgccctgaagatgacctggcacgtgcactgctttacctgtgctgcctgcaagacgcccatccggaacagggccttctacatggaggagggcgtgccctattgcgagcgagactatgagaagatgtttggcacgaaatgccatggctgtgacttcaagatcgacgctggggaccgcttcctggaggccctgggcttcagctggcatgacacctgcttcgtctgtgcgatatgtcagatcaacctggaaggaaagaccttctactccaagaaggacaggcctctctgcaagagccatgccttctctcatgtgtgagccccttctgcccacagctgccgcggtggcccctagcctgaggggcctggagtcgtggccctgcatttctgggtagggctggcaatggttgccttaaccctggctcctggcccgagcctggggctccctgggccctgccccacccaccttatcctcccaccccactccctccaccaccacagcacaccggtgctggccacaccagccccctttcacctccagtgccacaataaacctgtacccagctgtg

SEQ ID NO: 11097 - protein, 424 aa, Homo sapiens
  misc_feature (1)..(424): Xaa=Unknown amino acid
MDSFKVVLEGPAPWGFRLQGGKDFNVPLSISRLTPGGKAAQAGVAVGDWVLSIDGENAGSLTHIEAQNKIRACGERLSLGLSRAQPVQSKPQKVQTPDKQPLRPLVPDASKQRLMENTEDWRPRPGTGQSRSFRILAHLTGTEFMQDPDEEHLKKSSQVPRTEAPAPASSTPQEPWPGPTAPSPTSRPPWAVDPAFAERYAPDKTSTVLTRHSQPATPTPLQSRTSIVQAAAGGVPGGGSNNGKTPVCHQCHKVIRGRYLVALGHAYHPEEFVCSQCGKVLEEGGFFEEKGAIFCPPCYDVRYAPSCAKCKKKITGEIMHALKMTWHVHCFTCAACKTPIRNRAFYMEEGVPYCERDYEKMFGTKCHGCDFKIDAGDRFLEALGFSWHDTCFVCAICQINLEGKTFYSKKDRPLCKSHAFSHVX

SEQ ID NO: 11098 - DNA, 591 bp, Rattus norvegicus; identical to SEQ ID NO: 4393
  ref <308>: DATABASE ACCESSION NUMBER: EMBL / AA799645
  ref <309>: DATABASE ENTRY DATE: 2000-03-03

SEQ ID NO: 11099 - protein, 92 aa, Rattus norvegicus; identical to SEQ ID NO: 4394
  ref <308>: DATABASE ACCESSION NUMBER: SWISS-Prot / O08589
  ref <309>: DATABASE ENTRY DATE: 2002-06-15

SEQ ID NO: 11100 - DNA, 279 bp, Homo sapiens; identical to SEQ ID NO: 4395
  ref <308>: DATABASE ACCESSION NUMBER: EMBL / U72245
  ref <309>: DATABASE ENTRY DATE: 1999-07-01

SEQ ID NO: 11101 - protein, 92 aa, Homo sapiens [sequence omitted]

SEQ ID NO: 11102 - DNA, 2626 bp, Rattus norvegicus
  ref <308>: DATABASE ACCESSION NUMBER: EMBL / X65687
  ref <309>: DATABASE ENTRY DATE: 1993-03-11
ccgggaccagcggacggaccgagcagcgtcctgcggccggcaccgcggcggcccagatccggccagcagcgcgcgcccggacgccgctgccttcagccggccccgcccagcgcccgcccgcgggatgcggagcggcgggcgcccgaggccgcggcccggctaggcccagtcgcccgcacgcggcggcccgacgctgcggccaggccggctgggctcagcctaccgagaagagactctgatcatcatccctgggttacccctgtctctgggggccacggataccatgaacgacgtagccattgtgaaggagggctggctgcacaaacgaggggaatatattaaaacctggcggccacgctacttcctcctcaagaacgatggcacctttattggctacaaggaacggcctcaggatgtggatcagcgagagtccccactcaacaacttctcagtggcacaatgccagctgatgaagacagagcggccaaggcccaacacctttatcatccgctgcctgcagtggaccacagtcattgagcgcaccttccatgtggaaacgcctgaggagcgggaagaatgggccaccgccattcagactgtggccgatggactcaagaggcaggaagaagagacgatggacttccgatcaggctcacccagtgacaactcaggggctgaagagatggaggtgtccctggccaagcccaagcaccgtgtgaccatgaacgagtttgagtacctgaaactactgggcaagggcacctttgggaaagtgattctggtgaaagagaaggccacaggccgctactatgccatgaagatcctcaagaaggaggtcatcgtcgccaaggatgaggttgcccacacgcttactgagaaccgtgtcctgcagaactctaggcatcccttccttacggccctcaagtactcattccagacccacgaccgcctctgctttgtcatggagtatgccaacgggggcgagctcttcttccacctgtctcgagagcgcgtgttctccgaggaccgggcccgcttctatggtgcggagattgtgtctgccctggactacttgcactccgagaagaacgtggtgtaccgggacctgaagctggagaacctcatgctggacaaggacgggcacatcaagataacggacttcgggctgtgcaaggaggggatcaaggatggtgccactatgaagacattctgcggaacgccggagtacctggcccctgaggtgctggaggacaacgactacggccgtgcagtggactggtgggggctgggcgtggtcatgtatgagatgatgtgtggccgcctgcccttctacaaccaggaccacgagaagctgttcgagctgatcctcatggaggagatccgcttcccgcgcacactcggccctgaggccaagtccctgctctccgggctgctcaagaaggaccctacacagaggctcggtgggggctctgaggatgccaaggagatcatgcagcaccggttctttgccaacatcgtgtggcaggatgtgtatgagaagaagctgagcccacctttcaagccccaggtcacctctgagactgacaccaggtatttcgatgaggagttcacagctcagatgatcaccatcacgccgcctgatcaagatgacagcatggagtgtgtggacagtgagcggaggccgcacttcccccagttctcctactcagccagtggcacagcctgaggcctggggcagcggctggcagctccacgctcctctgcattgccgagtccagaagccccgcatggatcatctgaacctgatgttttgtttctcggatgcgctggggaggaaccttgccagcctccaggaccaggggaggatgtttctactgtgggcagcagcctacctcccagccaggtcaggaggaaaactatcctggggtttttcttaatttatttcatccagtttgagaccacacatgtggcctcagtgcccagaacaattagattcatgtagaaaactattaaggactgacgcgaccatgtgcaatgtgggctcatgggtctgggtgggtcccgtcactgcccccattggcctgtccaccctggccgccacctgtctctagggtccagggccaaagtccagcaagaaggcaccagaagcacctccctgtggtatgctaactggccctctccctctgggcggggagaggtcacagctgcttcagccctagggctggatgggatggccagggctcaagtgaggttgacagaggaacaagaatccagtttgttgctgtgtcccatgctgttcagagacatttaggggattttaatcttggtgacaggagagcccctgccctcccgctcctgcgtggtggctcttagcgggtaccctgggagcgcctgcctcacgtgagccctctcctagcacttgtccttttagatgctttccctctcccgctgtccgtcaccctggcctgtcccctcccgccagacgctggccattgctgcaccatgtcgttttttacaacattcagcttcagcatttttactattataataagaaactgtccctccaaattcaataaaaattgcttttcaagcttgaaaaaaaaaaaaaaaaaaaaaaaaaaaaaaa

SEQ ID NO: 11103 - protein, 480 aa, Rattus norvegicus
  ref <308>: DATABASE ACCESSION NUMBER: SWISS-Prot / P31750
  ref <309>: DATABASE ENTRY DATE: 2002-06-15
MNDVAIVKEGWLHKRGEYIKTWRPRYFLLKNDGTFIGYKERPQDVDQRESPLNNFSVAQCQLMKTERPRPNTFIIRCLQWTTVIERTFHVETPEEREEWATAIQTVADGLKRQEEETMDFRSGSPSDNSGAEEMEVSLAKPKHRVTMNEFEYLKLLGKGTFGKVILVKEKATGRYYAMKILKKEVIVAKDEVAHTLTENRVLQNSRHPFLTALKYSFQTHDRLCFVMEYANGGELFFHLSRERVFSEDRARFYGAEIVSALDYLHSEKNVVYRDLKLENLMLDKDGHIKITDFGLCKEGIKDGATMKTFCGTPEYLAPEVLEDNDYGRAVDWWGLGVVMYEMMCGRLPFYNQDHEKLFELILMEEIAFPRTLGPEAKSLLSGLLKKDPTQRLGGGSEDAKEIMQHRFFANIVWQDVYEKKLSPPFKPQVTSETDTRYFDEEFTAQMITITPPDQDDSMECVDSERRPHFPQFSYSASGTA

SEQ ID NO: 11104 - DNA, 461 bp, Rattus norvegicus; identical to SEQ ID NO: 4446
  misc_feature (1)..(461): n=a, c, g or t
  ref <308>: DATABASE ACCESSION NUMBER: EMBL / AA799681
  ref <309>: DATABASE ENTRY DATE: 2000-03-03

SEQ ID NO: 11105 - DNA, 564 bp, Rattus norvegicus
  ref <308>: DATABASE ACCESSION NUMBER: EMBL / AA799687
  ref <309>: DATABASE ENTRY DATE: 2000-03-03
gttttcaaacattctccaaagaaagtaaaacccttacccctgccccactgttcatgaaatacaggaataacaacttggacagaaaagcagacacgtttgcacacaagattttcactcaacaattggtcctaaaaggctccaatacatttctaagtaaaggtccattaaattaagaagccacaagttgtttgacactttcgtagtttaacttaggtcctatcagcattatgatgttcattcaaaatactgagggacaagaggtgattctgtgacagatacccaaagcacatggctctacaaagctacaaatgttcatgaggatacagactgaggaattaaacattaacatagaaatggatctgagagaatttatgtatagtttagcctttggcatctggtataacatgtttcttcttcatagagacactgcactattcaacttattaaccagaataagtttctccaaacacatttctcatcaaacacagattgtccacagccaatttcacttgaggtagttgggctgtttaatgacattctagtgaagttcgcatgcacacagga

SEQ ID NO: 11106 - DNA, 451 bp, Homo sapiens
  ref <308>: DATABASE ACCESSION NUMBER: EMBL / AI865528
  ref <309>: DATABASE ENTRY DATE: 2000-03-10
tttttttttttttaatactttaaaaataagtttattataactaacgaatataaaatctgacagatattttcaaacatttttgcaaaaaaagtaaaaccctcccctgtcacccctccccacaagatagagaataaggacttggacagagaaacaatacaaatctaaacatgaaactgtcgctcatcggttggtcccaagaggctccaacatattatattctaagtaaaggtccattaaattaagaagttaacaagccacttgacacttttatagtttaacttgccttctactctgattatgatgctcattcaaaatgctgagagacaagaacaggtaacattaacactgcacgtgacagatattcaaagtgcataaatctatgaaaccacaaacattcataagaatactagggcatggaattaaacagtgacttaaaaattaatccaaggaa

SEQ ID NO: 11107 - DNA, 579 bp, Rattus norvegicus; identical to SEQ ID NO: 4463
  ref <308>: DATABASE ACCESSION NUMBER: EMBL / AA799732
  ref <309>: DATABASE ENTRY DATE: 2000-03-03

SEQ ID NO: 11108 - DNA, 1080 bp, Homo sapiens; identical to SEQ ID NO: 4464
  ref <308>: DATABASE ACCESSION NUMBER: EMBL / X96484
  ref <309>: DATABASE ENTRY DATE: 1996-05-03

SEQ ID NO: 11109 - protein, 220 aa, Homo sapiens; identical to SEQ ID NO: 4465
  ref <308>: DATABASE ACCESSION NUMBER: SWISS-Prot / Q14129
  ref <309>: DATABASE ENTRY DATE: 2002-06-15

SEQ ID NO: 11110 - DNA, 1865 bp, Rattus norvegicus
  ref <308>: DATABASE ACCESSION NUMBER: EMBL / AF177476
  ref <309>: DATABASE ENTRY DATE: 2000-03-28
cggcacgagctgaattgaggctcaggcacgccggctcaggattggtgctgggccgggccggggtctttggccggaagtggaaaaaggatgcaggaccatcagcacgtgcccatcgacatccagaccagcaagctgctcgattggctggtggacagaagacactgcaacttaaaatggcaaagcctggtgctgaccatccgggaaaagatcaacaccgccatccaggacatgccagagagccaagagattgcccagctgctctctggttcctacatccactacttccactgcctaagaatagtggaccttcttaaaggtaccgaggcttccaccaaaaatatttttggccgctactcttcacagcggatgaaggattggcaggagatcataagcctgtatgagaaggacaacacctatttagtggaactctctagcctcctggttcggaatgtcaactatgagatcccctctctgaagaagcagattgccaagtgccagcaactgcagcaagactacagccgcaaggaggaggagggccaggctggggctgctgagatgcgagagcagttctaccactcctgcaaacagtacggcatcacgggagacaatgtccgacgagagcttctggccctggtgaaggacctgccaagtcagctggctgagataggagcgggagctcagtccctgggggaagccatcgacctgtaccaggcctgtgtggagtttgtatgtgacagccccacagagcaggtgctgcccatgctgcggtacgttcagccgaagggaaactccacggtgtatgagtggaggacagggacagagccctctgtggtagagcggccacaactggaggaccctcccgagcaggtgcaagaagacgagatcgactggggcgactttggcctggaggctgtttctgactctggaaacatcatctctgctgagacccctgggatagactggggtatctccctggagtcagagtccaaggatgctggggctgacaagatagactggggtgacaatgctgttgcttcggagatcaccgtgctggagacaggaacggaggctccagagggtgttgctaggggctcagacgctctgactctccttgaataccctgagactcggaatcagttcatcgatgagctcatggagcttgagatcttcttgtctcagagagcagtagagatgagtgaggaggctgacatcctgtccgtgagccagttccagctggctcctgccatccttcagggccagaccaaggagaagatgctcagcctggtgtccacactgcagcatctgattggccagctcaccagtctggacctgcagcacctgtttatgattctggcctcaccgaggtatgtggaccgggtgacagagctcctccagcagaagctgaagcagtcccagctgttggctctgaagaaggacctgatggtggagaagcagcaggaggcgcttcaggagcaggcagcgctggagcccaagctggacctgctgctggagaagaccagagagctgcagaagctgattgaagctgacatctccaagagatacaacggccgtcctgtgaacctgatggggacctctgtgtgacgtgctggccctgtgtccgccaccagcggcctggtgggggtggacagcccaggctggtattgctggacctcaccagcaagaagccagcagaggtggagcagagccacaaggaagcacctgagtggtggcaccagcattcattgtgacctatgcaagaagtctgagtggctctgtggatctaagcctaaggcacagttgcttcttctggttatcaaggaaggcttaataaaaaaaggaagtgactcctcaaaaaaaaaaaaaaa

SEQ ID NO: 11111 - protein, 504 aa, Rattus norvegicus; identical to SEQ ID NO: 4476
  ref <308>: DATABASE ACCESSION NUMBER: SWISS-Prot / AAF60222
  ref <309>: DATABASE ENTRY DATE: 2003-02-01

SEQ ID NO: 11112 - DNA, 671 bp, Rattus norvegicus; identical to SEQ ID NO: 4483
  misc_feature (1)..(671): n=a, c, g or t
  ref <308>: DATABASE ACCESSION NUMBER: EMBL / AA799751
  ref <309>: DATABASE ENTRY DATE: 2000-03-03

SEQ ID NO: 11113 - DNA, 648 bp, Homo sapiens; identical to SEQ ID NO: 4484
  misc_feature (1)..(648): n=a, c, g or t
  ref <308>: DATABASE ACCESSION NUMBER: EMBL / AV724415
  ref <309>: DATABASE ENTRY DATE: 2000-10-05

SEQ ID NO: 11114 - DNA, 578 bp, Rattus norvegicus
  ref <308>: DATABASE ACCESSION NUMBER: EMBL / AA799755
  ref <309>: DATABASE ENTRY DATE: 2000-03-03
ggtgtgacgttggcttccttgcctccccaaaggctggcaggtagaaccgggggcttctgcagagactctgcttttggaggcctggtggtaacagggcccacccaggagcatctgatggctatgcgcctgccagcacaggctggggaaatgctgctttagtttgaattgggctagggctttgggaccccagtctcagaagtccccaaagttgactgtgtaggtctccactgttgtgactggaaacgtgaggcctgtgtccatctcctcctcctcctcctcctcctcctccagttcctccacctccaggtcaggcccatactctgtctcaaactctgtcactacctctgtataggtctcagtctctgactcctcccagcccgcagcggtagtgggtagaatttcccagagcctcgaggtactgcctggtgtaggggaaggaggcagcgtaagggcaggagtggggctcgtggcaaggcctgtggtagaattgaagcgccgcagcctcatctgttccctcatcctgagccggtaccgtaaccggcgctgctgcaagcgccgctgctggggtgtcattggtc

SEQ ID NO: 11115 - protein, 476 aa, Rattus norvegicus
  ref <308>: DATABASE ACCESSION NUMBER: SWISS-Prot / P15087
  ref <309>: DATABASE ENTRY DATE: 2002-06-15
MAGRGGRVLLALCAALVAGGWLLAAEAQEPGAPAAGMRRRRRLQQEDGISFEYHRYPELREALVSVWLQCTAISRIYTVGRSFEGRELLVIELSDNPGVHEPGEPEFKYIGNMHGNEAVGRELLIFLAQYLCNEYQRGNETIVNLIHSTRIHIMPSLNPDGFEKAASQPGELKDWFVGRSNAQGIDLNRNFPDLDRIVYVNEKEGGPNNHLLKNLKKIVDQNSKLAPETKAVIHWIMDIPFVLSANLHGGDLVANYPYDETRSGTAHEYSSCPDDAIFQSLARAYSSFNPVMSDPNRPPCRKNDDDSSFVDGTTNGGAWYSVPGGMQDFNYLSSNCFEITVELSCEKFPPEETLKSYWEDNKNSLINYLEQIHRGVKGFVRDLQGNPIANATISVDGIDHDVTSAKDGDYWRLLVPGNYKLTASAPGYLAITKKVAVPFSPAVGVDFELESFSERKEEEKEELMEWWKMMSETLNF

SEQ ID NO: 11116 - DNA, 2839 bp, Homo sapiens
  ref <308>: DATABASE ACCESSION NUMBER: EMBL / D86479
  ref <309>: DATABASE ENTRY DATE: 1998-03-18
atggactattactttgggcctcctccgccccagaagcccgatgctgagcgccagacggacgaagagaaggaggagctgaagaaacccaaaaaggaggacagcagccccaaggaggagaccgacaagtgggcagtggagaagggcaaggaccacaaagagccccgaaagggcgaggagttggaggaggagtggacgcctacggagaaagtcaagtgtccccccattgggatggagtcacaccgtattgaggacaaccagatccgagcctcctccatgctgcgccacggcctgggggcacagcgcggccggctcaacatgcagaccggtgccactgaggacgactactatgatggtgcgtggtgtgccgaggacgatgccaggacccagtggatagaggtggacaccaggaggactacccggttcacaggcgtcatcacccagggcagagactccagcatccatgacgattttgtgaccaccttcttcgtgggcttcagcaatgacagccagacatgggtgatgtacaccaacggctatgaggaaatgacctttcatgggaacgtggacaaggacacacccgtgctgagtgagctcccagagccggtggtggctcgtttcatccgcatctacccactcacctggaatggcagcctgtgcatgcgcctggaggtgctggggtgctctgtggcccctgtctacagctactacgcacagaatgaggtggtggccaccgatgacctggatttccggcaccacagctacaaggacatgcgccagctcatgaaggtggtgaacgaggagtgccccaccatcacccgcacttacagcctgggcaagagctcacgaggcctcaagatctatgccatggagatctcagacaaccctggggagcatgaactgggggagcccgagttccgctacactgctgggatccatggcaacgaggtgctgggccgagagctgttgctgctgctcatgcagtacctgtgccgagagtaccgcgatgggaacccacgtgtgcgcagcctggtgcaggacacacgcatccacctggtgccctcactgaaccctgatggctacgaggtggcagcgcagatgggctcagagtttgggaactgggcgctgggactgtggactgaggagggctttgacatctttgaagatttcccggatctcaactctgtgctctggggagctgaggagaggaaatgggtcccctaccgggtccccaacaataacttgcccatccctgaacgctacctttcgccagatgccacggtatccacggaggtccgggccatcattgcctggatggagaagaaccccttcgtgctgggagcaaatctgaacggcggcgagcggctagtatcctacccctacgatatggcccgcacgcctacccaggagcagctgctggccgcagccatggcagcagcccggggggaggatgaggacgaggtctccgaggcccaggagactccagaccacgccatcttccggtggcttgccatctccttcgcctccgcacacctcaccttgaccgagccctaccgcggaggctgccaagcccaggactacaccggcggcatgggcatcgtcaacggggccaagtggaacccccggaccgggactatcaatgacttcagttacctgcataccaactgcctggagctctccttctacctgggctgtgacaagttccctcatgagagtgagctgccccgcgagtgggagaacaacaaggaggcgctgctcaccttcatggagcaggtgcaccgcggcattaagggggtggtgacggacgagcaaggcatccccattgccaacgccaccatctctgtgagtggcattaatcacggcgtgaagacagccagtggtggtgattactggcgaatcttgaacccgggtgagtaccgcgtgacagcccacgcggagggctacaccccgagcgccaagacctgcaatgttgactatgacatcggggccactcagtgcaacttcatcctggctcgctccaactggaagcgcatccgggagatcatggccatgaacgggaaccggcctatcccacacatagacccatcgcgccctatgaccccccaacagcgacgcctgcagcagcgacgcctacaacaccgcctgcggcttcgggcacagatgcggctgcggcgcctcaacgccaccaccaccctaggcccccacactgtgcctcccacgctgccccctgcccctgccaccaccctgagcactaccatagagccctggggcctcataccgccaaccaccgctggctgggaggagtcggagactgagacctacacagaggtggtgacagagtttgggaccgaggtggagcccgagtttgggaccaaggtggagcccgagtttgagacccagttggagcctgagtttgagacccagctggaacccgagtttgaggaagaggaggaggaggagaaagaggaggagatagccactggccaggcattccccttcacaacagtagagacctacacagtgaactttggggacttctgagatcagcgtcctaccaagaccccagcccaactcaagctacagcagcagcacttcccaagcctgctgaccacagtcacatcacccatcagcacatggaaggcccctggtatggacactgaaaggaagggctggtcctgcccctttgagggggtgcaaacatgactgggacctaagagccagaggctgtgtagaggctcctgctccacctgccagtctcgtaagagatggggttgctgcagtgttggagtaggggcagagggagggagccaaggtcactccaataaaacaagctcatggcaaa

SEQ ID NO: 11117 - protein, 846 aa, Homo sapiens
  misc_feature (1)..(846): Xaa=Unknown amino acid
MDYYFGPPPPQKPDAERQTDEEKEELKKPKKEDSSPKEETDKWAVEKGKDHKEPRKGEELEEEWTPTEKVKCPPIGMESHRIEDNQIRASSMLRHGLGAQRGRLNMQTGATEDDYYDGAWCAEDDARTQWIEVDTRRTTRFTGVITQGRDSSIHDDFVTTFFVGFSNDSQTWVMYTNGYEEMTFHGNVDKDTPVLSELPEPVVARFIRIYPLTWNGSLCMRLEVLGCSVAPVYSYYAQNEVVATDDLDFRHHSYKDMRQLMKVVNEECPTITRTYSLGKSSRGLKIYAMEISDNPGEHELGEPEFRYTAGIHGNEVLGRELLLLLMQYLCREYRDGNPRVRSLVQDTRIHLVPSLNPDGYEVAAQMGSEFGNWALGLWTEEGFDIFEDFPDLNSVLWGAEERKWVPYRVPNNNLPIPERYLSPDATVSTEVRAIIAWMEKNPFVLGANLNGGERLVSYPYDMARTPTQEQLLAAAMAAARGEDEDEVSEAQETPDHAIFRWLAISFASAHLTLTEPYRGGCQAQDYTGGMGIVNGAKWNPRTGTINDFSYLHTNCLELSFYLGCDKFPHESELPREWENNKEALLTFMEQVHRGIKGVVTDEQGIPIANATISVSGINHGVKTASGGDYWRILNPGEYRVTAHAEGYTPSAKTCNVDYDIGATQCNFILARSNWKRIREIMAMNGNRPIPHIDPSRPMTPQQRRLQQRRLQHRLRLRAQMRLRRLNATTTLGPHTVPPTLPPAPATTLSTTIEPWGLIPPTTAGWEESETETYTEVVTEFGTEVEPEFGTKVEPEFETQLEPEFETQLEPEFEEEEEEEKEEEIATGQAFPFTTVETYTVNFGDFX

SEQ ID NO: 11118 - DNA, 609 bp, Rattus norvegicus; identical to SEQ ID NO: 4516
  ref <308>: DATABASE ACCESSION NUMBER: EMBL / AA799783
  ref <309>: DATABASE ENTRY DATE: 2000-03-03

SEQ ID NO: 11119 - DNA, 249 bp, Homo sapiens; identical to SEQ ID NO: 4517
  ref <308>: DATABASE ACCESSION NUMBER: EMBL / AI682207
  ref <309>: DATABASE ENTRY DATE: 2000-03-04

SEQ ID NO: 11120 - DNA, 631 bp, Rattus norvegicus
  ref <308>: DATABASE ACCESSION NUMBER: EMBL / AA799796
  ref <309>: DATABASE ENTRY DATE: 2000-03-03
aacaaaactttgtacattttaatacatgtggaattttacatctaaaataacagcgcattcaaaaaatttaccatttatacaaattgttacagaataacaaccagtgggtcaaatacgtaaaataaaaaaccacactgattcttttaaattatctacaaaaggtttgactttctttaaaattcccctgaacatataaaaataaattaattttacttttcaattaaatctaccaattagaaatattacaaatcaaaatatcaatgttatcttatgaatttttcacattacaaaacagattcacaaccttatttacacaagtgaggtaagaagtgtgcagtgtcactcacaggagacatactgcagagcgagcgcgctcttccagctaagcacaccgtggaggtccaagtgcggctggtctttcccattagtaattcatgcattccagacacagatcaatgattgtatccccaattgtttggcctactagtctgccatattgtcacagtcaagctcatggtgactggaactcaaaggctgtgaggcaggtttaggaaccaggcacaggcgccattgttccagtgggtggtttagagagataaacaagcacaaagactcttcccaaatctacttc

SEQ ID NO: 11121 - DNA, 1035 bp, Homo sapiens
  ref <308>: DATABASE ACCESSION NUMBER: EMBL / AL137295
  ref <309>: DATABASE ENTRY DATE: 2000-02-18
ttttcttttgagaattgctttctttagtgttaagacctactcatattttgaagaaatcttgagttaagtgagttctgaggctgctgggggaaccagatcaattcaaagctaaatacttctttcagaaaggggccactgtggaaagtgctggtggggtttgcccttgatcaagtgcctccattgtgctgcaagggctgtagacagcagggtgggacagtcagtcctccgagcagcaggaatcatcccgtcacctgcagccttcccatgcttccgcctttattcagaactttctgtgccactgtagatagctcaggcaaaactattacctgggtatttatccactaatgagtcacaagaaaaggagtggatttggtaagaatagagatttgttttatttaaaccacttcccattactgaccattaaaagctcaccactagagttcctgaaacaggtgaaacctgtatgacagcccttccactttggggagccacgcttttgatgtgacagtaccgcagagtgattcccccactgaggatgtcatcatcaaactcttctttggtgtgtgaattattagtggaaaagacccagctgtaattagacctccactgtgtacttagctggaagaacatgttaattctgcaatatgtttcttggttaaacattgcacagttcttacctcatttctgtaaataaagttttgtgaatctgttttgtattgtgacaaattcataagataacattgatattttgatttgtaatatttctaattggtagatttaattgaaaagtaaaattaatttatttttatatgttcaggggaattttaaagtcaaatcttttgtagataatttaaaaaatcagtgtggtttattttacttatttaacccactggttgttattctgtaacagtttgtataaatggtaaattttgaatgtgttgttattttacctagatgtaaaattccacatgtattaaaatgtacaaaatgttttgttaataaaatttaataatgttaaaaaaaaaaaaaaaaaaa

SEQ ID NO: 11122 - DNA, 2908 bp, Rattus norvegicus; identical to SEQ ID NO: 2270
  ref <308>: DATABASE ACCESSION NUMBER: EMBL / D88250
  ref <309>: DATABASE ENTRY DATE: 1998-04-27

SEQ ID NO: 11123 - protein, 694 aa, Rattus norvegicus; identical to SEQ ID NO: 2275
  ref <308>: DATABASE ACCESSION NUMBER: SWISS-Prot / BAA25797
  ref <309>: DATABASE ENTRY DATE: 2003-02-01

SEQ ID NO: 11124 - DNA, 582 bp, Rattus norvegicus; identical to SEQ ID NO: 4522
  ref <308>: DATABASE ACCESSION NUMBER: EMBL / AA799804
  ref <309>: DATABASE ENTRY DATE: 2000-03-03

SEQ ID NO: 11125 - DNA, 3063 bp, Rattus norvegicus
  ref <308>: DATABASE ACCESSION NUMBER: EMBL / U18293
  ref <309>: DATABASE ENTRY DATE: 2000-03-04
cattagcatgtttccatggccacccgccacccaggagctttgaccatgggacactggttgataagcagggaattccattagaaggctgttgcagtgtcacgaagcactgagcgacagtagctttgactagaggagaaagggaagcagagaccaacagactaggggcttaacccatggcaggagtggagtctctcctccggctgactgagcagggcgagctctgccttggtcagcccattgacatttttttgaaaggtgtctgggtacattttctatgtgtgtgtaaatattttcttacagggaatgaaaaagactcgagcagatgcaaaaaaaattggccccctcaagctggcagccctcaatggactctccctgtcccggctgcccctgcctgacgaaggcaaagaagtgtccaccagagcgacaaatgacgagaggtgtaaagttctggagcagcggttagagcaaggaacggtcttcaccgagtatgagaggattctgaaaaagcggctggttgatggcgagtgctcaacagctcggctccctgaaaatgcagagagaaaccgattccaagatgtgctcccctacgatgatgccagagtggagttggtgccaaccaaggagaacaacactggctatatcaatgcgtcacacattaaggtctctgtcagcggaattgaatgggattatattgccacacagggaccattacaaaatacctgccaggacttttggcagatggtgtgggaacagggagtcgcaattatagcaatggtgacagcggaagaggagggaggtcgggagaagagctttaggtattggccacggcttggctccaggcacaacactgtcacctatggaaggtttaagatcacaactcgcttccgcacggactcgggctgctacgccaccacaggtttgaagatgaagcaccttctcacagggcaggagaggacagtttggcatctccagtacacagactggcctgaacatggctgtcccgaagacctcaagggatttttatcataccttgaagagatccagtcagttcgacgtcatacaaacagtacaagtgaacccagaagtcccaaccccccgctgctggtgcactgcagtgctggcgtgggaagaactggggttgtcattctgtcagagatcatggtggcctgtctggaacacaatgaggtgctggacatccccagagtgctggagctgctgaggcagcagaggatgatgctggtgcagacacttagccagtacacgttcgtgtaccgggtgctcattcagttcctgaagagctctaggctcatctaagctccaccacctttctatggggacccaatcatgtgatgtgtttacagctttaaaaagaaaaaggaaagaaaagagtgcagctcccactttgttcccaggagtccatgtggagacctcaacaggaagtgtgtaagagctgaagaagctaagcatggggctgaggagtctggggacctgggagaggccgaggaggcaggtgctgccctggccacatctgtctggtttgctgcacttgcacaagttttggagattgtattttctagacagttctctgtcgtactgaagctgcctgggcagtcccagccagcacttaaggcacacagacttctatcttaaactcatatttgataatgcaattttatgactaaatagggctttttcttttttagctagaagctgaacttttctgtgggacatccacagaccgtgtggttcttgagtacctgtatttaaaaccattattagcttttgtttaagaacaaaaaccatgggggaactaagtgttttattcatgaaatccaaaactaaagaaaatctaaaagtgttattttgaaacatagaaagcatttttatattcagaatgtttttttaaaagttatatatttgtaccttctatattttccaaataagaactccattgttatgacactgagtcaatgtaaagttggggataaaggcacattatttaaaaatctaagaatcagattcactattttttcagtattattagtaagcgtaaaatgagtttgatttttttgaacatgaaagagcaattgcataggatggttttaagcacttttttgttaaaaatgagtttaatatatgtggctttatatttaagcaacagtggacactatttcaaagagaagggctctgagtacgttcgatgactaggggaagaggaagtgctctcggggctcacccggaaggtgtggtcattacacaaatgcagtattacctatgctcactcgagcgagagcgagagctgagatggcgtggaactcaaggcctgctaccgtgatgacgggctttgctgcctggggttcttcctgtctttcttccccccacagacaagtccaggcttacattaccattagagacccccgaagaggctttgtttcctttaggttgaaaggaggaaatagttaacgaggttcctttccctgaaccacagcccaaacttgtggggccaccagaaattgctgtggtgttcagggggtacttgaatttagcaccgtaatcctgtcctcccccagggtcagttctaggtacttggtctccctttccatcccatttgggcacattctctattgatcagaacccaggcttgaagtggaaagtgctgttcttggaggacaagctggcacccttagctgaggtgtgtcatgttgtccagtgccctgcatcgtaggctgccgattcagtgtggacctagaatgttcgacctaggactagcttccaatactgtcctgccatcactctgatttgactttgtggtgagcgtcaccacatgacaggggtgtgccagcccatcgaagcaggacagacacaggtggattgtgccccagggtgggatttgtgtgctctatgctccatgtcaagccatgtgaaggtcaggacccttctgaagcttttcttccaatggtacgttgtttgaagatgctttcctgtcacacctaaacatttggaaatatcccactgacaagaacacattgtaaaacaaaactttaattaaagagtaatatatgg

SEQ ID NO: 11126 - protein, 1175 aa, Rattus norvegicus; identical to SEQ ID NO: 6943
  ref <308>: DATABASE ACCESSION NUMBER: SWISS-Prot / Q62728
  ref <309>: DATABASE ENTRY DATE: 2001-10-16

SEQ ID NO: 11127 - DNA, 4080 bp, Homo sapiens
  ref <308>: DATABASE ACCESSION NUMBER: EMBL / X79510
  ref <309>: DATABASE ENTRY DATE: 1994-08-19
gcccatgagcgcgccgcggcccgggctggcgtgcgggtgcggctgcggcggccgcgcggcggggccccgggaggcgggtcgctgagcggggcgcgcggccccgaggatgcgggagcgggagcgggagcagcgctggcgtcaatgctcccttcctcgggccattggagactccgttgctttttaatggcggcagcggctgctgggtgagcagctggaggccggacagtgttcgtcccatccggagaggatcgctttctcctggcgtcaccagcgctgggttggtgggggtagcttttccctctttgctcctccattcttgaagaaagaagaagatgccactgccatttgggttgaaactgaaacgcacccggcgctacacggtgtccagcaagagttgcctggttgcccggatccaactgcttaataacgagtttgtggagttcaccctgtccgtggagagcactggccaggaaagcctcgaggccgtggcccagaggctggagctgcgggaggtcacttacttcagcctctggtactacaacaagcaaaatcagcgccggtgggtagatttggaaaaacctttgaagaagcagctggataaatatgcattggaacctaccgtctattttggagtggtgttttatgtgccttcagtttctcagctgcagcaggagattaccaggtatcagtattatctgcaactgaagaaagatatcttggaaggaagtattccttgtaccttagaacaagcaattcagctagcaggcttagctgttcaagcggattttggtgactttgatcagtatgaatcccaggactttcttcagaaatttgccttgtttcctgtgggatggttacaagatgaaaaagtattggaagaagcaacccaaaaagtggccttactacatcagaaatacagagggctcacagctcctgatgctgaaatgctgtacatgcaggaggtagagagaatggatggctatggagaagagagctaccctgctaaggatagccaaggaagtgacatatccattggagcgtgtcttgaaggtatctttgtgaaacacaagaatggaaggcatcctgtggtatttaggtggcatgacattgccaacatgtcccacaacaagtccttttttgcattagagctggcaaataaagaggagaccattcaatttcaaactgaagacatggaaacagcaaaatacatttggagactctgtgttgcgcgacacaagttttacagactaaaccagtgtaacctgcaaactcagactgtcacagtgaacccaatcaggaggaggtcttcttcaaggatgtctctgcctaaaccccagccctacgtgatgcctcccccaccgcagttgcactataatggacattatacagaaccatatgcttcttcccaagataacctctttgtgcccaaccagaacggatactactgtcactctcagacaagcttggatagagcccagattgacttcaacggtcggatccgtaatggcagtgtctacagtgcacacagcaccaactccttaaataatcctcagccctacttgcagccctcgccgatgtcgtccaaccctagcatcaccgggagtgacgtcatgaggcctgactacctcccgtcccatcggcacagcgccgtgatacccccgtcctaccgccccaccccagactatgagactgtgatgaagcagctcaacaggggcctggtgcatgcggaacggcagagccactcgctgcgaaacctcaacatcggcagctcgtacgcctacagcaggcccgcggcgctggtctacagccagcccgagatccgcgagcacgcacagctcccctcgccagcggccgcacactgcccgttcagcctgagctacagcttccacagcccgtctccctacccctaccctgccgagcggcggcccgtggtgggcgcggtcagcgtgccggagctgaccaatgcgcagctgcaggcgcaggactacccgtctcccaacatcatgcggacgcaggtgtaccggccacccccaccctacccgccccccaggcccgccaacagcacgccagacctgtcccgccacctttacatcagcagcagcaaccccgacctcatcacgcggcgcgtgcaccactcggtgcaaacgttccaggaggacagcctgcccgtggcgcactcgctgcaggaggtcagcgagcccctcaccgccgcgcgccacgcgcagctgcacaaacggaacagcatcgaggtggccgggctcagccacggcctggagggcctgcggctcaaggagcgcaccctatccgcgtcggcggcagaggtggcgccgcgagccgtctcggtgggctcccagcccagcgttttcaccgagaggacacagcgagaagggccggaggaggcggagggcttgaggtacggccataagaagtccctgtcggacgccaccatgctaatccacagcagcgaggaggaggaggacgaggacttcgaggaggagagcggggcccgggcgccccctgcacgtgcgcgcgagcctcggcccggcctggcccaggacccacctggctgccctcgcgtcctgctcgccgggcccctgcacatcctggagcccaaggcccacgtcccagacgcggagaagaggatgatggacagcagccccgtccgcacgaccgcagaggcccagcggccctggagagacgggctgctgatgccctccatgtcggagtccgacctcaccacgtcaggccgctaccgagcccggagggactctctgaagaaaaggccggtgtcggaccttctctctgggaagaagaacatcgtggaagggctcccgcctctagggggaatgaaaaagactcgagtagatgcaaaaaaaattggtcctcttaaactggctgccctaaatggactctccctatctcgagtgcctctgcctgatgaaggaaaggaagtggctaccagagcaacgaatgatgaaaggtgtaaaattctggaacaacgattagaacaaggaatggtattcacagaatatgaaagaattcttaagaaacggctagttgatggggagtgctcaacagcacgactccctgaaaatgcagaaagaaatcgattccaagatgttcttccttatgatgatgcgagagtggagttggtcccaactaaagaaaacaacactggttacatcaacgcatcacatattaaggtctctgtcagtggaatcgaatgggattatattgccacacagggaccattacagaatacctgtcaagatttttggcagatggtatgggaacagggaattgcaattatagcaatggtgacagcagaagaggagggtggaagggagaagagctttaggtactggccacgacttggttccaggcacaacactgtcacctatggaaggtttaagatcacgacccggttccgcacagactctggctgctatgccaccacaggcctgaagatgaagcacctccttaccgggcaagagaggaccgtctggcacctccaatacacagactggcctgaacatggctgtccagaagacctcaagggatttttatcatatcttgaagagatccagtctgttcgacgccatacaaatagcacaagtgatccccaaagccccaaccctccgttgttggtccactgcagtgctggggtaggaaggactggcgtggtgattttgtcggagatcatgatcgcctgcctggaacacaatgaggtgctggacatcccgagagtgctggacatgctgaggcaacagagaatgatgctggtgcagactctctgccagtacacatttgtgtacagagtcctcatccagttcctgaaaagctccaggctcatctaagctcccacaatttcttacggggccagtcatgtgaagcgtttacagcttaaaaaaaaagcgcttgcctaactcatactttcccgttgacacttgatccacgcagcgtggcactgggacgtaagtggcgcagtctgaatggcggcacgctgaaggaaacgtgcgaagcacaggctgaagaggggtttctaacctgggaaaggtgctcaaggaggacttggtttca

SEQ ID NO: 11128 - protein, 1174 aa, Homo sapiens
  ref <308>: DATABASE ACCESSION NUMBER: SWISS-Prot / Q16825
  ref <309>: DATABASE ENTRY DATE: 2001-10-16
MPLPFGLKLKRTRRYTVSSKSCLVARIQLLNNEFVEFTLSVESTGQESLEAVAQRLELREVTYFSLWYYNKQNQRRWVDLEKPLKKQLDKYALEPTVYFGVVFYVPSVSQLQQEITRYQYYLQLKKDILEGSIPCTLEQAIQLAGLAVQADFGDFDQYESQDFLQKFALFPVGWLQDEKVLEEATQKVALLHQKYRGLTAPDAEMLYMQEVERMDGYGEESYPAKDSQGSDISIGACLEGIFVKHKNGRHPVVFRWHDIANMSHNKSFFALELANKEETIQFQTEDMETAKYIWRLCVARHKFYRLNQCNLQTQTVTVNPIRRRSSSRMSLPKPQPYVMPPPPQLHYNGHYTEPYASSQDNLFVPNQNGYYCHSQTSLDRAQIDFNGRIRNGSVYSAHSTNSLNNPQPYLQPSPMSSNPSITGSDVMRPDYLPSHRHSAVIPPSYRPTPDYETVMKQLNRGLVHAERQSHSLRNLNIGSSYAYSRPAALVYSQPEIREHAQLPSPAAAHCPFSLSYSFHSPSPYPYPAERRPVVGAVSVPELTNAQLQAQDYPSPNIMRTQVYRPPPPYPPPRPANSTPDLSRHLYISSSNPDLITRRVHHSVQTFQEDSLPVAHSLQEVSEPLTAARHAQLHKRNSIEVAGLSHGLEGLRLKERTLSASAAEVAPRAVSVGSQPSVFTERTQREGPEEAEGLRYGHKKSLSDATMLIHSSEEEEDEDFEEESGARAPPARAREPRPGLAQDPPGCPRVLLAGPLHILEPKAHVPDAEKRMMDSSPVRTTAEAQRPWRDGLLMPSMSESDLTTSGRYRARRDSLKKRPVSDLLSGKKNIVEGLPPLGGMKKTRVDAKKIGPLKLAALNGLSLSRVPLPDEGKEVATRATNDERCKILEQRLEQGMVFTEYERILKKRLVDGECSTARLPENAERNRFQDVLPYDDARVELVPTKENNTGYINASHIKVSVSGIEWDYIATQGPLQNTCQDFWQMVWEQGIAIIAMVTAEEEGGREKSFRYWPRLGSRHNTVTYGRFKITTRFRTDSGCYATTGLKMKHLLTGQERTVWHLQYTDWPEHGCPEDLKGFLSYLEEIQSVRRHTNSTSDPQSPNPPLLVHCSAGVGRTGVVILSEIMIACLEHNEVLDIPRVLDMLRQQRMMLVQTLCQYTFVYRVLIQFLKSSRLI

SEQ ID NO: 11129 - DNA, 591 bp, Rattus norvegicus
  ref <308>: DATABASE ACCESSION NUMBER: EMBL / AA799829
  ref <309>: DATABASE ENTRY DATE: 2000-03-03
aacacctacatatatatttatatataaatgagaaatatattaaaatgctgttacagtttaaaaatgattcagtgtacataatttctcactttcaactaagtgacttcagtgagtgacttctgattatttattctcttcctgatccattctccatttctaagtcattttcacagttctactgctgattatgtaatatttgtagctatctagtatcagcaatttcaagggatccttaatagtgaaaccagacacttattttacttcaggtttaattttagttccagagaaggcagtgctttagtaaagacttcggcaaggtactctttatcttttattccaggaagatcacttaagaacaaatacttgaggttcttaaagtgtcgcaaagcaatgacgccgttgtccgtgacatttccacaggcgattatttccaactccaataggctttttcgtaaattttcaagttgactaagcctctgcaaacagttatcttcaatataatgacacctgcacagtgttattctttcaacatgctctaggcccaccaagtgatcaaacccaatgtccatgatacaagaatcggtggcatca

SEQ ID NO: 11130 - DNA, 1203 bp, Homo sapiens
  ref <308>: DATABASE ACCESSION NUMBER: EMBL / U79253
  ref <309>: DATABASE ENTRY DATE: 2000-12-01
gacgctgtgagtagagaagctaggccccgagccgggcgggactagggtggtggttgtgttctgccctcgcccgtcgccaacgctgggctgactgaaaacctggccctttgggtcgcgcgtcttcgactttcaccgccatgcggacatggggccgtgggagaaactctgggcgggattacggtgaaaattcttgtttgggcgggccctgcggcttctttcttccggctcgccctcggccccgccctcgccccgcccccgcccccgctccagctccagccgggtcctcgctcggccccgcacgcggcccgcggtagacggagggcctgggcacccaccgtctccatcccggccccagcccagtcgagcgtccactagaagggcgctccctgtccggccctaatcctcgctcctcacggaggctctttgtcacagcgaagactgacagcccgcagtcttctggacttcttttatggggctcctggcggtgctattcattcagtcattgattcgtcttgtaaatatggagcgcctgctctgtactcgacccggcactgggtaccggaagaaccagacagctcggtttttgccaccatttataagtctgtgtccttttcttgagtactgaaccgagatacagttttaaatgtgctgtgcggtctctgagcagcgactcacctgtgcagatcaaatgatgctgtttggaaaaatttcccagcagttgtgtggcgtaaagaaactcccatggtcatgtgactccagatacttctggggctggttgaatgcagtgtttaataaggtggattatgatcgcatcagggatgttggccctgacagggcggcatccgagtggttgctgcgctgtggggccatggtgcgctaccatggccaggagaggtggcagaaggactacaaccaccttccaacaggccctctggacaaatacaagattcaggcgatcgacgccaccgactcttgtatcatgagcattggatttgatcacatgggtaactaccctatcgttttgctaatagaaaatgcagatgatttgcagtgaccattttgttgcagttgactcacgattatagtcataggtatgtcctttttgcccatttcattatagtcaagtttgtttcttcctgtgtttcatatttattttcaaattaaattgaggttacagacaaaaaaaaaaaaaaaaaaaaaaaa

SEQ ID NO: 11131 - protein, 215 aa, Homo sapiens [sequence omitted]

SEQ ID NO: 11132 - DNA, 483 bp, Rattus norvegicus
  misc_feature (1)..(483): n=a, c, g or t
  ref <308>: DATABASE ACCESSION NUMBER: EMBL / AA799890
  ref <309>: DATABASE ENTRY DATE: 2000-03-03
gacagaattcttggttacagtacagctgaaacacatttttttttttgctctgaaagcacataaatgatacacacaacaatacattttctttcttttcatctacatcacagttattcttcacatagatagcctgcaagagttcccacgcagtaacgcaaagggtgacgggggtaaagcacggcagtgtcactcacacgggaaagcacgtgactggcagaaacagtgaggccagaggaaagcaaggcggtgtctcgtggtttctaagcagccatcgcactcccagcaacatagcctgcactccaaactgcctgcacagcagggaggcgcacacacattacacgacgacgagggccatatcagcaagggcagtataacggccacacggccaccacttccaagcgaatgagagcacgctaccactaacactgacccatgccccgggtcctgcaaaggtanaggggtaaaaacagaaaggggtggtta

SEQ ID NO: 11133 - DNA, 558 bp, Homo sapiens
  ref <308>: DATABASE ACCESSION NUMBER: EMBL / AW966702
  ref <309>: DATABASE ENTRY DATE: 2000-06-08
ttaatattaaatcctaaggattttatgtaaggtttttttgcaacctatttaattttttttaaatgcctaacttctgaggtgcataagcccgtggtttgtgtactggaactaaagcggaactcactgattcatattggatccccaggtataccttctgctggtagcatatggctggaaaaggccgtttgcctcacacattgtaacctgccttggctagaaaatgcttttaatgtctcaactctctcttttctgtgtcatgttttggtaggaaatctttaagattggcggacggaacaggtattttagtgagacacttctgagtacttgctttttcctttgacttctaaccaactaaaagagaaggaggtcttcatgttgatattttgcttggttttattttactgattttaaaaggtatatagaaaaatgtaggcctttaaaaagaaaacagcatgtagttttttattttaatatgttccataaagtggatagggcaacagggacttattgaaagtattctggattttaaaaattaaatttaccttagaaaggagacct

SEQ ID NO: 11134 - DNA, 483 bp, Rattus norvegicus
  ref <308>: DATABASE ACCESSION NUMBER: EMBL / AA799971
  ref <309>: DATABASE ENTRY DATE: 2000-03-03
acataagaaggaattccaaaggtatacccaaggggcattgatcataagctgaacacgcagagggccccaacgaatggcacagagtctgaacggattggcacgttcaacttccattcatgatggctgaatactccttctggtgctcaaccattctcagaaacacttgatatttcttgtcataatattttttatcagcacgctctgggaacacaaccttccccactttgctcattcttgccattgcctcctgcacagaagcaaagtcccctgaggcacaggcacccagaatagcagctcccacgaggacagactccacctcttgtgacagaaccacaggcatgccagtaatgtcagcatgcatttgcacaaaaaggggattcttgcttaggcctccacataagaagagggtactaagagaatgtcctgctgcttccatggtctcaatgatgaagcgagtcccgaaagcaatggcttgaatagtgg

SEQ ID NO: 11135 - DNA, 712 bp, Rattus norvegicus; identical to SEQ ID NO: 4562
  misc_feature (1)..(712): n=a, c, g or t
  ref <308>: DATABASE ACCESSION NUMBER: EMBL / AA799991
  ref <309>: DATABASE ENTRY DATE: 2000-03-03

SEQ ID NO: 11136 - DNA, 400 bp, Rattus norvegicus
  ref <308>: DATABASE ACCESSION NUMBER: EMBL / AA800033
  ref <309>: DATABASE ENTRY DATE: 2000-03-03
cactgtccacgacagtttattctatatacaaacacgactctgtacactgcaattaaatagcgtggaacgtgagcgccgcgtcctgagctgccacctgctagtccgggcccgggcgctcggccctgcgcgggcgccgtgtggaaggcactggggagcaccaggcggccggtggcctcgtgcccatcgccgccctgtcccggccgcttccagaacctttgccgccagcccctctccctgtagaccacagctctcttgggctcgggccgcggctccgccgggagccaggcacgacaccgctctcaggacccggcaggggcaggtgcgtcctccagagaggccccagggtcaggtcgtgcgctgtccggggcactgggggctgctggacgccgctccagcaatg

SEQ ID NO: 11137 - DNA, 680 bp, Homo sapiens
  misc_feature (1)..(680): n=a, c, g or t
  ref <308>: DATABASE ACCESSION NUMBER: EMBL / BI195716
  ref <309>: DATABASE ENTRY DATE: 2001-07-12
gcggaagatgaggaggaggaagagctgaccatggagatgtttgggaacagctccatcaagtttgagctggacatcgagcccaaggtgttcaagccgccgagtagcacagaggccctgaatgacagccaggagttccccttccccgagacgcccaccaaagtgtggccgcaggacgagtacatcgtggagtactcactagagtatggcttccttcgcctgtcgcaggccacccgccagcgcctgagcatccccgtcatggtggtcaccctggaccccacgcgggaccagtgcttcggggaccgcttcagccgcctgctgctggatgagttcctgggctacgatgacatcctcatgtccagcgtgaagggcctggccgagaacgaggagaacaagggcttcctgcggaatgtggtgtcgggcgagcactaccgctttgtgagcatgtggatggcgcggacgtcctacctggccgccttcgccatcatggtcatcttcacgctgagcgtgtccatgctgctgcggtactcacaccaccagatcttcgtcttcatcgtggacctgctgcagatgctggagatgaacatggccatcgccttccccgcagcgcccctgctgaccgtcatcctggccctcgtcgggatggaggccatcatgtcggagttcttcaancgaacaacacg

SEQ ID NO: 11138 - protein, 445 aa, Homo sapiens
  ref <308>: DATABASE ACCESSION NUMBER: SWISS-Prot / P50395
  ref <309>: DATABASE ENTRY DATE: 2002-06-15
MNEEYDVIVLGTGLTECILSGIMSVNGKKVLHMDRNPYYGGESASITPLEDLYKRFKIPGSPPESMGRGRDWNVDLIPKFLMANGQLVKMLLYTEVTRYLDFKVTEGSFVYKGGKIYKVPSTEAEALASSLMGLFEKRRFRKFLVYVANFDEKDPRTFEGIDPKKTTMRDVYKKFDLGQDVIDFTGHALALYRTDDYLDQPCYETINRIKLYSESLARYGKSPYLYPLYGLGELPQGFARLSAIYGGTYMLNKPIEEIIVQNGKVIGVKSEGEIARCKQLICDPSYVKDRVEKVGQVIRVICILSHPIKNTNDANSCQIIIPQNQVNRKSDIYVCMISFAHNVAAQGKYIAIVSTTVETKEPEKEIRPALELLEPIEQKFVSISDLLVPKDLGTESQIFISRTYDATTHFETTCDDIKNIYKRMTGSEFDFEEMKRKKNDIYGED

SEQ ID NO: 11139 - DNA, 514 bp, Rattus norvegicus; identical to SEQ ID NO: 4575
  misc_feature (1)..(514): n=a, c, g or t
  ref <308>: DATABASE ACCESSION NUMBER: EMBL / AA800036
  ref <309>: DATABASE ENTRY DATE: 2000-03-03

SEQ ID NO: 11140 - DNA, 2112 bp, Homo sapiens; identical to SEQ ID NO: 4576
  ref <308>: DATABASE ACCESSION NUMBER: Refseq / NM_014575
  ref <309>: DATABASE ENTRY DATE: 2002-11-05

SEQ ID NO: 11141 - protein, 487 aa, Homo sapiens; identical to SEQ ID NO: 4577
  ref <308>: DATABASE ACCESSION NUMBER: Refseq / NP_055390
  ref <309>: DATABASE ENTRY DATE: 2002-11-05

SEQ ID NO: 11142 - DNA, 593 bp, Rattus norvegicus
  misc_feature (1)..(593): n=a, c, g or t
  ref <308>: DATABASE ACCESSION NUMBER: EMBL / AA800170
  ref <309>: DATABASE ENTRY DATE: 2000-03-03
cccagcacatatatcctgttgtctagcacagcaatgccaggctcaccatgcccagctggcagtgggcagaccgatgaccactgacgagatgtacaactgtagcaagccacctggtgcacatctctcctgtagccggcatcattgttgctgcctccaatcacaaacagcttgtcaaggagcgcagccatgccgtgccaggcgcgtcgaacaggcccatcggctagagtgtgccacgtgttgcttcctgggtcatagcagtgtgtctctttcaggtagtcctctcctctgcgaccacaggtgatgtacatcttcccttgcagcgtggtgcctgcatgggcatatacctccttcttgagtggggccacatattcccaggagttggtggcagggtcatagcgctccacagcactcaggttattgtggtagtcacggcctgccacagcgtagatgtacttccccactacacacacgcacaagtctgcatgttcctgctgcaaggactggatctggaaccagcgattgtgtcttgggtcatacctccagcatcgggactcagctcggaatccttggacattattgtcncctccaattaa

SEQ ID NO: 11143 - DNA, 2643 bp, Homo sapiens
  ref <308>: DATABASE ACCESSION NUMBER: Refseq / NM_003443
  ref <309>: DATABASE ENTRY DATE: 2002-11-05
tgcacctccctctgcggtggggtccgggacatggcaggtaatgagccggacgaggggagccaagctggagtttacacaggcaaactgtcagaaaagagtagcctgggctgtctggaaatctgagccatggactttccccagcacagccagcatgtcttggaacagctgaaccagcagcggcagctggggcttctctgtgactgcacctttgtggtggacggtgttcactttaaggctcataaagcagtgctggcggcctgcagcgagtacttcaagatgctcttcgtggaccagaaggacgtggtgcacctggacatcagtaacgcggcaggcctggggcagatgctggagtttatgtacacggccaagctgagcctgagccctgagaacgtggatgatgtgctggccgtggccactttcctccaaatgcaggacatcatcacggcctgccatgccctcaagtcacttgctgagccggctaccagccctgggggaaatgcggaggccttggccacagaaggaggggacaagagagccaaagaggagaaggtggccaccagcacgctgagcaggctggagcaggcaggacgcagcacacccataggccccagcagggacctcaaggaggagcgcggcggtcaggcccagagtgcggccagcggtgcagagcagacagagaaagccgatgcgccccgggagccgccgcctgtggagctcaagccagaccccacgagtggcatggctgccgcagaagctgaggccgctttgtccgagagctcggagcaagaaatggaggtggagcccgcccggaaaggggaagaggagcaaaaggagcaagaggagcaagaggaggagggcgcagggccagctgaggtcaaggaggagggttcccagctggagaacggagaggcccccgaggagaacgagaatgaggagtcagcgggcacagactcggggcaggagctcggctccgaggcccggggcctgcgctcaggcacctacggcgaccgcacggagtccaaggcctacggctccgtcatccacaagtgcgaggactgtgggaaggagttcacgcacacggggaacttcaagcggcacatccgcatccacacgggggagaagcccttctcgtgccgggagtgcagcaaggccttttccgacccggccgcgtgcaaggcccatgagaagacgcacagccctctgaagccctacggctgcgaggagtgcgggaagagctaccgcctcatcagcctgctgaacctgcacaagaagcggcactcgggcgaggcgcgctaccgctgcgaggactgcggcaagctcttcaccacctcgggcaacctcaagcgccaccagctggtgcacagcggcgagaagccctaccagtgcgactactgcggccgctccttctccgaccccacttccaagatgcgccacctggagacccacgacacggacaaggagcacaagtgcccacactgcgacaagaagttcaaccaggtagggaacctgaaggcccacctgaagatccacatcgctgacgggcccctcaagtgccgagagtgtgggaagcagttcaccacctcagggaacctgaagcggcaccttcggatccacagcggggagaagccctacgtgtgcatccactgccagcgacagtttgcagaccccggcgctctgcagcggcacgtccgcattcacacaggtgagaagccatgccagtgtgtgatgtgcggtaaggccttcacccaggccagctccctcatcgcccacgtgcgccagcacaccggggagaagccctacgtctgcgagcgctgcggcaagagattcgtccagtccagccagttggccaatcatattcgccaccacgacaacatccgcccacacaagtgcagcgtgtgcagcaaggccttcgtgaacgtgggggacctgtccaagcacatcatcattcacactggagagaagccttacctgtgtgataagtgtgggcgtggcttcaaccgggtagacaacctgcgctcccacgtgaagaccgtgcaccagggcaaggcaggcatcaagatcctggagcccgaggagggcagtgaggtcagcgtggtcactgtggatgacatggtcacgctggctaccgaggcactggcagcgacagccgtcactcagctcacagtggtgccggtgggagctgcagtgacagccgatgagacggaagtcctgaaggccgagatcagcaaagctgtgaagcaagtgcaggaagaagaccccaacactcacatcctctacgcctgtgactcctgtggggacaagtttctggatgccaacagcctggctcagcatgtgcgaatccacacagcccaggcactggtcatgttccagacagacgcggacttctatcagcagtatgggccaggtggcacgtggcctgccgggcaggtgctgcaggctggggagctggtcttccgccctcgcgacggggctgagggccagcccgcactggcagagacctcccctacagctcctgaatgtcccccgcctgccgagtgagctggcggcccttctgactgtttatttaaggatggatggcaccctggaaccgggaagggtggcctgttccctagagagaataaattggattattttctaaaaaaa

SEQ ID NO: 11144 - protein, 803 aa, Homo sapiens
  ref <308>: DATABASE ACCESSION NUMBER: SWISS-Prot / Q13105
  ref <309>: DATABASE ENTRY DATE: 2002-06-15
MDFPQHSQHVLEQLNQQRQLGLLCDCTFVVDGVHFKAHKAVLAACSEYFKMLFVDQKDVVHLDISNAAGLGQMLEFMYTAKLSLSPENVDDVLAVATFLQMQDIITACHALKSLAEPATSPGGNAEALATEGGDKRAKEEKVATSTLSRLEQAGRSTPIGPSRDLKEERGGQAQSAASGAEQTEKADAPREPPPVELKPDPTSGMAAAEAEAALSESSEQEMEVEPARKGEEEQKEQEEQEEEGAGPAEVKEEGSQLENGEAPEENENEESAGTDSGQELGSEARGLRSGTYGDRTESKAYGSVIHKCEDCGKEFTHTGNFKRHIRIHTGEKPFSCRECSKAFSDPAACKAHEKTHSPLKPYGCEECGKSYRLISLLNLHKKRHSGEARYRCEDCGKLFTTSGNLKRHQLVHSGEKPYQCDYCGRSFSDPTSKMRHLETHDTDKEHKCPHCDKKFNQVGNLKAHLKIHIADGPLKCRECGKQFTTSGNLKRHLRIHSGEKPYVCIHCQRQFADPGALQRHVRIHTGEKPCQCVMCGKAFTQASSLIAHVRQHTGEKPYVCERCGKRFVQSSQLANHIRHHDNIRPHKCSVCSKAFVNVGDLSKHIIIHTGEKPYLCDKCGRGFNRVDNLRSHVKTVHQGKAGIKILEPEEGSEVSVVTVDDMVTLATEALAATAVTQLTVVPVGAAVTADETEVLKAEISKAVKQVQEEDPNTHILYACDSCGDKFLDANSLAQHVRIHTAQALVMFQTDADFYQQYGPGGTWPAGQVLQAGELVFRPRDGAEGQPALAETSPTAPECPPPAE

SEQ ID NO: 11145 - DNA, 631 bp, Rattus norvegicus; identical to SEQ ID NO: 4605
  ref <308>: DATABASE ACCESSION NUMBER: EMBL / AA800199
  ref <309>: DATABASE ENTRY DATE: 2000-03-03

SEQ ID NO: 11146 - DNA, 562 bp, Homo sapiens; identical to SEQ ID NO: 4606
  ref <308>: DATABASE ACCESSION NUMBER: EMBL / BE396293
  ref <309>: DATABASE ENTRY DATE: 2000-07-29

SEQ ID NO: 11147 - DNA, 476 bp, Rattus norvegicus
  ref <308>: DATABASE ACCESSION NUMBER: EMBL / AA800200
  ref <309>: DATABASE ENTRY DATE: 2000-03-03
gagcacttcaacaactttattggctaaatgtttcttccccagtttacagcttgaactatgggcttattcacagggtctgtcttaatccgtactgaatctggggccttagtagaggctaaaagctagaagtgagagtatgagttagaagcctgctgctaactcagctgggcaacggtccctacccactgccgtgttcagcgatctttacatgtaatggatggatacaggcctgggacacacctgccgccagcctgttacaatgcctctgatggagtcatcaccttcctacttcagggatggggtgacactatggcaccctgtgcaatttgcagaagtacatacgtccaaaattggccatgaagtttggtattaccagctccccaacctgtcaggatgggaggaaacagaatgtgtccatgaaaagctttcggaagtgagacaagtcttccacttgaaccttgatgttgtattgattg

SEQ ID NO: 11148 - DNA, 701 bp, Homo sapiens
  ref <308>: DATABASE ACCESSION NUMBER: EMBL / AL042404
  ref <309>: DATABASE ENTRY DATE: 2000-02-20
ggaggagaacaacatctttaagcggtcaaggaagaaggagcgacagatattgcctgtgctgcaagtgcagcttcttgcggctggactccttgccaccaaaccaggaggccatgttgtctattctacctgctcactctcacacttacagaacgagtatgtggtgcaaggtgccattgagctcctggccaatcaatacagcatccagaacccagacctggactcagaggcgctgctagccctgcccctgcctcagctggtgcagaagttacacagtagagagctggcccctgaggccgtgctcttcacctatgtgggaaaggcctgggaagtgaacaaagggaccaactgtgtgacctcctatctggctgactgtgagactcagctgtctcaggccccaaggcagggcctgctctatggcgtccctgtgagcctcaaggagtgcttcacctacaagggccaggactccacgctgggcttgagcctgaatgaaggggtgccggcggagtgcgacagcgtagtggtgcatgtgctgaagctgcagggtgccgtgcccttcgtgcacaccaatgttccacagtccatgttcagctatgactgcagtaaccccctctttggccagaccgtgaacccatggaagtccttcaaaagcccaaggggctcctcaaggggtgaaagggcccttcatcgggtctggaagctcc

SEQ ID NO: 11149 - protein, 579 aa, Homo sapiens; identical to SEQ ID NO: 8859
  ref <308>: DATABASE ACCESSION NUMBER: SWISS-Prot / O00519
  ref <309>: DATABASE ENTRY DATE: 2002-06-15

SEQ ID NO: 11150 - DNA, 727 bp, Rattus norvegicus; identical to SEQ ID NO: 4607
  ref <308>: DATABASE ACCESSION NUMBER: EMBL / AA800212
  ref <309>: DATABASE ENTRY DATE: 2000-03-03

SEQ ID NO: 11151 - protein, 1043 aa, Rattus norvegicus; identical to SEQ ID NO: 26
  ref <308>: DATABASE ACCESSION NUMBER: SWISS-Prot / P11507
  ref <309>: DATABASE ENTRY DATE: 2001-10-16

SEQ ID NO: 11152 - DNA, 4134 bp, Homo sapiens; identical to SEQ ID NO: 27
  ref <308>: DATABASE ACCESSION NUMBER: EMBL / M23114
  ref <309>: DATABASE ENTRY DATE: 2000-03-04

SEQ ID NO: 11153 - protein, 1042 aa, Homo sapiens; identical to SEQ ID NO: 28
  ref <308>: DATABASE ACCESSION NUMBER: SWISS-Prot / P16615
  ref <309>: DATABASE ENTRY DATE: 2002-06-15

SEQ ID NO: 11154 - DNA, 1053 bp, Rattus norvegicus
  ref <308>: DATABASE ACCESSION NUMBER: EMBL / BC002146
  ref <309>: DATABASE ENTRY DATE: 2002-09-22
ctggagaccacaggtgtaagagccagcgctgtgccccaagccggacgggctcctgaagctggcagggaaattctttcattcccaagacttcaggggattttggcttttcaggagacagctggggaacaagctcaatcagggctaatgaggagactgagttggactcctgcctgatccctcactgtggtaggatgaatgtgggggtggcacacagcgaagtaaaccccaacactcgagtgatgaacagtcggggcatctggctggcctacatcatcttggtaggactgctgcatgtggttctcctcagcatccctttcttcagcattcctgttgtctggaccctgaccaacgtcatccataacttggcaatgtatatcttcctacatacagtcaaagggacgccctttgagacccctgaccaaggaaaggctcggcttttgacacattgggagcagatggactatggactacagtttacctcctcgcgaaagttcctcagcatctctcctattgtactttacctcctggccagcttctacaccaagtacgatgctgctcacttcctcatcaacactgcctcgctgctcagcgtgctgctgcctaagctaccccagttccatggggttcgtctctttggaatcaacaaatactaaaagatggtttgctagttctgcaggcattgagggaaggcactggaactaatatataatgttttcccttctccacactatcttctgtatcttggaagcctgagagataagataaacctatctaaactccaagaaggaagaaactggaaaatggggttcctgggtccagtcttcatagggtcaagattctctgaatcaggaaaggtggatgaggttaagggcactaccactcactctcctctatctagcaagaagccatcattgtttgggcagcttttctggtgattatgtttttccatatcttctaaacctaccaacttcaagttctgttttgctgtatatttttcttaaaataaagtctttcagttatggctgaaatttgataagcaaaaaaaaaaaaaaa

SEQ ID NO: 11155 - protein, 153 aa, Rattus norvegicus; identical to SEQ ID NO: 4632
  ref <308>: DATABASE ACCESSION NUMBER: SWISS-Prot / AAH02146
  ref <309>: DATABASE ENTRY DATE: 2002-10-01

SEQ ID NO: 11156 - DNA, 560 bp, Rattus norvegicus; identical to SEQ ID NO: 4647
  ref <308>: DATABASE ACCESSION NUMBER: EMBL / AA800318
  ref <309>: DATABASE ENTRY DATE: 2000-03-03

SEQ ID NO: 11157 - protein, 418 aa, Rattus norvegicus; identical to SEQ ID NO: 4648
  ref <308>: DATABASE ACCESSION NUMBER: PIR / B26423
  ref <309>: DATABASE ENTRY DATE: 1996-07-12

SEQ ID NO: 11158 - DNA, 657 bp, Homo sapiens; identical to SEQ ID NO: 4649
  ref <308>: DATABASE ACCESSION NUMBER: EMBL / M13203
  ref <309>: DATABASE ENTRY DATE: 2000-03-04

SEQ ID NO: 11159 - protein, 500 aa, Homo sapiens; identical to SEQ ID NO: 4650
  ref <308>: DATABASE ACCESSION NUMBER: SWISS-Prot / ITHUC1
  ref <309>: DATABASE ENTRY DATE: 2002-06-15

SEQ ID NO: 11160 - DNA, 492 bp, Rattus norvegicus
  ref <308>: DATABASE ACCESSION NUMBER: EMBL / AA800503
  ref <309>: DATABASE ENTRY DATE: 2000-03-03
aaaaatagctttatttagcataccaaaaacacagaaacataagaaaattgtatctagtataaacataaaaagttaaatatgataatttaatgtaaatcaagcatttgaaaatgtgaagtactgtaataaaatacacgctattaatacagaacgaagttaaagctacctctgtagttactgggtcagatcatcaatcttgaagttatcattagcaatcaacaaacataacatctcccttttttattagtcaacaggaaaagaagcagttatcttatttatttaaaacatatataattcattgtgacatttagagcaggaaagcaaaaagtacccatttaaggattccagacagaaacaatgtaggtgcaggtttgaaaatcaatatactgcaggaaccttgagcagatcattttattgaaatataaattgtttaattccatttacttactgcttagaaaggtactaagtatactctgcaaaaataaatcttca

SEQ ID NO: 11161 - protein, 482 aa, Rattus norvegicus
  ref <308>: DATABASE ACCESSION NUMBER: Refseq / NP_058839
  ref <309>: DATABASE ENTRY DATE: 2002-11-05
MESPVRLSLLYVVLASLLLPGRSVFINRERANNVLQRIRRANSFFEEIKKGNLERECVEEICSFEEAREVFEDNEKTTEFWNKYEDGDQCESSPCQNQGECRDGLGSYTCTCTEGFEGKNCELFVRKLCSLDNGDCDQFCREEQNSVVCSCAKGYFLGNDGKSCLSTAPFPCGKTNKGRAKRSVALNTSNSEPDPEDLMPDADILYPTESPSELLNLNKTEPEANSDDVIRIVGGQECKRGECPWQALLFSDEETDGFCGGTILNEFYILTAAHCLHQAKRFKVRVGDLNTEQEDGGEMVHEVDMIIKHNKFQRDTYDFDIAMLRLKTPITFRENVAPACLPQKDWAEATLMTQKTGIVSGFGRTHEKGRQSKVLKMMEVPYVDRNTCRLSTSFSITQNMFCAGYDAKQEDACQGDSGGPHVTRFKDTYFVTGIVSWGEGCARKGKYGIYTKVTAFLKWIDRSMKARVGPTSETPRLTHPPY

SEQ ID NO: 11162 - DNA, 612 bp, Rattus norvegicus
  ref <308>: DATABASE ACCESSION NUMBER: EMBL / AA800519
  ref <309>: DATABASE ENTRY DATE: 2000-03-03
aaaaaaagtgttttcactttaatgatctgagttagtaacaaatatacaaaattgtcttcacctctccatacatggtataatggaccaatggaaaattctggactactacaaatgcaggtttttgtatccttagccttagttgtttttcaagaggtaatttccaaaaacatgcacttgtgaacacagatgtcaagagctgtatgtccgagtaatgcatctcctgggctacttcactgtacttgaaaagcatttttgtgaaacaaaacatttaaaacattaagctttgttacctacacctgaaacacagctatctcagtaacccccacactgatctcactggggatccagtgcgcagagggaactgtgaggaaaccgggaaagagaccctcctccacccactcatctgaggcagtgatggacacccacacaaacagaaacagctgtacggctgtatctttagagctgcaggttggcgtttatctgccaaggaaagtaaacagtaaattaataaaaaacaattagcttaaaaatgtgaagctttgaaaatagccctaatggataaccccacctataaaatttcaagttttttaaataaatttagaactttgaaaa

SEQ ID NO: 11163 - DNA, 567 bp, Rattus norvegicus; identical to SEQ ID NO: 4651
  misc_feature (1)..(567): n=a, c, g or t
  ref <308>: DATABASE ACCESSION NUMBER: EMBL / AA800535
  ref <309>: DATABASE ENTRY DATE: 2000-03-03

SEQ ID NO: 11164 - DNA, 2720 bp, Homo sapiens; identical to SEQ ID NO: 4652
  ref <308>: DATABASE ACCESSION NUMBER: EMBL / AF247703
  ref <309>: DATABASE ENTRY DATE: 2000-04-12

SEQ ID NO: 11165 - protein, 328 aa, Homo sapiens; identical to SEQ ID NO: 4653
  misc_feature (1)..(328): Xaa=Unknown amino acid

SEQ ID NO: 11166 - DNA, 473 bp, Rattus norvegicus; identical to SEQ ID NO: 4656
  ref <308>: DATABASE ACCESSION NUMBER: EMBL / AA800572
  ref <309>: DATABASE ENTRY DATE: 2000-03-03

SEQ ID NO: 11167 - DNA, 1604 bp, Homo sapiens; identical to SEQ ID NO: 4657
  ref <308>: DATABASE ACCESSION NUMBER: EMBL / AF041037
  ref <309>: DATABASE ENTRY DATE: 2000-03-03

SEQ ID NO: 11168 - protein, 139 aa, Homo sapiens; identical to SEQ ID NO: 4658
  ref <308>: DATABASE ACCESSION NUMBER: SWISS-Prot / O43609
  ref <309>: DATABASE ENTRY DATE: 2002-06-15

SEQ ID NO: 11169 - DNA, 506 bp, Rattus norvegicus
  ref <308>: DATABASE ACCESSION NUMBER: EMBL / AA800613
  ref <309>: DATABASE ENTRY DATE: 2000-03-03
cacactcaagattttatttaaaaattccaaaaaaacccacaaaaatagacttgtacggtaacaatatattacttaatatattatagtatatacttaatacagtatcagttttaacattacaaaaagaaaaacggagtagacgacccaatatatataaatactataaaatcttattacaataaataaagtcgtcataaataaagggtccattggttggggcaggggcgtgggggaaaagggatttggcaatggctttggctatttgctttgggagggaaatttgagcaccaggattctcaggagaggctacaaccaccggacactgaacttcggggtctagtaaaaattaggatactattgtgggagccgggtcttcacagcacttaacattccaggagaccagagtttccgaggggctggtgcatacctgtaaccccagaacttggaaaaggctaaggcaggattatattgagttcaaagccagcctggggtaccctagtaatccc

SEQ ID NO: 11170 - protein, 320 aa, Rattus norvegicus
  ref <308>: DATABASE ACCESSION NUMBER: SWISS-Prot / P47973
  ref <309>: DATABASE ENTRY DATE: 2002-06-15
MDLSAIYESLMSMSHDLSPDHGGTESSGGLWNINSSDSIPSGVTSRLTGRSTSLVEGRSCSWVPPPPGFAPLAPRPGPELSPSPTSPTATPTTSSRYKTELCRTYSESGRCRYGAKCQFAHGPGELRQANRHPKYKTELCHKFYLQGRCPYGSRCHFIHNPTEDLALPGQPHVLRQSISFSGLPSGRRTSPPPPGFSGPSLSSCSFSPSSSPPPPGDLPLSPSAFSAAPGTPVSRRDPTPACCPSCRRSTTPSTIWGPLGGLARSPSAHSLGSDPDDYASSGSSLGGSDSPVFEAGVFGPPQPPAPPRRLPIFNRISVSE

SEQ ID NO: 11171 - DNA, 1746 bp, Homo sapiens
  ref <308>: DATABASE ACCESSION NUMBER: EMBL / M92843
  ref <309>: DATABASE ENTRY DATE: 1999-07-02
gagcctgacttcagcgctcccactctcggccgacacccctcatggccaaccgttacaccatggatctgactgccatctacgagagcctcctgtcgctgagccctgacgtgcccgtgccatccgaccatggagggactgagtccagcccaggctggggctcctcgggaccctggagcctgagcccctccgactccagcccgtctggggtcacctcccgcctgcctggccgctccaccagcctagtggagggccgcagctgtggctgggtgcccccaccccctggcttcgcaccgctggctccccgcctgggccctgagctgtcaccctcacccacttcgcccactgcaacctccaccaccccctcgcgctacaagactgagctatgtcggaccttctcagagagtgggcgctgccgctacggggccaagtgccagtttgcccatggcctgggcgagctgcgccaggccaatcgccaccccaaatacaagacggaactctgtcacaagttctacctccagggccgctgcccctacggctctcgctgccacttcatccacaaccctagcgaagacctggcggccccgggccaccctcctgtgcttcgccagagcatcagcttctccggcctgccctctggccgccggacctcaccaccaccaccaggcctggccggcccttccctgtcctccagctccttctcgccctccagctccccaccaccacctggggaccttccactgtcaccctctgccttctctgctgcccctggcacccccctggctcgaagagaccccaccccagtctgttgcccctcctgccgaagggccactcctatcagcgtctgggggcccttgggtggcctggttcggaccccctctgtacagtccctgggatccgaccctgatgaatatgccagcagcggcagcagcctggggggctctgactctcccgtcttcgaggcgggagtttttgcaccaccccagcccgtggcagccccccggcgactccccatcttcaatcgcatctctgtttctgagtgacaaagtgactgcccggtcagatcagctggatctcagcggggagccacgtctcttgcactgtggtctctgcatggaccccagggctgtggggacttgggggacagtaatcaagtaatccccttttccagaatgcattaacccactcccctgacctcacgctggggcaggtccccaagtgtgcaagctcagtattcatgatggtgggggatggagtgtcttccgaggttcttgggggaaaaaaaattgtagcatatttaagggaggcaatgaaccctctcccccacctcttccctgcccaaatctgtctcctagaatcttatgtgctgtgaataataggccttcactgcccctccagtttttatagacctgaggttccagtgtctcctggtaactggaacctctcctgagggggaatcctggtgctcaaattaccctccaaaagcaagtagccaaagccgttgccaaaccccacccataaatcaatgggccctttatttatgacgactttatttattctaatatgattttatagtatttatatatattgggtcgtctgcttcccttgtatttttcttcctttttttgtaatattgaaaacgacgatataattattataagtagactataatatatttagtaatatatattattaccttaaaagtctatttttgtgttttgggcatttttaaataaacaatctgagtgt

SEQ ID NO: 11172 - protein, 326 aa, Homo sapiens
  ref <308>: DATABASE ACCESSION NUMBER: SWISS-Prot / P26651
  ref <309>: DATABASE ENTRY DATE: 2002-06-15
MDLTAIYESLLSLSPDVPVPSDHGGTESSPGWGSSGPWSLSPSDSSPSGVTSRLPGRSTSLVEGRSCGWVPPPPGFAPLAPRLGPELSPSPTSPTATSTTPSRYKTELCRTFSESGRCRYGAKCQFAHGLGELRQANRHPKYKTELCHKFYLQGRCPYGSRCHFIHNPSEDLAAPGHPPVLRQSISFSGLPSGRRTSPPPPGLAGPSLSSSSFSPSSSPPPPGDLPLSPSAFSAAPGTPLARRDPTPVCCPSCRRATPISVWGPLGGLVRTPSVQSLGSDPDEYASSGSSLGGSDSPVFEAGVFAPPQPVAAPRRLPIFNRISVSE

SEQ ID NO: 11173 - DNA, 583 bp, Rattus norvegicus; identical to SEQ ID NO: 4666
  ref <308>: DATABASE ACCESSION NUMBER: EMBL / AA800639
  ref <309>: DATABASE ENTRY DATE: 2000-03-03

SEQ ID NO: 11174 - DNA, 452 bp, Rattus norvegicus; identical to SEQ ID NO: 4681
  ref <308>: DATABASE ACCESSION NUMBER: EMBL / AA800678
  ref <309>: DATABASE ENTRY DATE: 2000-03-03

SEQ ID NO: 11175 - DNA, 641 bp, Rattus norvegicus; identical to SEQ ID NO: 4709
  ref <308>: DATABASE ACCESSION NUMBER: EMBL / AA800708
  ref <309>: DATABASE ENTRY DATE: 2000-03-03

SEQ ID NO: 11176 - DNA, 637 bp, Rattus norvegicus; identical to SEQ ID NO: 4720
  ref <308>: DATABASE ACCESSION NUMBER: EMBL / AA800749
  ref <309>: DATABASE ENTRY DATE: 2000-03-03

SEQ ID NO: 11177 - DNA, 600 bp, Rattus norvegicus; identical to SEQ ID NO: 4731
  ref <308>: DATABASE ACCESSION NUMBER: EMBL / AA800772
  ref <309>: DATABASE ENTRY DATE: 2000-03-03

SEQ ID NO: 11178 - DNA, 528 bp, Rattus norvegicus
  ref <308>: DATABASE ACCESSION NUMBER: EMBL / AA800790
  ref <309>: DATABASE ENTRY DATE: 2000-03-03
acacaacaagaggttagcaactacacaggctgccactttaagtgaccagagccaaacaaaacacaattctttcacatggctttattacaattgcatgttagacacgacacacccacgttttgatgaaaacagtgttcctttggccgttgcacatgatcaatactgagcaatgtttgaacacagaccaacaatagcggtagaaaatttagggagaaaacagactgaattcactcataagtcttttgacctctaacatccctgggaacactatttttttgcattgctatgttaggcagtgtaaatgttagaaactatgctttaaatacgatggtaccttctcttatcttggcttcaattatgcaaagaaagtgtgcatgtttcttaccacgcctgctctgtatgctaaaattttgaataaaaaaaagccactgaatatagttttattgcatatattgcatggatagtgttcttatgccatttcatgatttggcaggatgattattacccatgagtctaacatgatgagag

SEQ ID NO: 11179 - DNA, 422 bp, Rattus norvegicus
  ref <308>: DATABASE ACCESSION NUMBER: EMBL / AA800885
  ref <309>: DATABASE ENTRY DATE: 2000-03-03
ggaagccttttcaacagaacatttattgagtgccaactgtaagcatctgagctgtgtatgggctgtgagtgacagaggcatgagggggaaaaccaggaaagctgctgctgccccttatcttctctcacagagcagttgctgctcttagctgggttagccctcggaccagcaaggaagaggattaaaatcccaagcatgctaagtgggagggtggtggcgagcttagcttttgtaaggctctgggcgcgttcttcagcaccaggggcgaaataattccagagcaagatctggctgaactggaacggagcgaggactaaagcattgggccaagcctggcaggcagtggttttaagttcctccaggtgcctgaggtcttttgctatcaatacaaatggcgggagaaaaatgacttcggtctacca

SEQ ID NO: 11180 - DNA, 423 bp, Rattus norvegicus
  ref <308>: DATABASE ACCESSION NUMBER: EMBL / AA800912
  ref <309>: DATABASE ENTRY DATE: 2000-03-03
aaaaaggccttggcggcaggaatatagtgtaaaaatcattggaaaaactaaaaggcatcgatacatatccgaatatactttgtacataaattacattttcctttagtcttttgagttgaggtcctgattcggctctgaggtctaataatcaagggggcctggaagctgcacgtttagtccggaatagtccaccatgtacactggccactgctagagagagggggaggggggatagagggaccacgttaggactccaggtgacacggaggaactcccagaataatcagcgcgcttgctttgagggtgagctcaaacgttaacttagtacgcagacactgaggcctggagagggaaagagatctgtccgaggtcatgcaggtagaacgtggtgattgtccccacctgtgttccaggggctcaatc

SEQ ID NO: 11181 - DNA, 3056 bp, Homo sapiens
  ref <308>: DATABASE ACCESSION NUMBER: EMBL / AF118270
  ref <309>: DATABASE ENTRY DATE: 1999-06-18
ggccggggcgccgctggcaggagcgcttggggatcctccaaggcgaccatggccttgctgggtaagcgctgtgacgtccccaccaacggctgcggacccgaccgctggaactccgcgttcacccgcaaagacgagatcatcaccagcctcgtgtctgccttagactccatgtgctcagcgctgtccaaactgaacgccgaggtggcctgtgtcgccgtgcacgatgagagcgcctttgtggtgggcacagagaaggggagaatgttcctgaatgcccggaaggagctacagtcagacttcctcaggttctgccgagggcccccgtggaaggatccggaggcagagcaccccaagaaggtgcagcggggcgagggtggaagccgtagcctccctcggtcctccctggaacatggctcagatgtgtaccttctgcggaagatggtagaggaggtgtttgatgttctttatagcgaggccctgggaagggccagtgtggtgccactgccctatgagaggctgctcagggagccagggctgctggccgtgcaggggctgcccgaaggcctggccttccgaaggccagccgagtatgaccccaaggccctcatggccatcctggaacacagccaccgcatccgcttcaagctcaagaggccacttgaggatggcgggcgggactcgaaggccctggtggagctgaacggtgtctccctgattcccaaggggtcacgggactgtggcctgcatggccaggcccccaaggtgccaccccaggacctgcccccaaccgccacctcctcctccatggccagcttcctgtacagcacggcgctccccaaccacgccatccgagagctcaagcaggaagcaccttcctgcccccttgcccccagcgacctgggcctgagtcggcccatgccagagcccaaggccaccggtgcccaagacttctccgactgttgtggacagaagcccactgggcctggtgggcctctcatccagaacgtccatgcctccaagcgcattctcttctccatcgtccatgacaagtcagagaagtgggacgccttcataaaggaaaccgaggacatcaacacgctccgggagtgtgtgcagatcctgtttaacagcagatatgcggaagccctgggcctggaccacatggtccccgtgccctaccggaagattgcctgtgacccggaggctgtggagatcgtgggcatcccggacaagatccccttcaagcgcccctgcacttatggagtccccaagctgaagcggatcctggaggagcgccatagtatccacttcatcattaagaggatgtttgatgagcgaattttcacagggaacaagtttaccaaagacaccacgaagctggagccagccagcccgccagaggacacctctgcagaggtctctagggccaccgtccttgaccttgctgggaatgctcggtcagacaagggcagcatgtctgaagactgtgggccaggaacgtccggggagctgggcgggctgaggccgatcaaaattgagccagaggatctggacatcattcaggtcaccgtcccagacccctcgccaacctctgaggaaatgacagactcgatgcctgggcacctgccatcggaggattctggttatgggatggagatgctgacagacaaaggtctgagtgaggacgcgcggccggaggagaggcccgtggaggacagccacggtgacgtgatccggcccctgcggaagcaggtggagctgctcttcaacacacgatacgccaaggccattggcatctcggagcccgtcaaggtgccgtactccaagtttctgatgcacccggaggagctgtttgtggtgggactgcctgaaggcatctccctccgcaggcccaactgcttcgggatcgccaagctccggaagattctggaggccagcaacagcatccagtttgtcatcaagaggcccgagctgctcactgagggagtcaaagagcccatcatggatagtcaagagagggattccggggaccctctggtggacgagagcctgaagagacagggctttcaagaaaattatgacgcgaggctctcacggatcgacatcgccaacacactaagggagcaggtccaggaccttttcaataagaaatacggggaagccttgggcatcaagtacccggtccaggtcccctacaagcggatcaagagtaaccccggctccgtgatcatcgaggggctgcccccaggaatcccgttccgaaagccctgtaccttcggctcccagaacctggagaggattcttgctgtggctgacaagatcaagttcacagtcaccaggcctttccaaggactcatcccaaagcctgatgaagatgacgccaacagactcggggagaaggtgatcctgcgggagcaggtgaaggaactcttcaacgagaaatacggtgaggccctgggcctgaaccggccggtgctggtcccttataaactaatccgggacagcccagacgccgtggaggtcacgggtctgcctgatgacatccccttccggaaccccaacacgtacgacatccaccggctggagaagatcctgaaggcccgagagcatgtccgcatggtcatcattaaccagctccaaccctttgcagaaatctgcaatgatgccaaggtgccagccaaagacagcagcattcccaagcgcaagagaaagcgggtctcggaaggaaattccgtctcctcttcctcctcgtcttcctcttcctcgtcctctaacccggattcagtggcatcggccaaccagatctcactcgtgcaatggccaatgtacatggtggactatgccggcctgaacgtgcagctcccgggacctcttaattactagacctcagtactgaatcaggacctcactcagaaagactaaaggaaatgtaatttatgtacaaaatgtatattcggatatgtatcgatgccttttagtttttccaatgatttttacactatattcctgccaccaaggcctttttaaataagtaaaaaaaaaaaaaaaaaaaaaaa

SEQ ID NO: 11182 - protein, 959 aa, Homo sapiens
  ref <308>: DATABASE ACCESSION NUMBER: SWISS-Prot / Q9UHL9
  ref <309>: DATABASE ENTRY DATE: 2002-06-15
MALLGKRCDVPTNGCGPDRWNSAFTRKDEIITSLVSALDSMCSALSKLNAEVACVAVHDESAFVVGTEKGRMFLNARKELQSDFLRFCRGPPWKDPEAEHPKKVQRGEGGGRSLPRSSLEHGSDVYLLRKMVEEVFDVLYSEALGRASVVPLPYERLLREPGLLAVQGLPEGLAFRRPAEYDPKALMAILEHSHRIRFKLKRPLEDGGRDSKALVELNGVSLIPKGSRDCGLHGQAPKVPPQDLPPTATSSSMASFLYSTALPNHAIRELKQEAPSCPLAPSDLGLSRPMPEPKATGAQDFSDCCGQKPTGPGGPLIQNVHASKRILFSIVHDKSEKWDAFIKETEDINTLRECVQILFNSRYAEALGLDHMVPVPYRKIACDPEAVEIVGIPDKIPFKRPCTYGVPKLKRILEERHSIHFIIKRMFDERIFTGNKFTKDTTKLEPASPPEDTSAEVSRATVLDLAGNARSDKGSMSEDCGPGTSGELGGLRPIKIEPEDLDIIQVTVPDPSPTSEEMTDSMPGHLPSEDSGYGMEMLTDKGLSEDARPEERPVEDSHGDVIRPLRKQVELLFNTRYAKAIGISEPVKVPYSKFLMHPEELFVVGLPEGISLRRPNCFGIAKLRKILEASNSIQFVIKRPELLTEGVKEPIMDSQGTASSLGFSPPALPPERDSGDPLVDESLKRQGFQENYDARLSRIDIANTLREQVQDLFNKKYGEALGIKYPVQVPYKRIKSNPGSVIIEGLPPGIPFRKPCTFGSQNLERILAVADKIKFTVTRPFQGLIPKPDEDDANRLGEKVILREQVKELFNEKYGEALGLNRPVLVPYKLIRDSPDAVEVTGLPDDIPFRNPNTYDIHRLEKILKAREHVRMVIINQLQPFAEICNDAKVPAKDSSIPKRKRKRVSEGNSVSSSSSSSSSSSSNPDSVASANQISLVQWPMYMVDYAGLNVQLPGPLNY

SEQ ID NO: 11183 - DNA, 8067 bp, Rattus norvegicus
  ref <308>: DATABASE ACCESSION NUMBER: Refseq / NM_011602
  ref <309>: DATABASE ENTRY DATE: 2002-11-02
atggttgcgctttcgctgaagattagcattgggaatgtggtgaagacgatgcaatttgagccatctaccatggtgtacgacgcctgccgcatgattcgtgagcggatcccagaggccctggctggccctcccaacgactttgggctctttctgtcagatgatgaccccaaaaaaggcatctggctagaggctgggaaagctttggactactacatgctccgaaatggggacaccatggagtacagaaaaaagcagagacccctgaagatccggatgttagacggaacggtgaagactatcatggtggatgactccaagaccgtcacagacatgctcatgaccatttgtgcccgaattggtatcaccaaccatgatgagtattcactggttcgagagctgatggaagaaaagaaagatgaggggacagggaccctgagaaaagacaagaccctactgcgagatgaaaagaagatggagaagctaaagcagaagttgcacacagacgatgagttgaactggctggaccatgggcggacactgagggaacagggagtggaagagcatgagacgttgctgctgcggagaaagttcttctactcagaccagaatgtggattcccgagaccctgtacagctgaaccttctctatgtgcaggcacgagatgacatcctgaatggctcccatcctgtctcctttgacaaggcctgtgaatttgcaggcttccagtgccagatccagtttggacctcacaatgaacagaagcacaaggctggcttccttgacctgaaggacttcctgcccaaggagtatgtgaagcagaagggagagcgtaagatctttcaggcacacaagaattgtgggcagatgagtgaaattgaggccaaggtacgctacgtgaagctggcccgttccctcaagacttacggtgtctccttcttcctagtcaaggaaaagatgaaggggaagaataaactggtgcccaggctgttgggcatcactaaggagtgtgtgatgcgtgtggatgagaagaccaaggaggtgattcaggaatggagcctcaccaacatcaaacgctgggctgcctctcccaagagctttactctggactttggagactatcaggatggctactactcagtacagacgacagaaggcgagcagatcgcacagctcattgctggctacatagatatcatccttaagaagaaaaaaagcaaggaccattttgggctggagggagatgaagagtctactatgttggaggactcagtgtctcccaaaaagtcaacagtccttcagcagcagtacaaccgagtggggaaagtggagcacggctctgtggctctgccagccatcatgcgctctggagcctctggtcctgagaatttccaggtggggagcatgccacctgcccagcagcagatcaccagtggccagatgcaccgaggacacatgccacctctgacttcagcccagcaggcgctcactggaaccattaactccagcatgcaggctgtgcaggctgcccaggccactctggatgactttgagactctaccccctcttggccaggatgctgcctccaaagcttggcgtaagaacaagatggatgaatcaaagcatgagatccactcccaggtagatgccatcacagctggcactgcctctgtggtaaacctgacagcaggagatcctgcagagacagactatacagcagtgggctgtgcagtcaccaccatctcttccaacctgacggagatgtcccgtggggtgaagctattggctgccctgctggaggatgaaggcggcaatggccggccccttctgcaagcagcaaagggccttgcaggggctgtgtcggaactgcttcgcagtgctcagcccgccagcgctgagcctcgtcagaacctgctgcaggcagccgggaacgtgggccaggccagtggggagctgttgcagcaaattggggaaagtgacactgacccccacttccaggatgttctaatgcagctagcaaacgcagtggcaagtgctgcagccgccctggtcctcaaggccaagagtgtggcccagcgcacagaggattccgggcttcagacccaagtgattgctgcagctacgcaatgtgctctgtccacttcccagctggtggcctgtaccaaggtggtagcacctacaatcagctcacctgtgtgccaagaacagctagtcgaggctgggcgactggtggccaaagctgtggagggctgtgtgtctgcctcgcaagcagctacagaagatggacagctgcttcgaggggtaggagcagcagccacggctgtcacccaggccctcaatgagctgctgcagcacgtgaaggcccacgccaccggagctgggcctgccggtcggtatgaccaagccactgataccatcctcaccgtcactgaaaacatcttcagctccatgggtgatgctggggagatggtgcgccaggcccgcatcctggcccaagccacctcagacctggtcaatgctatcaaggccgatgctgagggggagagtgatctggagaactctagaaagctcctgagtgctgccaagatcctcgctgatgccaccgccaagatggtggaggcggccaagggagcagccgcccaccctgacagtgaggaacagcagcagcgactgcgtgaagcagctgaggggcttcgcatggccaccaatgcagctgcgcagaacgccatcaagaagaagttggtgcagcgcctggagcatgcagccaagcaagctgcagcctctgcaacacagaccattgctgcagcccaacatgcagcctctgcccccaaggcctctgcgggcccccagcccctactggtgcagagctgtaaggccgtggcagagcagattccgttgctggtgcagggtgtccgaggaagtcaagctcagcctgacagccctagtgctcagctcgccctcattgctgccagccagagcttcctgcagccaggtgggaagatggtggcagcggcaaaagcctcagtgccaacaattcaggaccaggcttcagcgatgcagctgagtcagtgcgcaaagaacctaggcactgccctggccgagctgcgcactgctgctcagaaggctcaggaggcatgtggacctttggagatggattctgcactgagtgttgtacaaaatctagagaaagacctacaggaaataaaagcagcagctcgagatggcaagcttaagcccttacctggggaaacaatggagaagtgtacccaagatcttggcaacagcaccaaagcggtgagctctgccatcgccaagctgctgggggagattgcccagggcaatgagaactatgcaggtattgcagctcgggatgtagctggtggactaaggtcactagcccaggctgcgcggggtgtggctgcgctgacatcagatcctgcagtgcaggccattgtgcttgacacagccagcgacgttctggacaaggccagcagcctcattgaagaggcaaaaaaagcatctggacacccaggggacccagaaagccagcaaaggcttgctcaggtagctaaagcagtgacccaagccctgaaccgctgtgtcagctgcctgcctggccaaagagacgtggataatgccctacgagccgttggagatgccagcaagcgactcctgagtgacttgcttcctccaagcacggggacatttcaagaagcacagagccgattgaatgaagctgcagctgggttaaatcaggccgccacagaactggtgcaagcctcccgaggaactcctcaggacctggctcgggcctccggccgatttggacaggacttcagcaccttcctggaagctggtgtggagatggccggacaggccccgagccaggaggaccgagcccaggtggtgtccaacctgaagggcatatccatgtcttcaagcaaacttctccttgccgctaaggccttgtccacagaccctgcttctcccaacctcaagagtcagctggctgcggctgcccgggcagtgacggacagcatcaaccagctcatcaccatgtgcacccagcaggcacctggccagaaggagtgtgacaatgcacttcggcagctagagacagtccgagaactcctggagaatccagtccagcccatcaacgacatgtcctacttcggttgcttggacagtgtcatggagaactccaaggtcctaggtgaggccatgactggcatctcccaaaatgccaagaatggaaatctgccggagtttggagatgccattgccacagcctccaaggctctctgtggcttcacggaggcagccgcacaggcagcatatctagttggtgtctctgaccccaacagccaagctggacagcaaggactggtggaacccacacagtttgcccgtgcaaaccaggcaattcagatggcctgtcagagtctgggggagcctggctgtacccaggcccaggtgttatctgcagccactattgtagccaaacacacatctgcattgtgtaacagctgtcgcctggcttccgctaggactgccaatcccactgccaagcgccagtttgtacagtcagccaaggaggtggccaacagtacagccaatcttgtcaagaccatcaaggcactagatggggacttcacagaagagaaccgtgcccagtgccgagcagccacagcccctctgctggaagctgtggataacctgagtgcctttgcctccaaccctgagttctccagcgtccctgcccagatcagccctgagggcagagcagccatggagcccattgtaatctctgctaagacaatgttggagagtgctggagggctcatccagacagctcgggcgttagcagtcaatccccgagaccccccacgttggtctgtgctagctggccactctcggactgtctcagattccatcaagaaacttattacaagcatgagggacaaagccccagggcagctggagtgtgagacagccattgcggctctgaacagctgcttgcgggacctagatcaggcttcgcttgccgctgtcagccagcagcttgctccccgtgaaggaatctctcaagaggctttgcacacccagatgctcactgcagtgcaagaaatttctcatctcattgagccgctggccagcgctgctcgggctgaagcctcccagctgggacacaaggtgtcccaaatggcccagtactttgaaccactcaccctggctgcagtgggtgctgcgtctaagaccctgagccacccgcagcagatggcacttctggaccagactaaaacgttggcagagtctgccttgcagttgctatatactgccaaggaggctggtggtaaccccaagcaagcagcacacacccaggaagccctggaggaggctgtgcagatgatgacagaggccgtagaagacctgacgacgaccctcaacgaagcagccagtgctgcaggagtcgttggcggcatggtggactctatcactcaggccatcaaccagctagatgaaggacctatgggtgacccagaaggctcattcgtagattaccagacaaccatggtgaggacagccaaggccattgctgtcactgttcaggagatggtaaccaagtcaaacaccagccctgaagagctaggccctcttgccaaccagctgaccagtgactatggccgactggcctcacaagccaagcctgcagctgtggctgctgaaaatgaagagataggcgctcacatcaaacaccgagtacaggagctgggccatggctgctctgctctggtcaccaaggcaggtgccttgcagtgtagccccagtgatgtctacaccaagaaggagctcatagagtgtgcccgcagagtgtcagagaaggtctcccatgttctggctgcactccaggctgggaatcgtggtacccaggcctgcattacagcagccagtgctgtgtctggtatcattgctgacctcgacaccaccatcatgttcgctactgctggcacacttaaccgtgagggtgctgaaacttttgctgaccaccgggagggtatcttaaagacagcaaaggttcttgtggaggacaccaaggtcctagtgcagaatgcagctgggagccaggagaagttggcacaagccgcccagtcctccgtggccaccattacccgcctcgctgatgtggtcaagctcggtgcagccagcctaggagccgaagaccctgaaactcaggtggtgctgatcaatgcagtaaaggacgtagccaaggccctgggtgacctcatcagcgctacgaaggctgcagcgggcaaagttggggatgaccctgcagtgtggcagctcaagaactctgccaaggtgatggtgaccaatgtgacatcattgctcaagacagtgaaggctgtggaagatgaggccaccaaaggcacacgggccctagaggcaaccacagagcacatacgtcaggaactggcggtcttctgttccccagagccacctgccaagacctctacccctgaagacttcatccgaatgaccaagggtattactatggcaacagccaaagccgttgctgctggcaattcctgtcgacaggaagatgtcattgccacagccaatctgagccgacgggctattgcggacatgcttcgggcttgcaaggaagcagctttccacccagaagtggcgcctgatgtacggctccgagccctgcactatggccgggagtgtgccaatggttacctggaactgctggaccacgtgctgctgacccttcagaagccaaacccagacctgaagcagcagctaactggacactcaaagcgggttgctggctctgtgactgagctcatccaggctgctgaagccatgaaaggaacagagtgggtggacccagaggaccctactgtcattgctgagaatgagctcttgggagccgcagccgccatcgaggctgcagccaagaagctggagcagctgaagcccagggccaaacccaaggaggcggatgagtccttgaactttgaggaacaaatcctagaagctgccaagtccatcgctgcagccaccagtgcactggtaaaggctgcgtcagcagcccagagggagctggtggctcaaggaaaggtgggcgccattccagccaatgcactggatgatgggcagtggtcgcagggcctcatttccgctgcccgtatggtggctgcggccaccaacaatctgtgtgaagcagctaacgcagctgtccagggccatgctagccaggagaaactcatttcctcagccaagcaagtagctgcctccacagctcagctcctggtagcttgcaaggtcaaagcagatcaggactctgaggcaatgaaacggctccaggctgctggcaatgcagtgaagagggcctcagataacctggtaaaggcggcccagaaagctgcagccttcgaagaccaggagaatgagacggtggtggtgaaggagaaaatggttgggggcattgcccagattatcgcagcacaggaagagatgcttcggaaggaacgagagctggaagaggctcggaaaaagctcgcccagatccggcagcagcagtacaagttcttgccttcagagcttcgagacgagcactaaaaaagccctgtgtatttaatgcagacccagcccagagactgtgcctgccactaccaaagccttctgggctgctcaggacccaagctgcccaaccccagcactcccccaaagtgcctgccaaaccctgggcctggccctgcccagtcccactgcaagccgtgtcctctccctgactcccaagtgcctttgcaccctagggcccctaagtgcctgcccccctccagagtattaacgctccaagagtattattaatgctgccgtacctcagtttgaacctgccagggccccagctgctccagcctgccagcagcttccagccagtccccacggccacgtcagctcaactcatccctttttgatactatatcccctacccagctacctatggggcttgagggttgtaaacccaaacaggtcagactccaataaaggtgattctac

SEQ ID NO: 11184 - protein, 2541 aa, Rattus norvegicus; identical to SEQ ID NO: 4754
  ref <308>: DATABASE ACCESSION NUMBER: SWISS-Prot / P26039
  ref <309>: DATABASE ENTRY DATE: 2002-06-15

SEQ ID NO: 11185 - DNA, 8168 bp, Homo sapiens; identical to SEQ ID NO: 4755
  ref <308>: DATABASE ACCESSION NUMBER: EMBL / AF177198
  ref <309>: DATABASE ENTRY DATE: 2000-01-11

SEQ ID NO: 11186 - protein, 2541 aa, Homo sapiens [sequence omitted]

SEQ ID NO: 11187 - DNA, 456 bp, Rattus norvegicus; identical to SEQ ID NO: 4763
  ref <308>: DATABASE ACCESSION NUMBER: EMBL / AA817854
  ref <309>: DATABASE ENTRY DATE: 2000-03-03

SEQ ID NO: 11188 - protein, 1059 aa, Rattus norvegicus; identical to SEQ ID NO: 3197
  ref <308>: DATABASE ACCESSION NUMBER: SWISS-Prot / P13635
  ref <309>: DATABASE ENTRY DATE: 1999-07-15

SEQ ID NO: 11189 - DNA, 3321 bp, Homo sapiens; identical to SEQ ID NO: 3198
  ref <308>: DATABASE ACCESSION NUMBER: EMBL / M13699
  ref <309>: DATABASE ENTRY DATE: 2000-03-04

SEQ ID NO: 11190 - protein, 1065 aa, Homo sapiens; identical to SEQ ID NO: 3199
  ref <308>: DATABASE ACCESSION NUMBER: SWISS-Prot / P00450
  ref <309>: DATABASE ENTRY DATE: 2002-06-15

SEQ ID NO: 11191 - DNA, 1523 bp, Rattus norvegicus
  ref <308>: DATABASE ACCESSION NUMBER: Refseq / NM_012925
  ref <309>: DATABASE ENTRY DATE: 2000-11-01
ggcacgagggagcccgaaactggcgcaggcaagaagaacctctagcacagatctagctgactgcgaggttgcagatttggtggaccagcacaatgagagctcggaggggattcatcttactcctgcttctggctgtcctctgttccacaggtgttagcctcagatgctacaactgtttagacccggtttcttcatgcaaaacaaacagcacttgctctcctaacctggatgcttgtcttgttgctgtatccggaaagcaagtctatcaacagtgttggagattttcggattgtaatgccaagttcattttgagccgactagaaatcgcaaacgtacaatacagatgctgccaggcggacttgtgtaacaaaagcttcgaagacaagccaaacaatggggcaatctccctattggggaagacagcgttgctggtgacctcggttctggcggccattttgaagccttgtttctaaatcatctctaagctcccgatgcctcctttcttttttccttctttttcttcttcttcagcactctaaagcctttattattttccaacttatattcgtttaggaaacaatatagttcacttgaaatcttggataagagggagggttgtaagcagcacggaagagcaccgaagagcaccgtgcacatagggaaggcccacctgcaggtacagagtgaagtgcgtgggtaaaacactaacaggttatgtaatcttcctttgtcacttcggagggctggctttcagtttcagcttaagtgggtttccggcaaccctcagggatatctctttggttcccggaatgtagctgaggagtgaggtcagaaagtacctttaagtgagtggaccaggaggattctcttcattactctgacacactcaaaacgctttcataacttttacaggtcctgagctggtgtgcaaatgttccatatgtgagctgtcagtcaggggcgctgattgttcatttgctttaaaacaacaaaaacaaaaacaacaacaaaacagttctgggaatgaaacccagtgcattgagcatgtaggcaagtgctttacccataagccccagctccagctccagcagcgaatgaagcagctgcattttcagctagaaaacatagggatttgacctacatttcaacaagacctctgaaccagatgtgatgatgcttgcttagtatgtttagcatctcagtgctctggaggcagagacaggaggagggccataagttgaaggccagcctgaccttcacagtggtctccaagtcacctaaaactatatagtaagaccttgcctcaaatgaaaaacaaaatggcgagtggtggtgcatgcctttaataccagcacttgggagtagaagcaggtgcatctccgtaggtcaaagccagccagttcccggacagccaaggctatacagagaaagcctgtctatacatacatacatacatacatacatacatacatacatacatacatagaaaagaaaaacctcaaaacaacaataacaacaaaaca

SEQ ID NO: 11192 - protein, 126 aa, Rattus norvegicus; identical to SEQ ID NO: 4776
  ref <308>: DATABASE ACCESSION NUMBER: SWISS-Prot / P27274
  ref <309>: DATABASE ENTRY DATE: 2000-05-30

SEQ ID NO: 11193 - DNA, 1742 bp, Homo sapiens; identical to SEQ ID NO: 4777
  ref <308>: DATABASE ACCESSION NUMBER: EMBL / AF052941
  ref <309>: DATABASE ENTRY DATE: 2000-01-21

SEQ ID NO: 11194 - protein, 128 aa, Homo sapiens; identical to SEQ ID NO: 4778
  ref <308>: DATABASE ACCESSION NUMBER: Refseq / NP_000602
  ref <309>: DATABASE ENTRY DATE: 2002-04-10

SEQ ID NO: 11195 - DNA, 871 bp, Rattus norvegicus
  ref <308>: DATABASE ACCESSION NUMBER: Refseq / NM_022538
  ref <309>: DATABASE ENTRY DATE: 2002-05-23
agatctgtgaccatgttcgacaagccgcggctgccgtacgtggtcctcgatgtgatttgcgtgttgctggctggattgccttttataattcttacttcaaggcatacccccttccaacgaggagtgttctgtactgatgagtccatcaagtacccttacagagaagacaccatcccttatgcgttattaggtggaatagtcattccattctgtattatcgttatgattactggagaaactctgtctgtttactttaatgtcttgcattcaaattcctttgtcagcaatcactatatagccaccatttacaaagccgttggagcctttttgtttggagcctcagccagtcagtccctgactgacattgctaagtactctataggcagactgcggcctcacttcctggctgtctgtaacccagactggtcaaaaatcaactgcagcgatggctacattgagaacttcgtatgtcaagggaatgaacagaaggtcagggaaggcaggttgtccttctactcggggcactcctcattctctatgtactgcatgctgtttgtcgcactttatcttcaagccaggatgaagggagattgggcaagactcttacgacccatgctacagtttgggcttgttgctttatccatatatgtgggcctgtctcgagtttctgattacaaacaccactggagcgacgtgttaattggcctcattcaaggagctgttgtggcaatattagtggttttgtatgtaactgatttcttcaagaccacagagtctaacaaagaaagaaaagaggactcacatacgactctacacgaaaccaccaacagacagagctacgcaaggaatcacgagccctgaaggggtcgac

SEQ ID NO: 11196 - protein, 282 aa, Rattus norvegicus; identical to SEQ ID NO: 4788
  ref <308>: DATABASE ACCESSION NUMBER: Refseq / NP_071983
  ref <309>: DATABASE ENTRY DATE: 2002-05-23

SEQ ID NO: 11197 - DNA, 3352 bp, Homo sapiens; identical to SEQ ID NO: 4789
  ref <308>: DATABASE ACCESSION NUMBER: EMBL / D29641
  ref <309>: DATABASE ENTRY DATE: 2001-10-10

SEQ ID NO: 11198 - protein, 1046 aa, Homo sapiens; identical to SEQ ID NO: 4790
  ref <308>: DATABASE ACCESSION NUMBER: SWISS-Prot / P42285
  ref <309>: DATABASE ENTRY DATE: 2002-06-15

SEQ ID NO: 11199 - DNA, 561 bp, Rattus norvegicus; identical to SEQ ID NO: 4808
  ref <308>: DATABASE ACCESSION NUMBER: EMBL / AA819338
  ref <309>: DATABASE ENTRY DATE: 2000-03-03

SEQ ID NO: 11200 - protein, 173 aa, Rattus norvegicus; identical to SEQ ID NO: 4809
  ref <308>: DATABASE ACCESSION NUMBER: SWISS-Prot / Q07984
  ref <309>: DATABASE ENTRY DATE: 1996-10-01

SEQ ID NO: 11201 - DNA, 642 bp, Homo sapiens; identical to SEQ ID NO: 4810
  ref <308>: DATABASE ACCESSION NUMBER: EMBL / Z69043
  ref <309>: DATABASE ENTRY DATE: 1997-10-02

SEQ ID NO: 11202 - protein, 173 aa, Homo sapiens; identical to SEQ ID NO: 4811
  ref <308>: DATABASE ACCESSION NUMBER: SWISS-Prot / P51571
  ref <309>: DATABASE ENTRY DATE: 2002-06-15

SEQ ID NO: 11203 - DNA, 2192 bp, Rattus norvegicus
  ref <308>: DATABASE ACCESSION NUMBER: EMBL / AF281018
  ref <309>: DATABASE ENTRY DATE: 2000-07-06
gcggcgaagctggaaacgatttcggctcgacattgtaagaacaggcttgtggctgtccacagaacactggggatccaaaccactgctagctaggtgaagcctcgtgcactcgaggcggagtgaggtctcgcggaagcgtctccgagagcggcgagggccgcgagagcaacaccaagcagcccggggcttgggctattctcactgatccgaacatctctcttcgctggtaggaagaagccattgctcctgtgttaccatgggaattcaaggccttgccaaactaattgctgatgtggcccccagtgccatccgtgagaatgacatcaagagctactttggtcgcaaagtggccattgatgcctccatgagcatttaccagttcctgattgctgttcgtcagggtggggacgtactgcagaacgaggagggggagaccaccagccacctgatgggcatgttctaccgtaccatccgcatgatggagaatggcatcaagccggtgtatatctttgatggcaaaccaccacagctgaagtcggcccagctggccaaacgcagtgagcggcgtgcagaggccgagaagcagctgcagcaggctcaggaggcgggggcagaggaggaggtggaaaagttcaccaagcggcttgtgaaggtcaccaagcaacacaacgatgagtgcaaacacctgctgagcctcatgggcatcccataccttgatgcgcccagcgaggcagaggccagctgtgctgccctggcaaaggctggcaaagtctatgccgcagccacggaggacatggactgcctcacttttggcagccccgtgctaatgcgacacttaactgccagtgaggccaagaagctgcccatccaagagttccacctgagccgcgtcctgcaagagctgggtctgaaccaggagcagtttgtggatctgtgcatcctgctgggtagcgactactgtgagagtgtccgtggcattggacccaagcgggctgtggacctcatccagaagcacaagagcatcgaggagatcgtgaggcggctggatcccagcaagtaccctgttccggaaaactggctccacaaggaagcccggcagctcttcctggagccggaagtagtggacccagagtctgtggagctgaagtggagtgagccaaacgaagaagagttggtcaaatttatgtgcggtgaaaagcagttttctgaagagcggattcgtagtggggtcaaacggctgaataagagccgccaaggcagcacccagggacgcctagatgatttcttcaaggtgacaggctcactctcctcagccaagcgcaaggagccagagcccaaggggcctgccaagaagaaagcaaagactggggcagcagggaagttccgaaggggaaaataaatgtgtccttcccctccactgtcccttggccccaggacagtgttttgtaccctcagctagagcacatccctctcgccctgcgtcttgaggacaagttcattgcttcccagcgctgcccttcagagctttccctcgcttgaccctgtgccaggaagcccgtagctctgcttttcctcatttttagctcaggaaagatgtcaggctcaaaccacttctcaggttaatggaccctgtccgttgctctgtgcaactgctagcagtattttaagggagaagataaggcagggagagagtaggaggtaatttcccagctggccagctggtgggggacaggtgactagagcgcggctggcgactgctctttctaatttcactgtgccctggaagacagccatcagtctgggattagctgatgagagagccgcaaagagaaacagaggagtctggcgacaacagatttaatactgactggctgttttgtggacttgctgtctggtgagcccagtagttgcgcaagggagtgaaaacacagtgtttaggtttaggtttgtagtgtttggttttgtgcctcccctctccagtgttgggaattgaacccagggcaaaggcattaagtgtaccactgacctgtagctccaagtgatgttctgaggctccaagtgatggcctttctgaggcagtcaatttaattgaggttttggaagaaaaaacttgttcatgggctgtttctattttaaaagatgtgaagaaaaaaaacaataaaattataaaagcaaaaaaaaaaaaaaaaaaa

SEQ ID NO: 11204 - protein, 380 aa, Rattus norvegicus
  ref <308>: DATABASE ACCESSION NUMBER: SWISS-Prot / AAF81265
  ref <309>: DATABASE ENTRY DATE: 2002-10-01
MGIQGLAKLIADVAPSAIRENDIKSYFGRKVAIDASMSIYQFLIAVRQGGDVLQNEEGETTSHLMGMFYRTIRMMENGIKPVYIFDGKPPQLKSAQLAKRSERRAEAEKQLQQAQEAGAEEEVEKFTKRLVKVTKQHNDECKHLLSLMGIPYLDAPSEAEASCAALAKAGKVYAAATEDMDCLTFGSPVLMRHLTASEAKKLPIQEFHLSRVLQELGLNQEQFVDLCILLGSDYCESVRGIGPKRAVDLIQKHKSIEEIVRRLDPSKYPVPENWLHKEARQLFLEPEVVDPESVELKWSEPNEEELVKFMCGEKQFSEERIRSGVKRLNKSRQGSTQGRLDDFFKVTGSLSSAKRKEPEPKGPAKKKAKTGAAGKFRRGK

SEQ ID NO: 11205 - DNA, 1757 bp, Homo sapiens
  ref <308>: DATABASE ACCESSION NUMBER: EMBL / X76771
  ref <309>: DATABASE ENTRY DATE: 1998-12-07
agtcctgcgatttcggtgtagaggagcaggggctgcgggacctggtgtgggtggagtgggacaagcggtggagaagggtacgccagggtcgctgagagactctgttctccctggagggactggttgccatgagagcagccgtctgaggggacgcagcctgcactacgcgccccaagaggctgtgcgtggcgagcaggtcacgtgacgggagcgcgggctttggaaggcggctgaacgtcaggccacccgccgctaagctgagaagggagagcgagcttaggaccgcctgcccggggcaaccccgaaccaagctttagccgccgaggccgcgtgtcccaaaggccagtcatccctcctctgtgttgccatgggaattcaaggcctggccaaactaattgctgatgtggcccccagtgccatccgggagaatgacatcaagagctactttggccgtaaggtggccattgatgcctctatgagcatttatcagttcctgattgctgttcgccagggtggggatgtgctgcagaatgaggagggtgagaccaccagccacctgatgggcatgttctaccgcaccattcgcatgatggagaacggcatcaagcccgtgtatgtctttgatggcaagccgccacagctcaagtcaggcgagctggccaaacgcagtgagcggcgggctgaggcagagaagcagctgcagcaggctcaggctgctggggccgagcaggaggtggaaaaattcactaagcggctggtgaaggtcactaagcagcacaatgatgagtgcaaacatctgctgagcctcatgggcatcccttatcttgatgcacccagtgaggcagaggccagctgtgctgccctggtgaaggctggcaaagtctatgctgcggctaccgaggacatggactgcctcaccttcggcagccctgtgctaatgcgacacctgactgccagtgaagccaaaaagctgccaatccaggaattccacctgagccggattctgcaggagctgggcctgaaccaggaacagtttgtggatctgtgcatcctgctaggcagtgactactgtgagagtatccggggtattgggcccaagcgggctgtggacctcatccagaagcacaagagcatcgaggagatcgtgcggcgacttgaccccaacaagtaccctgtgccagaaaattggctccacaaggaggctcaccagctcttcttggaacctgaggtgctggacccagagtctgtggagctgaagtggagcgagccaaatgaagaagagctgatcaagttcatgtgtggtgaaaagcagttctctgaggagcgaatccgcagtggggtcaagaggctgagtaagagccgccaaggcagcacccagggccgcctggatgatttcttcaaggtgaccggctcactctcttcagctaagcgcaaggagccagaacccaagggatccactaagaagaaggcaaagactggggcagcagggaagtttaaaaggggaaaataaatgtgtttccccattatacctccttcaccccagaatatttgccgtcttgtacccttaagagctacagctagagaaaccttcacggggtggagagaggattctaaggcttttctagcgtgacccttttcagtagtgctagtcccttttttacttgatcttaatggcaagaaggccacagaggtacttttcctttttttagctcaggaaaatatgtcaggctcaaaccacttctcaggcagtttaatgg

SEQ ID NO: 11206 - protein, 380 aa, Homo sapiens
  ref <308>: DATABASE ACCESSION NUMBER: SWISS-Prot / P39748
  ref <309>: DATABASE ENTRY DATE: 2002-06-15
MGIQGLAKLIADVAPSAIRENDIKSYFGRKVAIDASMSIYQFLIAVRQGGDVLQNEEGETTSHLMGMFYRTIRMMENGIKPVYVFDGKPPQLKSGELAKRSERRAEAEKQLQQAQAAGAEQEVEKFTKRLVKVTKQHNDECKHLLSLMGIPYLDAPSEAEASCAALVKAGKVYAAATEDMDCLTFGSPVLMRHLTASEAKKLPIQEFHLSRILQELGLNQEQFVDLCILLGSDYCESIRGIGPKRAVDLIQKHKSIEEIVRRLDPNKYPVPENWLHKEAHQLFLEPEVLDPESVELKWSEPNEEELIKFMCGEKQFSEERIRSGVKRLSKSRQGSTQGRLDDFFKVTGSLSSAKRKEPEPKGSTKKKAKTGAAGKFKRGK

SEQ ID NO: 11207 - DNA, 413 bp, Rattus norvegicus; identical to SEQ ID NO: 4852
  ref <308>: DATABASE ACCESSION NUMBER: EMBL / AA849648
  ref <309>: DATABASE ENTRY DATE: 2000-03-03

SEQ ID NO: 11208 - protein, 159 aa, Rattus norvegicus; identical to SEQ ID NO: 4853
  ref <308>: DATABASE ACCESSION NUMBER: SWISS-Prot / P20280
  ref <309>: DATABASE ENTRY DATE: 1995-02-01

SEQ ID NO: 11209 - DNA, 2458 bp, Homo sapiens; identical to SEQ ID NO: 4854
  misc_feature (1)..(2458): n=a, c, g or t
  ref <308>: DATABASE ACCESSION NUMBER: EMBL / X04790
  ref <309>: DATABASE ENTRY DATE: 1996-07-23

SEQ ID NO: 11210 - protein, 606 aa, Homo sapiens [sequence omitted]

SEQ ID NO: 11211 - DNA, 374 bp, Rattus norvegicus
  ref <308>: DATABASE ACCESSION NUMBER: EMBL / AA858571
  ref <309>: DATABASE ENTRY DATE: 2000-03-03
tttttttttttttttttaatccttttttcagtttatttggtgggggaagtcaggcataatttcttttaaaaagaggaattactgtcaggtatggtaatacacacctgtgactccagcaccccagaggctgagaccggagtattgcccctacattccaggccatccgaactacatagaccctatctcaaaaataaataagtagagatgggtttacacacatgtaccgctatggctgtgtgtttcagaaatgggaaaccgcaaaatttaaaaacttaaatttggaaaatttaaacaatctaattgttttaattaagctgacaggaaattcattttggcagtgtgaatcttaagtacagatgacgtgtttctatatc

SEQ ID NO: 11212 - DNA, 576 bp, Rattus norvegicus
  misc_feature (1)..(576): n=a, c, g or t
  ref <308>: DATABASE ACCESSION NUMBER: EMBL / AA858600
  ref <309>: DATABASE ENTRY DATE: 2000-03-03
tttttttttttttttttagtcagtactgcagcagctccgagtttaataattctcataggctctatataccttacagtcttgggaaacaaagtcacaagccagcagggtcaatggctgatggacattggacatctgtacctatctggaggcctccttgttccttcctccaagattaagagcattcagcccctcaccttgagcttcaagcatatcgcctcttacccttcatgagtcagcaggccagaaaatctgccagcagaccctggcctgacttgactgcctgataggcaggatttcacagaagcaggcaaaatggctcctgacagagagatgccagctagaaagggagtttgctttatttgccattccctgtanggctggtgtcctcaatgagatgcaggctttgggagttcctatacacctcagtgctctgtagaagctgaggacccttgacctcacaggtgtgatcactctgcangtggagatgtggccaattggttgggtgtcctcactcttgaagcaggtanggtccccatagagatcctcagatgtcagcacccagctctgcacactgct

SEQ ID NO: 11213 - DNA, 4227 bp, Homo sapiens
  ref <308>: DATABASE ACCESSION NUMBER: EMBL / D38496
  ref <309>: DATABASE ENTRY DATE: 2002-06-03
ttcctggaccgggcagcacgggggggcagatcggggctgcggcctggcaggcggcgcgcggtccaaggtagccccgagcgtggacttcgaccatagctgctcggacagtgtcgagtacctgacgctcaacttcgggcccttcgaaacagtgcatcgctggcggcgcctcccgccctgcgacgagttcgtgggtgcccggcgcagaagcacacagtggtggcctataaagatgccatttatgtatttggtggagacaatgggaagaccatgctcaatgacctcctgcggttcgatgtgaaagactgctcctggtgcagggcctttaccactgggaccccaccggccccccgttaccaccactcggccgtcgtctatgggagcagcatgtttgtctttgggggttacactggggacatttattccaattctaacttgaagaataaaaacgacctctttgaatacaagtttgcaactggccagtggacggagtggaaaattgaaggacggttgccagtcgctaggtcagcccatggggccacggtgtacagtgacaagctgtggatctttgctggctatgacggcaacgccaggttgaatgacatgtggacaattggcctccaggaccgagagctcacctgctgggaggaggtggcccagagtgggcgagatccccccatcttgctgcaacttccccgtggctgtgtgccgggacaagatgtttgtattctctgggcaaagcggagccaaaataaccaacaacctcttccagtttgaattcaaggacaagacgtggacacgcatcccaactgaacacctgctccggggctccccaccacccccgcagcggcgctacgggcataccatggtggcctttgaccgccacctctatgtgtttgggggtgcggccgacaacacgctgcccaacgagctgcactgctatgacgtggacttccagacctgggaggtcgtccagcccagctccgacagcgaggttggtggggctgaagtgcccgagcgagcctgtgcttccgaggaggtgcccaccctgacctatgaggagcgggttggcttcaagaagtcccgagatgtgtttggcctggactttggcaccacctcagccaagcagcccacccagcctgcctcggagctgcccagtgggaggctcttccacgcggctgctgtcatctcggacgccatgtacatcttcgggggcacggtggacaacaacatccgcagcggggagatgtacaggttccagttctcctgttaccctaaatgcacgctgcacgaggactacgggcggctgtgggagagccgccagttctgcgacgtggagttcgtgctgggtgagaaggaggagtgcgtgcagggccacgtagccattgtcacagcgcggagccgctggcttcgcaggaagatcacgcaggcgcgggagaggctggcccagaagctggagcaggaggccgccccagttcccagggaggcccccagcgtggctgctggtggggcccggccgcccctgctgcacgtggccatccgggaggccgaggcccggcccttcgaggtgctcatgcagttcctctacaccgacaagatcaaatacccacggaaaggccatgtggaggatgtgctgctcatcatggatgtgtacaaactggcactgagcttccagttgtgccgcctggagcagctgtgccgccagtacatcgaggcctccgtggacctgcagaacgtgctggttgtgtgcgagagtgccgcccggctgcagctgagccaactcaaggagcactgcctgaacttcgtggtaaaggagtcccacttcaaccaggtgatcatgatgaaggagttcgagcgcctctcctctccactgatagtggagattgtgcggcggaagcagcagccgccccctcgcactcccttggaccagccagtggacattggcacatctctgatccaggatatgaaggcatacctggagggagcgggcgcggaattctgtgacatcactctgttgcttgacgggcacccacggccagcccacaaggctatcctggccgcccgctccagctactttgaagccatgttccggtccttcatgcccgaagatgggcaggtgaacatctccatcggggagatggtgcccagcaggcaggccttcgagtccatgctgcgctacatctactacggcgaggtcaacatgccgcccgaggactcgctctacttgtttgcggccccctactactacggcttctacaacaaccggctgcaggcgtactgcaagcagaacctggagatgaacgtgacggtgcagaacgtgctgcagatcctggaggcagctgacaaaacgcaggcactggacatgaagcggcactgcctgcacatcattgtgcaccagttcaccaaggtctccaagttgcccaccctgcggtcgctgagccagcagctgctgctggacatcatagactccctggcctcccacatctcagacaagcagtgcgcagagctgggcgccgacatctgaggccctgtggcgcctgcccattgtgaagaatcgccgtgcctgcctgccctgcctactgagaagactaccggctatgcgcatgcctatggcagtgggtggcacctgccaggccaagggtcagggtgcccagagcctccaaagagagctgaggggatgtgggggccccaaactcattaattcactgaagacacaggtccacagggagcggatgatgaagcagaccccctccctgtcatcaccctctcctggtgtagtgtggatgcgaggccacggctcagtgatgggctcaccacccagaagtggggagagactttgggccctccacccagtggggcttggcctggcttctgtggcctgggcgtgttgtggactcagcactggggcctgtcacccaaggctcctccaacatgcgggaggaggcttagcagacttgcgctgcaccagcgaatctgcctgggctgctcctgtccctccctccctgagatccatgtaaggggcaccacaacccacctggaacttgtggtggggacccatgatgtatgggtctcacctgacttgaggtgaattttggagtgaagggccctgaggtcagctcccaggtcggtcgtgctgggccaggcctggttttcacaggggctgaaggatcccagtcacctgtgtgcatgtcaagtggctcgggccgggaagaagccagcaaagtcccccgtgtcccttgctgagtattctgtcacagacaagcctccattaaagccacagcagtgctacccaccacacacaccttgctggcccggccaccactgctggcttcagccccttgagcagcccatggcttagcagaaccccagatgtaggtcagtggccttacctgtctctatccatgctgtcaactcctgcctccacctggggtcacccagtcacattgggaagggctgtgaaggcctccaggctggccttccagggaatcctgaggcctggggtggctcctgccccttctgccctgccttgcccctgcactatgctcttggctcctgtggaaggagggctgccctcttgccctagtgagggccccatgtggatccactctagtgctggagccagcgctcccttactgggaacaggattccaggacccctttcttgttgtggctgccatgaagccacagctccttggggaagtgacctgctctcctttgggtgtatgcaggtgtgtggggggccctgagtggcaagttgcttagctaacaggagatccataggcagcctgcaggctaggaagtggcctagtgcaagatgagctgggaacaagggaagagagagcaggagctggggcagaggctgagccgggaggcccttgaggtgaggacacagcaggcccaggaccatggctggggaggatatgtcagcacctggaagtggagtgcaggctgcagcgcccagccatgtgggccaggtgcattcactcagagtggggccacacacccatctacccagtttccacaagatgtggctcctgccacacccacagggcagcctcctccaaatccctcctggaggggcctacccagaagcctccttgaaccagtctgcaaccctgctctatgctgacccttgtcactgaaccctgatctagacttatatgaataaatgaaattacatgccaagggccctaaaaagcaaattttacaaaattgtgtgccagtttctggg

SEQ ID NO: 11214 - protein, 553 aa, Homo sapiens
  misc_feature (1)..(553): Xaa=Unknown amino acid
MVAFDRHLYVFGGAADNTLPNELHCYDVDFQTWEVVQPSSDSEVGGAEVPERACASEEVPTLTYEERVGFKKSRDVFGLDFGTTSAKQPTQPASELPSGRLFHAAAVISDAMYIFGGTVDNNIRSGEMYRFQFSCYPKCTLHEDYGRLWESRQFCDVEFVLGEKEECVQGHVAIVTARSRWLRRKITQARERLAQKLEQEAAPVPREAPSVAAGGARPPLLHVAIREAEARPFEVLMQFLYTDKIKYPRKGHVEDVLLIMDVYKLALSFQLCRLEQLCRQYIEASVDLQNVLVVCESAARLQLSQLKEHCLNFVVKESHFNQVIMMKEFERLSSPLIVEIVRRKQQPPPRTPLDQPVDIGTSLIQDMKAYLEGAGAEFCDITLLLDGHPRPAHKAILAARSSYFEAMFRSFMPEDGQVNISIGEMVPSRQAFESMLRYIYYGEVNMPPEDSLYLFAAPYYYGFYNNRLQAYCKQNLEMNVTVQNVLQILEAADKTQALDMKRHCLHIIVHQFTKVSKLPTLRSLSQQLLLDIIDSLASHISDKQCAELGADIX

SEQ ID NO: 11215 - DNA, 1751 bp, Rattus norvegicus
  ref <308>: DATABASE ACCESSION NUMBER: EMBL / AF296131
  ref <309>: DATABASE ENTRY DATE: 2000-09-05
gaagattgggccgcgacgaggtgcgggccgaagccatgggcgaccgcggaggcgcgggaagctctcggcgtcgcaggaccggctcgcgggtttccgtccagggaggtagtgggcccaaggtagaagaggacgaggtgcgagaagcggctgtgagccccgacttgggcgccgggggtgacgcgccggctccggctccggctccagcccatacccgggacaaagaccggcagaccagcgtgggcgacggccactgggagctgaggtgccatcgtctgcaagactctttgttcagctcagacagcggtttcagcaattaccgtggtatcctgaattggtgcgtggtgatgctgatcctgagtaatgcaaggttatctttagagaatcttatcaagtatggcatcctggtggatcccatccaggtggtgtctctgtttctgaaggacccctacagctggcctgccccatgcttgatcattgcatccaatatctttattgtggctacatttcagattgagaagcgcctgtcagtgggtgccctgacagagcagatggggctgctgctacatgtggttaacctggccacaattatctgcttcccagcagctgtggccttactggttgagtctatcactccagtgggttccctgtttgctctggcatcatactccatcatcttcctcaagctttcttcctaccgggatgtcaatctgtggtgccgccagcgaagggtcaaggccaaagctgtgtctgcagggaagaaggtcagtggggctgctgcccagaacactgtaagctatccggacaacctgacctaccgagatctctattacttcatctttgctcctactttgtgttatgaactcaactttcctcgatccccccgaatacgaaagcgctttctgctacggcgggttcttgagatgctctttttcacccagcttcaagtggggctgatccagcagtggatggtccctactatccagaactccatgaagcccttcaaggacatggactattcacgaatcattgagcgtctcttaaagctggcggtccccaaccatctgatatggctcatcttcttctattggcttttccactcatgtctcaatgctgtggcagagctcctgcagtttggagaccgcgagttctacagggactggtggaatgctgagtctgtcacctacttttggcagaactggaatatccccgtgcacaagtggtgcatcagacacttttacaagcctatgctcagactgggcagcaacaaatggatggccaggactggggtcttttgggcgtcagctttctttcatgagtacctagtgagcattcccctgaggatgttccgcctttgggcattcacagcaatgatggctcaggtcccactggcctggattgtgaaccgcttcttccaagggaactatggcaatgcagctgtgtgggtgacactcatcattgggcaaccggtggctgtgctcatgtatgtccacgactactacgtgctcaactatgatgccccagtgggggcatgagctactgccaaaggccagcctccctaacctgggcctggagttctggagggcttcctgctgctgcacactcccctagtttggaggcctttctgcccctatggggcctactcctgctcttggggatggccctgagccagctggttgagccagtgctgggagtttgtgctgaccaggggcttaggatatcaataaagagctatctaaaaaaaaaaaaaaaaa

SEQ ID NO: 11216 - protein, 498 aa, Rattus norvegicus; identical to SEQ ID NO: 4942
  ref <308>: DATABASE ACCESSION NUMBER: SWISS-Prot / Q9ERM3
  ref <309>: DATABASE ENTRY DATE: 2002-06-15

SEQ ID NO: 11217 - DNA, 863 bp, Homo sapiens; identical to SEQ ID NO: 4943
  ref <308>: DATABASE ACCESSION NUMBER: EMBL / BI521353
  ref <309>: DATABASE ENTRY DATE: 2001-08-30

SEQ ID NO: 11218 - protein, 488 aa, Homo sapiens; identical to SEQ ID NO: 4944
  ref <308>: DATABASE ACCESSION NUMBER: Refseq / XP_035370
  ref <309>: DATABASE ENTRY DATE: 2002-08-01

SEQ ID NO: 11219 - DNA, 529 bp, Rattus norvegicus
  misc_feature (1)..(529): n=a, c, g or t
  ref <308>: DATABASE ACCESSION NUMBER: EMBL / AA859545
  ref <309>: DATABASE ENTRY DATE: 2000-03-03
tttttttttttttttttccctcccaaacagcttttaatagttttacttcagctggaagatgtagtcagagaataagttacaggaacagacaaaaacagaaaataagaaaacagaacttaaagtgcttcaggctgccaacgtaaacataaggggcacaaagaggcccacttagctatgtccccaacccctgagacaggagagtcattgtcattgtcgtgggtccctttaccactaccaccctctaatcttggccctgtaggtgggtgcaaaggaattttagcggcagagaggattggacacgaatgagagagaatactctgtaaactcgggacgacgtgaaggatcggggcgaaggagctcctgcagcctttgccctgctggggtggggccaggactttacactcacgcttggcaatcttgtctagagaaagcacagccttgtccgggggcaggtanaggggacgaccgacaggggaggccacagggggggtgatggccctgcgttccatcacactgcctgacctcatga

SEQ ID NO: 11220 - DNA, 1617 bp, Homo sapiens
  ref <308>: DATABASE ACCESSION NUMBER: EMBL / AK001787
  ref <309>: DATABASE ENTRY DATE: 2002-08-06
ttacctgtcatgcccgatggctctgtgctgctggtggacaatgtctgtcaccagtctggggaagtctccatgggctccttctgccgcctacccgggacctctggctgcttcccctgcccgctgaatgccctggaggaacacaacttcctgtttcagctgagagggggtgagcagccccctccaggggccaaggagggcctggaagttcccctgattgctgtggttcagtggtctaccccaaagctgcccttcactcagagcatctacacccactaccgcctgcccagtgtccgcttggaccgcccgtgttttgtgatgaccgcttcttgtaagtcccctgttcggacctacgagcgtttcactgtcacctacacgctgcttaacaatctccaagacttccttgctgtgaggctcgtgtggaccccagagcatgcacaggctgagtggctttgagaatcagatgagactgtgctggcgaaggccctgtgggaatgaggaacgctgtagtgtttgctggtccctgtttctgcccccaggaaagcagctgtgtgaggaggagcgccgggccatgcaggctgccctggactccgtcgtctgccacacgcccctcaacaaccttggcttttcccggaagggcagcgcgctcaccttcagtgtggccttccaggctctgaggacggggctcttcgagcacatgaaactgaagctgcagttcaccgccagcgtgtcccaccctccacccgaggcccggcccctctcccgcaagagcagccccagcagccctgctgtccgggacttggtggagaggcatcaggctagcctgggccgctcccagtccttctcccaccagcagccttcccgaagccacctcatgaggtcgggcagtgtgatggagcgcagagccatcacgccccctgtggcctctcctgttggccgccccctctacctgcccccggacaaggctgtgttgtctctggacaagattgccaagcgcgagtgcaaggtcctggtggtggaacccgtcaagtagcaccgtgccagctctgtttcctcttacactccagagacccaacgcccccagaggggatccctgctcccgggctgtgcctcccctgggatgcctcccagacgggggtgaagaggcctggcagagctgcctgtcttgtgtctgctgatgagggatgggggaagaagctgtgaagtgggcgggcatggctgggactaagccaccagtattccccgagttcctgtggggggggctggccccacccctaggccagggcaagggttcccagagctcccttgtccccggccctttaccctggttctgagtttacaaagtctcttcctcattcccgttgagttctttcccacctctgacattccctccctccctcccgcagggctgagattagagggtggtgatggctaagggcccctgacagtgaccttcctgtctcaggggttggggacagggccaggtagcctcctgccccttatgtttacgtttgcagcctgaagcactttaatttttttttttttggtctgttcctgtaacttattttccaactattgcttccaactgaaataagactattaaatgcctgttcaggaggg

SEQ ID NO: 11221 - protein, 200 aa, Homo sapiens
  misc_feature (1)..(200): Xaa=Unknown amino acid
MHRLSGFENQMRLCWRRPCGNEERCSVCWSLFLPPGKQLCEEERRAMQAALDSVVCHTPLNNLGFSRKGSALTFSVAFQALRTGLFEHMKLKLQFTASVSHPPPEARPLSRKSSPSSPAVRDLVERHQASLGRSQSFSHQQPSRSHLMRSGSVMERRAITPPVASPVGRPLYLPPDKAVLSLDKIAKRECKVLVVEPVKX

SEQ ID NO: 11222 - DNA, 546 bp, Rattus norvegicus
  misc_feature (1)..(546): n=a, c, g or t
  ref <308>: DATABASE ACCESSION NUMBER: EMBL / AA859652
  ref <309>: DATABASE ENTRY DATE: 2000-03-03
tttttttttttttttttaaataaaaagccacaaatttattgtaaatctagaagtaccagaacgtcactcatacagatcagcgatcctgtggtggttttcgtttttgttttccccacccttcccaacattggcacccctgattgttgacagactgaaaaggacacacgttttcctgtctcatgcagtagacgagagcagacccctcagaaaccagttataaatattaaaccatctcgaacattcgtagtacaaaatcgcttgtaaagtgctaaagtcagataacacctgcaaaccgaccctcgagcctagagcatttatttctcgggggcagccccacagagcttgccacatccatctcatttcactcgagtctgctctttcggacagacacgttgtcttccagtcactcgccctcccccaagttttacagattgtcctactagttctatggctgataagatgctgtattaaacgtggcgggtggtgacgcacctcaccacttccgtctcagtgcanagaagagattcaagcttgtgtgtacctgta

SEQ ID NO: 11223 - DNA, 478 bp, Homo sapiens
  ref <308>: DATABASE ACCESSION NUMBER: EMBL / AI658971
  ref <309>: DATABASE ENTRY DATE: 1999-12-21
gttgttggtgtttgttttattttttatttttggagtcacactacatgtatagtattgctcacgttacagttttctgtaaagaggacaagtgtcaggataataggtggactttttactcacctattttactgcaatctcaccctgcaggtgacggtcaatgctcgctgctccatctttactcatcattaatgttaatttatgacaactcgggggaaaaacataacaagcctagtttggttacaggtacacacaagcttgaatatttctctgcactgaaatgaaagtggcatagttcatcaccacctgctacattttgtagagcatcttaccagccatagaaataggacaatctataaaactttggggagggtgggggaggaaatgacacagtgtctgtcaaaaacaggcataatctaaaacaaggtggatatagcaaatctctgccactgcttgagaagaactttgagcttgtggcagt

SEQ ID NO: 11224 - DNA, 436 bp, Rattus norvegicus; identical to SEQ ID NO: 4966
  ref <308>: DATABASE ACCESSION NUMBER: EMBL / AA859690
  ref <309>: DATABASE ENTRY DATE: 2000-03-03

SEQ ID NO: 11225 - DNA, 3732 bp, Rattus norvegicus
  ref <308>: DATABASE ACCESSION NUMBER: EMBL / AB024566
  ref <309>: DATABASE ENTRY DATE: 2000-01-31
gcgggtgcgggcgcgcgcggctgcggggcgctgtggcgggggccgggctgtacgctagccgagccgggatcggggcggggagcagccacggcgccgccgaggcccggggcccgcgacgctgcgcacagcctgggcgccgagtagccgggccgggccggacgcgggcggcggtggcggcggcggtggcggagcagctgcgccccccgccctcccaaggcccggcgcccgggccgctggcgatggtgacacatgcggcggcggcgcgccggcggcaggaccatggttgagcgcgccagcaagttcgtgctggtggtggcgggctcggcgtgcttcatgctcatcctttaccagtacgcgggcccggggctgagtctgggcgcgcccggtggccgcgtgccccccgacgacctggatctcttccccacgccggacccacattacgagaaaaagtactacttcccggtgcgcgagctggagcgctcgctgcgcttcgacatgaagggcgacgacgtgatcgtcttcctgcacatccagaagaccggcggcaccaccttcggccgccacctagtgcagaacgtgcgcctcgaggtgccctgcgactgtcgcccgggccagaagaagtgcacctgctatcggcccaatcgccgcgagacctggctcttctctcgcttctccacgggctggagctgcgggctgcacgctgactggaccgaactcaccaactgtgtgcccggtgtgctagaccgccgcgacccagcaggtctgcgttcgcccagaaagttctactacatcaccctgctgcgagaccccgtatcccgctacctgagtgaatggcgacatgtacagcgtggggccacgtggaagacctccttgcacatgtgtgacgggcgcacaccgaccccagaggagctgccgccctgctacgagggcacagactggtcgggctgcacgttgcaggagttcatggattgcccctataacctggctaacaaccggcaggtgcgcatgctggccgacctcagcctggtgggctgctacaacctatctttcatccccgagagcaagcgggcccagttgctgctggagagcgccaagaagaacctgcgaggcatggccttcttcggcctcactgagttccagcgcaagacgcagtacctatttgagcggacgttcaacctcaagttcatccggccattcatgcaatacaacagcacgcgggcgggcggtgtggaggtggatgaggacactatccgccacatcgaggagctcaacgacctggacatgcagctgtatgactatgccaaggacctctttcagcagcgttaccagtacaagagacagctggagcgcagggaacagcgcctgcgcaatcgcgaagagcgcctcctgcaccgctccaaggaagcgctgccacgggaggacccagaagagccgggccgtgtgcccaccgaggactacatgagccatatcattgagaagtggtagtagtgtcaggggcagagagtgatgggcacgatttaacagggaaagaaatggggccaacagttcttcctgttcggtgcagcgggtgctagtaggatgccctagtccttgatggggcagggtaggacctctggggcagatggcctccctgctcttctggcccccatgtcatagttaaaactgacaagatttgaaaaagactggcgagggaacgtgtctgcttagccgagactcccatacctactatgcacgcactggcccccaacgaccagccccctaggaacgtgttactagctcctaatagcttggttgaagctccttggcctctgaggacccctaataacccagaatgcttggggagccctttcctttgagaatacaagcatgtctctgaggcatcctcagacctggagtgctccccaacccccacctatcaaagctgctttcaaggtcagggtcagccccagctgtggcagagaagactcaagtctggtgcctggcctctgcactgtctggagcatgatcagaatccacggtgtatcctggctttaggggaaccaggttcaagcaggaaagggatggacaccaagaggtcttccccccacccccagctccccaccaatccctatgctttctgatgcactgcccctcccccatcactgaaacatttatacaagggcttgtgtgccaatgttcctaccataccagcaactctttctatcccgtgaataaaagcatcccttggctgggatatagggccacatcaacctgagttggtactgggtggccaggatggggactttcccattctcagctgaggttggaagaaaccactctgggtgtcctttctgggacctgtctgcataaccctccccatcctggctctcctgcatcttcttaccctttacaaagtctgacccggccatttccagcagacctgtgagccagccagggaccggactagaagccatgttgcatattggggtttttgtttgtttgttttttaagcacttaccaagtgccctatccctggcaggcccctagtgggggtgtcgtggcttttttcagagtctataagcatgcagccatgggttgtgagctgaccttgagacaggacgggtcccacactccctgcctctgtctcactcaacactcaggctaagaaggagcgggtcaccacagacaagagtggggccatatgtagcacagcaatattccagatgctggtgggtattgctgctgccctagagcaatggcttaatcttcacacatgtgtggtgtggcaccaggcacttgaccttggggggtctacaagcaagatgagttctgataggcacagtccagcccagtctagcaccaccttttatggtagttgatcactctgaggaggtgggtagcaagatgaattaggaggtcaaggtcactgagaggaatttgtttagatgcccagtttagagtgaatagatatctgcggggaacctggggcattttggggaaccctggggtcttttacaggtcatgttggttgctgctgcttctgtcaggaagtaccctagctccacgtactccccgccccccgccgcccccttcacaaccttatgtgtacatgacctgaacataggatctgttctatacatactggaatatgttttaacatatgccccaccatcctgactcacacggaagcacgggtctcttctcaatctttgctgcatttggaaaatgttccctcccatctcaggccagcgccatgtcgaggcatcttcagtccacccctgcctaaggctcaggctacctgctttggggcacagcttcctggtactcacagcatctcagaatagggtgcttccctctgcctccagctccaaggactctgcctacaggagtgtgccttggggctgaaaggccatgcaaacacaacaaactaataactcagtcccaaagcaccctgcagccctgcagacaccccccccctccaagagtgggaggcagggaccacagaactgtccagccaacacgtctgaactggaactgttccacttgaacccgggagctttaaagctttatttatttatagcttcttattaaaaatttaaaaaaagcgttgaggaggaatcctttggttattcatacggaattgatgatggaaaagcaactggttgtcttctaattgtctttgtctagatggaaactgaaccttagcagatgaataaaccctgaaaaggtcaaaaaaaaaaaaaaaaaaaaaaa

SEQ ID NO: 11226 - protein, 401 aa, Rattus norvegicus; identical to SEQ ID NO: 4978
  ref <308>: DATABASE ACCESSION NUMBER: SWISS-Prot / BAA89248
  ref <309>: DATABASE ENTRY DATE: 2001-12-01

SEQ ID NO: 11227 - DNA, 2055 bp, Homo sapiens; identical to SEQ ID NO: 4979

SEQ ID NO: 11228 - protein, 401 aa, Homo sapiens [sequence omitted]

SEQ ID NO: 11229 - DNA, 472 bp, Rattus norvegicus
  misc_feature (1)..(472): n=a, c, g or t
  ref <308>: DATABASE ACCESSION NUMBER: EMBL / AA859804
  ref <309>: DATABASE ENTRY DATE: 2000-03-03
tttttttttttttttttggtttagcaccatttatttgtgatctcagctgttgtagtagttgctgctgtcagcctgttctcaaaggtaacatgctcttccgttcctcttgtccaggacagaagggtcttccaggtggcacgccaacagaacaagagactccgatgacgccagcttcaatgatggtgccatccagagagggagagtgtcatggcacattcaatcgcggcttccagaggttttgaaaaaggagcctttgggggcccagcctgcctggcattttgatgctgtcggtgtgagttttgtattccataatggtgttgggaggtangttaagcacgcgccgaagagtgtcccggattcgggctgtggttgcttggtcgctggcagtcttattccatatagaaataatgtcctcctggaagcggacagagaccacagccccgcagatttcctccccaaccatgaactgttc

SEQ ID NO: 11230 - DNA, 995 bp, Homo sapiens
  ref <308>: DATABASE ACCESSION NUMBER: EMBL / BC005392
  ref <309>: DATABASE ENTRY DATE: 2001-07-13
actccctgaggcagtggcgacagcggcggcgagaggatgaacaacaagttcgacgctttgaaagatgatgacagtggggaccatgatcagaatgaagaaaacagcacacagaaagatggtgagaaggaaaaaacggaacgagacaagaatcagagcagtagcaagagaaaggctgttgtccctggaccggcagagcatcccctgcagtacaactacactttttggtactccaggagaacccccggccgtcccacgagctcacagagctatgaacagaatatcaaacagattggcacctttgcctctgtggagcagttctggaggttttatagccacatggtacgtcctggggacctgacaggccacagtgacttccatctcttcaaagaaggaattaaacccatgtgggaggatgatgcaaataaaaatggtggcaagtggattattcggctgcggaagggcttggcctcccgttgctgggagaatctcattttggccatgctgggggaacagttcatggttggggaggagatctgtggggctgtggtgtctgtccgctttcaggaagacattatttcaatatggaataagactgccagtgaccaagcaaccacagcccgaatccgggacacacttcggcgagtgcttaacctacctcccaacaccattatggaatacaaaactcacaccgacagcatcaaaatgccaggcaggctgggcccccaaaggctcctttttcaaaacctctggaagccgcggttgaatgtgccatgaccctctccctctctggatggcaccatcattgaagctggcgtcatcggagtctcttgttctgttggcgtgctacctggaagatccttctgtcctggacaagaggaattggaagagcattttatgttttaagaacaggctgacacgcagcagctacaacaacagctgagatcacttaataaatggtgctaaaccaaaaaaaaaaaaaaaaaaaaaaaaaaaaa

SEQ ID NO: 11231 - protein, 246 aa, Homo sapiens
  misc_feature (1)..(246): Xaa=Unknown amino acid
MNNKFDALKDDDSGDHDQNEENSTQKDGEKEKTERDKNQSSSKRKAVVPGPAEHPLQYNYTFWYSRRTPGRPTSSQSYEQNIKQIGTFASVEQFWRFYSHMVRPGDLTGHSDFHLFKEGIKPMWEDDANKNGGKWIIRLRKGLASRCWENLILAMLGEQFMVGEEICGAVVSVRFQEDIISIWNKTASDQATTARIRDTLRRVLNLPPNTIMEYKTHTDSIKMPGRLGPQRLLFQNLWKPRLNVPX

SEQ ID NO: 11232 - DNA, 517 bp, Rattus norvegicus; identical to SEQ ID NO: 4994
  ref <308>: DATABASE ACCESSION NUMBER: EMBL / AA859827
  ref <309>: DATABASE ENTRY DATE: 2000-03-03

SEQ ID NO: 11233 - protein, 105 aa, Rattus norvegicus; identical to SEQ ID NO: 4995
  ref <308>: DATABASE ACCESSION NUMBER: SWISS-Prot / BAA83085
  ref <309>: DATABASE ENTRY DATE: 2002-10-01

SEQ ID NO: 11234 - DNA, 437 bp, Homo sapiens; identical to SEQ ID NO: 4996
  ref <308>: DATABASE ACCESSION NUMBER: EMBL / BF745219
  ref <309>: DATABASE ENTRY DATE: 2001-08-31

SEQ ID NO: 11235 - protein, 84 aa, Homo sapiens; identical to SEQ ID NO: 4997
  ref <308>: DATABASE ACCESSION NUMBER: SWISS-Prot / P04155
  ref <309>: DATABASE ENTRY DATE: 2002-06-15

SEQ ID NO: 11236 - DNA, 503 bp, Rattus norvegicus; identical to SEQ ID NO: 5000
  ref <308>: DATABASE ACCESSION NUMBER: EMBL / AA859837
  ref <309>: DATABASE ENTRY DATE: 2000-03-03

SEQ ID NO: 11237 - protein, 71 aa, Rattus norvegicus; identical to SEQ ID NO: 5001
  ref <308>: DATABASE ACCESSION NUMBER: SWISS-Prot / P36577
  ref <309>: DATABASE ENTRY DATE: 1999-07-15

SEQ ID NO: 11238 - DNA, 1630 bp, Homo sapiens; identical to SEQ ID NO: 5002
  ref <308>: DATABASE ACCESSION NUMBER: Refseq / NM_004293
  ref <309>: DATABASE ENTRY DATE: 2000-11-01

SEQ ID NO: 11239 - protein, 454 aa, Homo sapiens; identical to SEQ ID NO: 5003
  ref <308>: DATABASE ACCESSION NUMBER: SWISS-Prot / Q9Y2T3
  ref <309>: DATABASE ENTRY DATE: 2002-06-15

SEQ ID NO: 11240 - DNA, 520 bp, Rattus norvegicus
  ref <308>: DATABASE ACCESSION NUMBER: EMBL / AA859898
  ref <309>: DATABASE ENTRY DATE: 2000-03-03
tttttttttttttttttaacaagtctttttttatttgtggattttttacatgtatcctacagtcttgttttatataagatcatacactgcagctgacaatgtggtgattggacaaccaagacaaacagcacttcccagattggctgtaacaatcaccccacaccatgctgctggtgtgttctccctcggcaggcttcaccaccacagcacagcaccgcacagcacagtctcaggatggatggttagacagcacagcattgctgtctcagggtggatggttagacagcacagcaccgccgtctcagggtggatggttagacagcacatcactgccgtctcaaggtggatggttagacagcacagcactgctgtctcagggtggatggttagacagcacagcattgccgtctcagggtggatggttagacagcacagcattgctgtctcaaggtggatggttagacagcacagcattgctgtctcagggtggatggttagacagcacagcattgctgtctca

SEQ ID NO: 11241 - DNA, 370 bp, Rattus norvegicus
  ref <308>: DATABASE ACCESSION NUMBER: EMBL / AA859899
  ref <309>: DATABASE ENTRY DATE: 2000-03-03
ttattttttttttttttaacttccaagtttttattttgttttgtttgttgtgtgtttgtttgtttgtttgtttgtttgtttttgagacagggttggcctcaaactcactgacatcagcctgcctctgcctcccaagtgctgggattcaaagcaggcgccaccaccactacctgactcatttctttaactttcaaaagtagatatctcctgagaaatgacacccagcactgtcttctggcccctccacgaccccatgtacaaacacatgcctgcataaacacacatgaatacataagtaacctggtctggctgttttggaatatatgctatgatttggattggtcccccgaggcactattggaagatagta

SEQ ID NO: 11242 - DNA, 548 bp, Rattus norvegicus
  ref <308>: DATABASE ACCESSION NUMBER: EMBL / AA859909
  ref <309>: DATABASE ENTRY DATE: 2000-03-03
tttttttttttttttttctcatcagtcctttattagtacacatcagacggggccaccctgccaaaggaggagtctttcctccatcagtgtgagtccccgcatgaaggcccatgaggacattgttgtcactgctgggacattgactaggtgagctgagcctcatgaactgaaggacgacatctacaccagtttggctactgaatgacagctcttttcaacaagacagaaaacagttttcagcttaacatgcaggaggccaagtgacctgtgtggagtctgccccacagctctccgtgcacgtggcctccctccccatttcccagaaatccctgttgtgcgtaaatgccgaggccaggactgtgttcccaggggagagagatggcattggctgatgcagggccacaggtgttccacactttgtcccttagtggccactggcagaacttttagccaaaagcaatccgtattgaccagcagattaagctggaggttttgcatttattcagtttttccaacaccaaaggcatggcgggcaagctcgtccatca

SEQ ID NO: 11243 - DNA, 464 bp, Rattus norvegicus; identical to SEQ ID NO: 5016
  ref <308>: DATABASE ACCESSION NUMBER: EMBL / AA859911
  ref <309>: DATABASE ENTRY DATE: 2000-03-03

SEQ ID NO: 11244 - protein, 350 aa, Rattus norvegicus; identical to SEQ ID NO: 5017
  ref <308>: DATABASE ACCESSION NUMBER: SWISS-Prot / Q11205
  ref <309>: DATABASE ENTRY DATE: 2002-06-15

SEQ ID NO: 11245 - DNA, 1623 bp, Homo sapiens; identical to SEQ ID NO: 5018
  ref <308>: DATABASE ACCESSION NUMBER: EMBL / X96667
  ref <309>: DATABASE ENTRY DATE: 1997-09-12

SEQ ID NO: 11246 - protein, 351 aa, Homo sapiens; identical to SEQ ID NO: 5019
  misc_feature (1)..(351): Xaa=Unknown amino acid

SEQ ID NO: 11247 - DNA, 3540 bp, Rattus norvegicus
  ref <308>: DATABASE ACCESSION NUMBER: EMBL / BC011490
  ref <309>: DATABASE ENTRY DATE: 2002-09-22
atgatatggcctggactcaaagtcacgcttgcagactctggatgggctgcagagagacagggccttgaagaagccagctccttgtagtccaacagaaaccaggaccctctgaagccatggccccctcccatcctgctttccagttctggatacatctttatctctggtgtctgcttctgatgccagcagtgttggcccagcaaggctcgcacacccatgccgaggaccgcctgttcaaacacctctttggaggctacaatcgctgggcacggccagtgcccaacacttccgatgtggtcatcgtgcgctttggactatccattgcacagctcatagatgtggatgagaagaatcaaatgatgaccaccaatgtctggctaaagcaggaatggaatgactacaagctgcgctgggacccggctgagtttggcaacatcacctccctccgcgtcccctcagagatgatctggatcccagacattgttctctacaacaatgcagacggggagtttgcggtgacccacatgaccaaggcccacctcttcttcacgggcactgtgcactgggtgcccccagccatctacaagagctcctgcagcatcgacgtgactttcttccccttcgaccagcagaactgcaagatgaagtttggctcctggacatacgacaaggccaagatcgacctggagcagatggagcggacggtggacctgaaggactactgggagagcggcgagtgggccattatcaacgccaccggaacctataacagcaagaagtacgactgctgcgcggagatctaccccgacgtcacctactacttcgttatccgccggctgccgctgttctacaccatcaacctcattatcccgtgcctgctcatctcctgcctcaccgtgctcgtgttctacttgccctctgagtgtggagagaagatcacgctgtgcatctcggtgctgctctccctcactgtcttcctgctgctcatcacagaaattatcccatccacctcactggtcatcccactcatcggcgagtacctgctcttcaccatgatcttcgtcaccctctctattgtgatcacagtcttcgtgctcaatgtccaccaccgttcccctagcacgcacaacatgcccaactgggtgagggtggccctgctaggccgggtgccccggtggctgatgatgaatcggcccctgccgcccatggagctccatggctctccaggtctgaagctcagccccacttatcattggctggagaccaacatggatgctgaagaaagggaggagacagaggaagaggaggaggaggaagaagatgaaaacatatgtatgtgtgcaggcctcccagactcttccatgggtgtcctctatggccatggcagcctgcatctgagggccatggggcctgaggccaagactccatcccaggctagtgagatcctgctgtcacctcaaatacagaaagcactagaaggtgtacactacattgctgaccacctgaggtctgaggatgctgactcttcggtgaaggaagattggaagtatgtggccatggtggtagaccggatcttcctctggctgttcattatcgtctgcttcctggggaccatcgggctcttcctccctccgttcctggctggaatgatctgacttgatgtccctcatgttggctccaaggtggcctggacaaccatcttctgctcttctgtgactggagccatctctagaatattcttttgacttaatgccacctgcctgcgatgtttctacgaggcccctgatctagcctggacttcatatcctccttgtcaacagttcatggtgccattgcggtgacaagcactgagaccactcaacatgacaactatttagggatgctgaggaactagaagaggtgaaggctgctctgtaggtgatgacaacatggtggtgatatggggggagagcaagatagttctgaaagagcatataggagttgtctatggcaaaagggtcaaacaaagggatggaggggtcagaccaggacaaagggaaatagaacactggcccaaagatgggcacaaggggacaatgggagtgcctggtgtggaagagttctgcacaacactgtggattcagaatgtcagagaggacagccagctggggtggggaggctgggaggcaagttgggatatttttgacccaggcccaagaagaagctcagagtctgcactgaacctgtctctatgcactttgcaggaaatgtcagagggacaggggtacttcccaaaggagtggggcacaaagaaagttctagagcagtggctttcaacctgtgtcgtgggttgcaacccttcagggagtcaaacgaccctttcacaggggtcacatatcagatatcctgcatatcagatgttttacatgacagtccataacaatatcaaaattactgttatgaagttgaaatgaaaacaattttgtggttggggtcacaacatgaggaactgtaaagggtcatagcattaggaaggttgagaaccactgatctaggtgccctggtggatgcttgaggcagaatagcaacattgggtataagttgctgggccattattcaaccaaaagcactttggagccttcaagttcccctcagtgtcatgtctcactgttctatgctacaaaaaaagaggtatagcaatttctacaagggatcagggctaccttcaaatcaagaggacaaagtaagaaggcagtctccaatgttggcacccttcttgctgtccacagggacctggtcctcaattcctggctctgtcagcatgcctcacataggaactgagatctttgcatcaagctctttcaattgtgtgctccttcagggcagagtctctgctcttgttgctttcactcatcctgagctgggtgagagagctcagtagctggaccctccatcgtgagtagtggagagaaaccaacctggtagctttaggctccagaactgctacataataccaaagctttgggggaggactcttccccagtcttcccagggccccatcaggtgactaacctgctctgaactgtcctgtgtagcttgttcttttacttgtaatattccacgacccttcattgcatagaagcccagcggattgggcctttcagaacattctgcagtccccaaggaattaggtcccagacgctaacagcaatgagattcagggtcactaagagatatagagaccaagtttgttctctgtcttggggtgctctccttccgaaccccacacacagcacctcgacagacctaggagatctgcttgtcggaggccttacccagacttcctgttaccagttctaatgatacccactcagtctcaggccttggctccccctttctccactgaatgcagccggcacctcttttctctgtgtcaaaccccaagacatgatttcctcatgcagagatgcttgttggatgatccctaccccccatcctccttgcatgtgagtgaaatgtcaaaataaagctaaaatgtctgccgtcaaaaaaaaaaaaaaa

SEQ ID NO: 11248 - protein, 512 aa, Rattus norvegicus; identical to SEQ ID NO: 5058
  ref <308>: DATABASE ACCESSION NUMBER: SWISS-Prot / AAH11490
  ref <309>: DATABASE ENTRY DATE: 2003-02-01

SEQ ID NO: 11249 - DNA, 2664 bp, Homo sapiens; identical to SEQ ID NO: 5059
  ref <308>: DATABASE ACCESSION NUMBER: Refseq / NM_000742
  ref <309>: DATABASE ENTRY DATE: 2000-10-31

SEQ ID NO: 11250 - protein, 529 aa, Homo sapiens; identical to SEQ ID NO: 5060
  ref <308>: DATABASE ACCESSION NUMBER: SWISS-Prot / Q15822
  ref <309>: DATABASE ENTRY DATE: 2002-06-15

SEQ ID NO: 11251 - DNA, 607 bp, Rattus norvegicus; identical to SEQ ID NO: 5061
  misc_feature (1)..(607): n=a, c, g or t
  ref <308>: DATABASE ACCESSION NUMBER: EMBL / AA860015
  ref <309>: DATABASE ENTRY DATE: 2000-03-03

SEQ ID NO: 11252 - DNA, 374 bp, Homo sapiens; identical to SEQ ID NO: 5062
  misc_feature (1)..(374): n=a, c, g or t
  ref <308>: DATABASE ACCESSION NUMBER: EMBL / F34867
  ref <309>: DATABASE ENTRY DATE: 1999-05-08

SEQ ID NO: 11253 - DNA, 6922 bp, Rattus norvegicus
  ref <308>: DATABASE ACCESSION NUMBER: EMBL / Y17793
  ref <309>: DATABASE ENTRY DATE: 1998-10-01
ggcacgaggctcttcacaaacccggagcatagggaagacaaaccttgggctttttctttgcaaagggattgacaagcctccggaaaggtcgacgagaaactgccctgcaaactcttggacggattgactcacgttgcttatattaagcctttgtgtgtagggtgtatggtgtgtggcttccataaatttggagatctccgcttctgctcccttctcttggcatgagactgtatgcaggacctacccgaggacaatgatcgcggagcctgctcacttttacctctttggattaatatgtctctgttcaggctcccgtcttcgtcaggaagattttccaccccgcattgttgaacacccttcagacctgatcgtctccaaaggagaacctgccactctgaactgtaaagccgaaggccgccccacccccactatagaatggtacaaaggtggggaaagagtggagaccgacaaagatgacccgcgctcacaccggatgctgctgccaagcgggtctttatttttcttacgcatagtccatggacggaagagtaggcccgacgaaggggtctacatctgtgtggctaggaattacctcggagaggctgtgagccacaacgcatcgctggaggtagctatactacgggatgacttcagacaaaacccttcagatgtcatggtggcagtaggcgaacctgcagtcatggaatgccagcctccacggggccatccagagcccaccatctcctggaaaaaggatggctcacccctggatgataaagatgaaagaatcactatacgaggaggaaaactcatgatcacttatacgcgtaaaagcgatgctggcaagtatgtttgcgttggcaccaacatggtgggggaacgggagagtgaagtcgcagagctaaccgttttagagagaccatcgtttgtgaagagacccagtaatttggcagtgactgtggatgacagtgcagaatttaaatgtgaggcccgaggagaccctgtgcctacagttcgatggaggaaagatgacggagagctgcccaaatccagatatgaaatccgagatgatcatactttgaaaattcggaaggtgactgctggcgacatgggatcatacacttgtgtggcagaaaatatggtcgggaaagctgaagcttccgctactttgacagttcaagagccgccacatttcgttgtaaaacctcgggaccaggtggttgccttgggaagaactgtgacgtttcagtgcgaagcaactggaaatcctcaaccagctatcttttggaggagagaggggagtcagaatctacttttctcctaccagcctccacagtcctctagccgattttcagtttcgcagacaggagacctcaccattacgaacgtccagcggtctgatgtcggctactacatctgtcagactttaaatgttgctggaagtatcatcacaaaggcctatttggaagttactgatgtgattgcagaccggcctcccccagtcattcggcaaggtcctgtgaatcagactgtagcagtggatggcactttaatcctcagctgtgtggccacaggcagtccagcacccacaattctgtggaggaaggatggagtccttgtttcaacccaagattctcggatcaaacagctggagagtggcgtgctgcagatccgctacgctaagctgggtgacacgggtcggtacacctgcaccgcatcgacccccagcggtgaggccacgtggagcgcttacatcgaagtccaggaatttggggttccagttcaacccccaagacccaccgaccccaacttaatccccagcgccccctcaaagcccgaagttacagatgtcagcaaaaacacggtcactttatcgtggcagccaaacttgaactcaggagcaaccccaacatcttatattatagaagccttcagccatgcatctggtagcagctggcagacggcggcagaaaatgtgaaaacagaaacatttgccatcaaaggactcaaacctaacgccatttaccttttcctggtgagggcagcaaatgcctatggaattagtgatccaagccaaatatcagatccagtgaaaacgcaagatgtcccaccaaccagccaaggggtggaccacaagcaggtccaaagagaactggggaatgttgtcttacatctgcacaacccgaccatcctttcttcctcctcagtcgaagtgcactggacggtggaccaacaatctcaatatattcaaggctataaaattctctaccgcccatctggagccagccatggtgaatcggagtggttagtttttgaagtgaggacgccaacgaaaaacagcgtggtgatccccgatctcagaaaaggcgtcaactacgagattaaggctcgcccattttttaatgagtttcaaggagcagacagtgaaatcaaatttgccaaaaccttagaagaagcaccaagtgcccctccccgaagtgtaactgtatccaagaatgatggaaatgggactgcaatcctggtcacttggcaaccgcctcctgaagacacacaaaatggaatggtccaagaatataaggtttggtgtctcggtaatgaaacgaagtatcacatcaacaagacagtcgatggctcgaccttctcggtggtcatcccctctctggttcctgggatccgatacagtgtggaggtggcagcgagcactggggcgggtcccggggtgaagagcgaacctcagttcatccagttagattctcacggaaaccccgtgtctcccgaggaccaagtcagccttgctcagcagatctccgacgtggtgaggcagccggcgttcattgcaggcattggggcagcctgttggattatcctcatggtcttcagcatctggctttacagacaccgcaagaagagaaacggactcaccagcacgtatgcgggtatccggaaagtcccgtcctttaccttcacgccaacagtaacttatcaaagaggaggcgaagccgtcagcagtggagggaggccgggactcctcaacattagtgaacctgccacgcagccatggctggcagacacgtggcctaacacaggcaacaaccacaatgactgctccatcaactgctgcacggccggcaatggcaacagcgacagcaacctgacaacctacagtcgcccagctgattgtatagccaattataacaaccaactggataacaaacaaacaaatctgatgctccctgagtcaactgtttatggtgatgtggaccttagtaacaaaatcaatgagatgaaaaccttcaatagcccaaatctgaaggacgggcgttttgtcaatccatcagggcagcccactccctatgccaccactcaactcatccaggcgaacctcagcaacaatatgaataatggcgccggggactccagcgagaagcactggaagcctccgggacagcagaaaccggaagtggcaccaattcagtataacatcatggagcaaaacaagctgaacaaagattatcgggcaaatgacacgatccctccaaccatcccatacaaccagtcctatgaccagaacacaggagggtcttataacagctcagatcggggcagtagtacatccgggagtcaaggccacaagaaaggggcacggacaccaaaggcacccaagcaaggtggcatgaactgggcagacttgctgccccctcctccggcgcatcctcccccacatagcaacagtgaagaatacaacatgtccgtagatgaaagctatgatcaagaaatgccatgtccagtgccacctgcgccgatgtatttgcaacaggatgaattacaggaagaggaagatgaaagaggccccactccccctgtccggggggcagcttcttctccagctgctgtgtcctacagccaccaatccacggccactctcaccccttctccccaggaagagctccagcccatgttacaggattgtccggaggacctcgggcacatgccccacccaccagacaggaggcggcagcccgtgagtcctcctccaccgccacggccaatttccccacctcatacttacggctacatttcaggaccccttgtctcagatatggataccgatgccccagaagaggaggaggacgaagctgacatggaagttgccaaaatgcagacccgaaggctgttgttacgtgggctggagcagaccccagcatccagtgttggggaccttgagagctccgtcactgggtccatgatcaatggctggggctcagcctcggaagaggacaacatttccagtgggcgctccagtgtcagttcatccgatggctcctttttcactgacgctgattttgcccaggcagttgctgcagctgcggagtatgcgggcctgaaagtggctcgccgccaaatgcaagatgctgctggccgccgccacttccatgcctctcagtgcccaaggcccacgagtcctgtgtccacagacagcaacatgagtgctgttgtgatccagaaagccagacccgccaagaagcagaaacaccagccaggacatctgcgcagggaagcctacgcagatgatcttccaccccctccagtgccaccacctgctataaaatcgcccactgtccagtccaaggcacagctggaggtacggcctgtcatggtgccaaaactcgcgtctatagaagcaaggacagatagatcgtcagacagaaaaggaggcagttacaaggggagagaagctctggatggaagacaagtcactgacctgcgaacaaatccaagtgaccccagagaggcacaggaacagccaaatgacgggaaaggccgaggaacaaggcagcccaagcgagaccttccaccagcaaagacgcacctcggccaagaggatattcttccgtactgtagacctactttcccaacgtcaaacaaccctagagaccccagttcctccagctctatgtcatcaagaggatcagggagccgacaaagagagcaagcaaatgtgggccgaaggaatatggcagaaatgcaagtacttgggggatttgaaagaggagatgagaataatgaagaattagaggaaactgaaagctgaagacaaccagagaggcttacgatgctaatgtgaaaaaccatcactcaagaggcctcctcccgtctgatgacacacaataccagatgaaattgttcagtgcaatcagaatggacaagttgccgtttttattcctcctgttgggataacattttttaaaagtttcttgggtttttagtgttgctgattgattgcctaacccttaatgaacctccccctgccgcgacgctgttacagccgttatccttgacttccaacactggaagtgtcttgaatgcttgcttcagccatcagccagcaaggaagaacagaccaattctttttgcgatttgcccctgagatatggcattgcactgcttatatatcacgctaattgatagcaaaatattgatcaatgatataaaggtgatgactcaacctcatgccaagggctctcaaagtataattgttctatgaccaactgctaaggccaattgaagcatacttcattttacatgattttaggatcagtcttttataccaccctttgctggcataaactaaaagtctatcacatacagaactacagtctaatttcaatggggtagaagcattgtaaatatatactctttgcaactcctggtggtactttattttgtctttatttcaaccattgaaatatattcttgaaatgtacttttggataagtagggctgagccagttggacctctggttgtcttagtcattgtgagaagtaaacctagcaaaaatcttgttctatttttcaatcaaaaagcaactacaaatgcatattccacgcaaatggatgtttttaacgaccaattgagtaaagacatccctatcttaactggcctaaatttcttctggtagtgtcagatcacctttcagaagagccacttaaggaggtttgtttgattttttttgttgttgttgttgttgttgttttttgtaatgcactgtttttaatctttttttttttggttttaaaagcacaatcactaacttttatttgtaaaccattgtaactattaaccttttttttcttattgaagaaactgttgagaagtgtttctagcctgttttgttaatgctctgtgtttgtatttgcaatatttgaatggtgacagctggtgacctcacgtacagactttatcgtgggctgtgaaccaaatggttccaatttttcctggacttaaaaaaaaatttttttgttctaagtttttcgtggccaatgttgaatcttataagatttccttagaagctcataagaggaattccaactcggaattgccaagtgatgctctgtgactgtaggtttctataattttttttgacattttaagaatttcattgactttataattggtgctatttgaagaaaacaaaatgaatctttagtcatgcataggtatcaggcttgacccccacaaagccaaacaaaactgaactacaaaataaataaataaataaataaataaataaataaataaaagcaaataaaaacaaaaggctggtattcacctaaaactaagtgtattcatttagctaatttgaagaagccccatgtcccatagaaaggatgtgcagttctaagggaacaatccacgtgattaatgttttcattatgttcatgtaagaaacctctttatttttagccatacttttgcatactgaaaattcaataatcagaaaagtaattttgtcatattatttattaaaaatgttctcaaataaaaaaaaaaaaaaaaaaaaaaaaaaaaaaaaagggcggccgctctagaggatccctcgaggggcccaagcttacgcgtgcatgcgacgtcatagctctt

SEQ ID NO: 11254 - protein, 1612 aa, Rattus norvegicus; identical to SEQ ID NO: 5064
  ref <308>: DATABASE ACCESSION NUMBER: SWISS-Prot / CAA76850
  ref <309>: DATABASE ENTRY DATE: 2003-02-01

SEQ ID NO: 11255 - DNA, 4956 bp, Homo sapiens
  ref <308>: DATABASE ACCESSION NUMBER: EMBL / AF040990
  ref <309>: DATABASE ENTRY DATE: 2000-03-03
atgaaatggaaacatgttccttttttggtcatgatatcactcctcagcttatccccaaatcacctgtttctggcccagcttattccagaccctgaagatgtagagagggggaacgaccacgggacgccaatccccacctctgataacgatgacaattcgctgggctatacaggctcccgtcttcgtcaggaagattttccacctcgcattgttgaacacccttcagacctgattgtctcaaaaggagaacctgcaactttgaactgcaaagctgaaggccgccccacacccactattgaatggtacaaagggggagagagagtggagacagacaaagatgaccctcgctcacaccgaatgttgctgccgagtggatctttatttttcttacgtatagtacatggacggaaaagtagacctgatgaaggagtctatgtctgtgtagcaaggaattaccttggagaggctgtgagccacaatgcatcgctggaagtagccatacttcgggatgacttcagacaaaacccttcggatgtcatggttgcagtaggagagcctgcagtaatggaatgccaacctccacgaggccatcctgagcccaccatttcatggaagaaagatggctctccactggatgataaagatgaaagaataactatacgaggaggaaagctcatgatcacttacacccgtaaaagtgacgctggcaaatatgtttgtgttggtaccaatatggttggggaacgtgagagtgaagtagccgagctgactgtcttagagagaccatcatttgtgaagagacccagtaacttggcagtaactgtggatgacagtgcagaatttaaatgtgaggcccgaggtgaccctgtacctacagtacgatggaggaaagatgatggagagctgcccaaatccagatatgaaatccgagatgatcataccttgaaaattaggaaggtgacagctggtgacatgggttcatacacttgtgttgcagaaaatatggtgggcaaagctgaagcatctgctactctgactgttcaagaacctccacattttgttgtgaaaccccgtgaccaggttgttgctttgggacggactgtaacttttcagtgtgaagcaaccggaaatcctcaaccagctattttctggaggagagaagggagtcagaatctacttttctcatatcaaccaccacagtcatccagccgattttcagtctcccagactggcgacctcacaattactaatgtccagcgatctgatgttggttattacatctgccagactttaaatgttgctggaagcatcatcacaaaggcatatttggaagttacagatgtgattgcagatcggcctcccccagttattcgacaaggtcctgtgaatcagactgtagccgtggatggcactttcgtcctcagctgtgtggccacaggcagtccagtgcccaccattctgtggagaaaggatggagtcctcgtttcaacccaagactctcgaatcaaacagttggagaatggagtactgcagatccgatatgctaagctgggtgatactggtcggtacacctgcattgcatcaacccccagtggtgaagcaacatggagtgcttacattgaagttcaagaatttggagttccagttcagcctccaagacctactgacccaaatttaatccctagtgccccatcaaaacctgaagtgacagatgtcagcagaaatacagtcacattatcgtggcaaccaaatttgaattcaggagcaactccaacatcttatattatagaagccttcagccatgcatctggtagcagctggcagaccgtagcagagaatgtgaaaacagaaacatctgccattaaaggactcaaacctaatgcaatttaccttttccttgtgagggcagctaatgcatatggaattagtgatccaagccaaatatcagatccagtgaaaacacaagatgtcctaccaacaagtcagggggtggaccacaagcaggtccagagagagctgggaaatgctgttctgcacctccacaaccccaccgtcctttcttcctcttccatcgaagtgcactggacagtagatcaacagtctcagtatatacaaggatataaaattctctatcggccatctggagccaaccacggagaatcagactggttagtttttgaagtgaggacgccagccaaaaacagtgtggtaatccctgatctcagaaagggagtcaactatgaaattaaggctcgccctttttttaatgaatttcaaggagcagatagtgaaatcaagtttgccaaaaccctggaagaagcacccagtgccccaccccaaggtgtaactgtatccaagaatgatggaaacggaactgcaattctagttagttggcagccacctccagaagacactcaaaatggaatggtccaagagtataaggtttggtgtctgggcaatgaaactcgataccacatcaacaaaacagtggatggttccaccttttccgtggtcattccctttcttgttcctggaatccgatacagtgtggaagtggcagccagcactggggctgggtctggggtaaagagtgagcctcagttcatccagctggatgcccatggaaaccctgtgtcacctgaggaccaagtcagcctcgctcagcagatttcagatgtggtgaagcagccggccttcatagcaggtattggagcagcctgttggatcatcctcatggtcttcagcatctggctttatcgacaccgcaagaagagaaacggacttactagtacctacgcgggtatcagaaaagtcccgtcttttaccttcacaccaacagtaacttaccagagaggaggcgaagctgtcagcagtggagggaggcctggacttctcaacatcagtgaacctgccgcgcagccatggctggcagacacgtggcctaatactggcaacaaccacaatgactgctccatcagctgctgcacggcaggcaatggaaacagcgacagcaacctcactacctacagtcgcccagctgattgtatagcaaattataacaaccaactggataacaaacaaacaaatctgatgctccctgagtcaactgtttatggtgatgtggaccttagtaacaaaatcaatgagatgaaaaccttcaatagcccaaatctgaaggatgggcgttttgtcaatccatcagggcagcctactccttacgccaccactcagctcatccagtcaaacctcagcaacaacatgaacaatggcagcggggactctggcgagaagcactggaaaccactgggacagcagaaacaagaagtggcaccagttcagtacaacatcgtggagcaaaacaagctgaacaaagattatcgagcaaatgacacagttcctccaactatcccatacaaccaatcatacgaccagaacacaggaggatcctacaacagctcagaccggggcagtagtacatctgggagtcaggggcacaagaaaggggcaagaacacccaaggtaccaaaacagggtggcatgaactgggcagacctgcttcctcctcccccagcacatcctcctccacacagcaatagcgaagagtacaacatttctgtagatgaaagctatgaccaagaaatgccatgtcccgtgccaccagcaaggatgtatttgcaacaagatgaattagaagaggaggaagatgaacgaggccccactccccctgttcggggagcagcttcttctccagctgccgtgtcctatagccatcagtccactgccactctgactccctccccacaggaagaactccagcccatgttacaggattgtccagaggagactggccacatgcagcaccagcccgacaggagacggcagcctgtgagtcctcctccaccaccacggccgatctcccctccacatacctatggctacatttcaggacccctggtctcagatatggatacggatgcgccagaagaggaagaagacgaagccgacatggaggtagccaagatgcaaaccagaaggcttttgttacgtgggcttgagcagacacctgcctccagtgttggggacctggagagctctgtcacggggtccatgatcaacggctggggctcagcctcagaggaggacaacatttccagcggacgctccagtgttagttcttcggacggctcctttttcactgatgctgactttgcccaggcagtcgcagcagcggcagagtatgctggtctgaaagtagcacgacggcaaatgcaggatgctgctggccgtcgacattttcatgcgtctcagtgccctaggcccacaagtcccgtgtctacagacagcaacatgagtgccgccgtaatgcagaaaaccagaccagccaagaaactgaaacaccagccaggacatctgcgcagagaaacctacacagatgatcttccaccacctcctgtgccgccacctgctataaagtcacctactgcccaatccaagacacagctggaagtacgacctgtagtggtgccaaaactcccttctatggatgcaagaacagacagatcatcagacagaaaaggaagcagttacaaggggagagaagtgttggatggaagacaggttgttgacatgcgaacaaatccaggtgatcccagagaagcacaggaacagcaaaatgacgggaaaggacgtggaaacaaggcagcaaaacgagaccttccaccagcaaagactcatctcatccaagaggatattctaccttattgtagacctacttttccaacatcaaataatcccagagatcccagttcctcaagctcaatgtcatcaagaggatcaggaagcagacaaagagaacaagcaaatgtaggtcgaagaaatattgcagaaatgcaggtacttggaggatatgaaagaggagaagataataatgaagaattagaggaaactgaaagctga

SEQ ID NO: 11256 - protein, 1651 aa, Homo sapiens; identical to SEQ ID NO: 5066
  ref <308>: DATABASE ACCESSION NUMBER: SWISS-Prot / AAC39575
  ref <309>: DATABASE ENTRY DATE: 2003-02-01

SEQ ID NO: 11257 - DNA, 358 bp, Rattus norvegicus
  ref <308>: DATABASE ACCESSION NUMBER: EMBL / AA860039
  ref <309>: DATABASE ENTRY DATE: 2000-03-03
tttttttttttttttttgggtgagtgagtttctgtacgagtttattttatattacacatacattcagaggatatgcatctgacgaattctctatcaatcttacatggtatgtgtttcacatttgcctgagagcctgggcatgtgatgcttcctttaatcctagcttgttgggaagacataagtaagtagatctgagttcacggacagtctagtcactcgcgggagttctaagacagccacggctacacgattaaaactaatctctgactataggggataaatccagatttccagtgtgtctgaaaattcctaggctaatctttaagtcaatgtgggtttataggccaaactatgtgtc

SEQ ID NO: 11258 - DNA, 1731 bp, Rattus norvegicus
  ref <308>: DATABASE ACCESSION NUMBER: Refseq / NM_017158
  ref <309>: DATABASE ENTRY DATE: 2002-11-05
ggcatcagtaaggagggtctccatggatctggtcactttcctggtacttactctctcctctctcattctcctctcactctggagacagagctctaggagaaggaagctccctcctggccccactcctctcccaataattggtaatttcctccagatagatgtgaagaacatcagccaatccttaaccaagttttcaaaaacctatggccctgtgttcactctgtatttgggctcacagcccactgtcatattgcatggatatgaagcaataaaggaagctctgattgataacggggagaagttttctggtagaggaagctatccaatgaatgaaaatgttactaaaggttttggcattgtttttagcaatggaaacagatggaaagagatgagacgattcacaatcatgaactttcggaatttgggaattggaaaaaggaacattgaggaccgtgttcaagaggaagcacagtgcctagtggaagaactgaggaaaacaaaaggctcaccctgtgacccctccttgatcctgaactgtgctccatgcaatgtcatctgctccattactttccagaatcattttgattataaagataaggaaatgcttacgttcatggaaaaagtgaatgagaatctcaagattatgagctccccatggatgcaggtctgcaatagttttccttcactcattgactattttcctggaactcatcacaaaatagcaaaaaatattaattatatgaaaagctatttgttgaagaaaatagaagaacaccaggaatcattggatgttacaaaccctcgtgattttgttgattattacctgattaaacaaaaacaggcaaacaacatcgaacaatcagaatattcacatgaaaatctgacatgcagtatcatggatctcattggtgcagggacagagacaatgagcacaacattgagatatgctctcctgcttctgatgaagtacccacatgtcacagctaaagtccaggaagagattgaccgtgtgattggcagacatcgcagcccctgcatgcaggatagaaaacacatgccctacactgatgccatgattcatgaggtacagagattcattaactttgtcccgaccaacctgccccatgcagtgacctgtgacattaaattcaggaactacctcatcccgaagggaacaaaagtgttaacatcactgacatcagtgctgcatgacagcaaggagttccccaacccagagatgtttgaccctggccactttctagatgagaatggaaactttaagaaaagtgactactttttgcctttctcagcaggaaaacgagcttgtgttggagagggcctggcccgcatgcagttgtttctattcttgacaaccattttacagaactttaacctgaaatctctggttcacccaaaggacattgatacgatgccagttctgaatggttttgcctctctgccacccacttaccagctctgcttcattccttcctgaatagatcaggcattttggcttctactgtgttgccttctgcaatccccttcaggtttttatccagtcccttccctctatcatccatcctgactcttgtcttaagatccagaaagcacatgcagtttctggagttatagcacaaatccacttgtattatctctttcatataacaatttatgatcccttgtgtcattgtgtatccattcctgagttaaaataaagcttcactataaaat

SEQ ID NO: 11259 - protein, 490 aa, Rattus norvegicus; identical to SEQ ID NO: 5073
  ref <308>: DATABASE ACCESSION NUMBER: SWISS-Prot / P05179
  ref <309>: DATABASE ENTRY DATE: 2002-06-15

SEQ ID NO: 11260 - DNA, 1473 bp, Homo sapiens; identical to SEQ ID NO: 5074
  ref <308>: DATABASE ACCESSION NUMBER: Refseq / NM_000769
  ref <309>: DATABASE ENTRY DATE: 2002-11-05

SEQ ID NO: 11261 - protein, 490 aa, Homo sapiens; identical to SEQ ID NO: 5075
  ref <308>: DATABASE ACCESSION NUMBER: SWISS-Prot / P33261
  ref <309>: DATABASE ENTRY DATE: 2002-06-15

SEQ ID NO: 11262 - DNA, 493 bp, Rattus norvegicus; identical to SEQ ID NO: 5090
  ref <308>: DATABASE ACCESSION NUMBER: EMBL / AA866276
  ref <309>: DATABASE ENTRY DATE: 2000-03-03

SEQ ID NO: 11263 - DNA, 2676 bp, Homo sapiens; identical to SEQ ID NO: 5092
  ref <308>: DATABASE ACCESSION NUMBER: EMBL / AK027693
  ref <309>: DATABASE ENTRY DATE: 2002-08-06

SEQ ID NO: 11264 - protein, 322 aa, Homo sapiens; identical to SEQ ID NO: 5093
  ref <308>: DATABASE ACCESSION NUMBER: SWISS-Prot / Q96S97
  ref <309>: DATABASE ENTRY DATE: 2002-06-15

SEQ ID NO: 11265 - DNA, 519 bp, Rattus norvegicus
  ref <308>: DATABASE ACCESSION NUMBER: EMBL / AA866426
  ref <309>: DATABASE ENTRY DATE: 2000-03-03
ttattttttttttttttggaagtagaaatatttattcagaatataagaacgtttgtaaaatattataaatgtctctgtataaataaatggcgtttttttttttaaacaattctatatcaaataacacaaattagctattttacagcagctaaaaactaaaggcatctggaaacatttaaagctacaagtgaatctaaaactgacaaggtatagtacagtgtgtagtagccactttaaaatgacactttccatacaagcagaacagtactgacagatgcagcagacagatgtgctttaagaacagtgcattcaagcaggattttctaattcaagtggtataaaaaacattttcaattaataaaaaagttaaatttcatgcaaagtaagttaatatgtctaaaagcaaattagaaatagaagtgaacatttgtagttgttgcatcaggaaggtaagtgccccaacaggagcactgcagaagaacgctgcggactctacagaatcccttccacatctcaacc

SEQ ID NO: 11266 - DNA, 211 bp, Homo sapiens
  ref <308>: DATABASE ACCESSION NUMBER: EMBL / AA937337
  ref <309>: DATABASE ENTRY DATE: 2000-03-03
ggaattagaaatatttattcagaatataagaatgtttgtaaaatattataaatgtctctgtataaataaatggagtttttaaaaaacaattctatatcaaataacgcaaagtagctatcttacagcagctaaaactaaaggcatctggaaacatttaaagaatacaagtggagaatctaaaaaattacaaggtatagtacagtgttaagta

SEQ ID NO: 11267 - DNA, 265 bp, Rattus norvegicus; identical to SEQ ID NO: 5110
  ref <308>: DATABASE ACCESSION NUMBER: EMBL / AA866439
  ref <309>: DATABASE ENTRY DATE: 2000-03-03

SEQ ID NO: 11268 - DNA, 1843 bp, Homo sapiens; identical to SEQ ID NO: 5111
  ref <308>: DATABASE ACCESSION NUMBER: EMBL / AK057056
  ref <309>: DATABASE ENTRY DATE: 2002-08-06

SEQ ID NO: 11269 - DNA, 4474 bp, Rattus norvegicus; identical to SEQ ID NO: 10580
  ref <308>: DATABASE ACCESSION NUMBER: EMBL / AF121217
  ref <309>: DATABASE ENTRY DATE: 1999-07-01

SEQ ID NO: 11270 - protein, 1372 aa, Rattus norvegicus; identical to SEQ ID NO: 5579
  ref <308>: DATABASE ACCESSION NUMBER: SWISS-Prot / P02466
  ref <309>: DATABASE ENTRY DATE: 2001-10-16

SEQ ID NO: 11271 - DNA, 1719 bp, Homo sapiens; identical to SEQ ID NO: 5580
  ref <308>: DATABASE ACCESSION NUMBER: EMBL / D21235
  ref <309>: DATABASE ENTRY DATE: 2001-11-30

SEQ ID NO: 11272 - protein, 363 aa, Homo sapiens; identical to SEQ ID NO: 5581
  ref <308>: DATABASE ACCESSION NUMBER: SWISS-Prot / P54725
  ref <309>: DATABASE ENTRY DATE: 2002-06-15

SEQ ID NO: 11273 - DNA, 541 bp, Rattus norvegicus; identical to SEQ ID NO: 5140
  ref <308>: DATABASE ACCESSION NUMBER: EMBL / AA874803
  ref <309>: DATABASE ENTRY DATE: 2000-03-03

SEQ ID NO: 11274 - DNA, 545 bp, Rattus norvegicus
  ref <308>: DATABASE ACCESSION NUMBER: EMBL / AA874809
  ref <309>: DATABASE ENTRY DATE: 2000-03-03
tttttttttttttttttgctgtcaatattttacattattacaaggacataataaaaagaggctctgcagaccaatggatggtaattggtctcctagaagaaggctgtccaaaaatggccttattttacaaaaacggtggacccgtgctaaaaaaaaacatagaagtcaattttcagtatgttctataacattagccaaaattcaaagtgtatttcttctgaatgtagaatttaacaaataaatacgtgttaaatacagatctgagacagtcggccgaggcagaccaccagccacttcctccactgttagggttgttgacaaagccggagaaaccaccacggaccttgttcccatgttttatgcttgacattttcagaagcaccctatttccagtgtttcttttatccacttcacaaatatattcttttaaaataataacaacaaaagattaaaggtgctttcatgtgacattaaaatgaccgtccattggcatttgaggaactccgagagccaccggggtgcttggctcaaagtgctaattacag

SEQ ID NO: 11275 - DNA, 565 bp, Rattus norvegicus
  ref <308>: DATABASE ACCESSION NUMBER: EMBL / AA874856
  ref <309>: DATABASE ENTRY DATE: 2000-03-03
tttttttttttttttttgaatgtaatgacgttttatttatttatttcaaatctccccacactcatcccttcaccagcattaacttttatgaagacaacaggggaaagcagcttttgttattagtaagaactcttcaatgtgaatggcatgtacctccaagctaaactggttcattaaaggatacatgacaaattatcagtgttattgctaaaagtatatatccaacaattgtcgtgattagaccttcaaaatgagatgcttgaacatgctcctcaaaccccaagccaacaagggagaagtgaccaatgtggtagggacaaaatgcaaaaacaagaatgaacagtgtgtttaacgataccacccagaacacatgttccagaaaaactagtgatccatcaagtccaagcattctttcccaagtaagctcttcagcagcccggtcccactccaaagcattccagttcatgtcgtcttgggccccattgttggcatcagcagcatcttctacacctgcatcatcttcctcctcattgtcctcctcctcctcttctgcttgaccatcctg

SEQ ID NO: 11276 - DNA, 2038 bp, Homo sapiens
  ref <308>: DATABASE ACCESSION NUMBER: EMBL / AK000970
  ref <309>: DATABASE ENTRY DATE: 2002-08-06
cgctttctgtcagcctctctccctctccctctcccctctccttcctctcgcttcctctctcgcacctgagcgtacgcacctgcccgggcccggctccctcctcctctcccctccctctttccccgcccggccgcgggagcctcgtggctgcgtcaccgccgcccccccagacaagatggacaccgcggaggaagacatatgtagagtgtgtcggtcagaaggaacacctgagaaaccgctttatcatccttgtgtatgtactggcagtattaagtttatccatcaagaatgcttagttcaatggctgaaacacagtcgaaaagaatactgtgaattatgcaagcacagatttgcttttacaccaatttattctccagatatgccttcacggcttccaattcaagacatatttgctggactggttacaagtattggcactgcaatacgatattggtttcattatacacttgtggcctttgcatggttgggagttgttcctcttacagcatgccgcatctacaagtgcttgtttactggctccgtgagctcactactgacgctgccattagatatgctgtcaacggaaaatttgttggcagattgtttgcagggttgttttgtggtgacgtgcacactgtgtgcattcatcagcctggtgtggttgagagagcagatagtccatgggggagcaccaatttggttggagcatgctgccccaccgttcaatgctgcggggcatcaccaaaatgaggctccagcaggaggaaatggtgcagaaaatgttgctgctgatcagcctgctaacccaccagctgagaacgcagtggtgggggaaaaccctgatgcccaggatgaccaggcggaagaggaggaggaggacaatgaggaggaagatgacgctggtgtggaggatgcggcagatgctaataacggagcccaggatgacatgaattggaatgctttagaatgggaccgagctgctgaagagcttacatgggaaagaatgctaggacttgatggatcactagtttttctggaacatgtcttctgggtggtatctttaaatacactgttcattcttgtttttgcattttgcccttaccatattggtcatttctcccttgttggtttgggatttgaagaacacgtgagtataatacttttacaaagttactttcattcattactcccaaatgtgattattaataaaatagtattctaaagagtttcatcatttcttcattggcattatgcaagggaatagttaggcaataccgtctcattcttttttaaaaaaaataacagtggctcaagagatagtggtcatgttgccaactaatgaaaatgtgctctgaaatccagtcagctgggtgggcctgaggcataccgtgggaaagtttcccacaggctgattttctgtccatctcaagaacctgtatgttctcttctttccctttccccaggtgccccctgctgaatttagaaaagtaacaatatatcaatcaatttaaaaagggtagaatattttggaatgacgggttgtagtgttttctagagtgctttagttttgacattttatcagtattttccagaggtaaataaattttggaaggattattacttctctgttggggccctagaacaatttagtcttttatggaaaagctgactatctgggatcatatgctcagtttgtatatttgagatctgagagatcacgttctgaagtcttctcatatttagtacacctctgattctcactagttgaatgcaagaacttgaaaggttcaggtaagtgttttgaaaaattttgactttccaaacttttgccacttgctatctgaaactcaggaatcaaaaaataccgacaggcactgttactttcaaaattctttctataagttgagaatgggacagatttgcagagcaagggaaacttgaacagttacttctagtggtaggaaatgaggtggctaggatattacccagctggtgggtgacttgggcagtgtgttcctgctttcagtggttagccttt

SEQ ID NO: 11277 - DNA, 473 bp, Rattus norvegicus
  ref <308>: DATABASE ACCESSION NUMBER: EMBL / AA874875
  ref <309>: DATABASE ENTRY DATE: 2000-03-03
tttttttttttttttttaatcaaggtaaaatttttaatgacttttttaaaaaataaactattctacgtattaaatactctttactagttatacatacttaagatacatatttaggcttaaaatcttaggaagaaaaacatacacatttcaaaagcaatatcaaataacatatttaaagcttttaaattttttttaaggtaaaacaaagcaagagatgagatatttaaaaagatgagatggtcatgtcgtcttagttcttgtcctccattttactaattataataattccttcttcttggattgtttttattcccccagagctgaggaccgaacccaggcacctgcgcttgctaggcaagcgctataccactgcgttaaatccccaacccatgttcttttctttaaaatgtatttctttgcaaataaaaattacaacaaaaaacacccaagttttttgagcaaactagacagaa

SEQ ID NO: 11278 - DNA, 529 bp, Rattus norvegicus
  ref <308>: DATABASE ACCESSION NUMBER: EMBL / AA874912
  ref <309>: DATABASE ENTRY DATE: 2000-03-03
ttttttttttttttcactttcaaactcttaagccaagtagagaaagccctaaatacctgtgtctattttatatcagtcactgggacgttttttaagtttttatttattcaagtaaatttaccaaaaaaaaaaaaaaagccccctaagcacaatgacttccatttcttgacagtgttctctggcgtctcacgtctgtgtgtttaactgttgtcacagcaactgatcttcctcttgggatttttatctgaaagcacaatgcatcgagtctcttgaaaatcgaattctcttgtagctctttttatggaataaactttatgcactgctaacgtaacattctcaaggaatagacataaacacaaatgtatgcctgaagctgatttttttgggggagggggcaggaaacgatactctgcttctagaagctttttgtttagtatttcataaatcattgtttaaccatttgtgtggagcataaactattcagtggatcatgtctgtacattgtgtaatgactgaaaagcacataaat

SEQ ID NO: 11279 - DNA, 492 bp, Rattus norvegicus
  ref <308>: DATABASE ACCESSION NUMBER: EMBL / AA874927
  ref <309>: DATABASE ENTRY DATE: 2000-03-03
tttttttttttttttttagcaatataacatcaattttattttaaaaaacaaaacccaatccacctgacctgtctgtccctcaagggacctaatagagacctcaggaagggctagctctggccaagcaggggtaggttgtcaggtgtcaaagaagacactgtgctcatggactctgctccctctctcagcccttgtcttttgctcctgacaagaggaacaactgatctgtggtcctacgagctctgctgtacttgaggaagacagcacgcccatcctcctggtctctttgctcccccttcaacggatactatccttctctccgccaccctgagcagatggtgaggactaaagtggtggccggggacaccaagtgtctacggagcccacagggctcagaccgtctgccccagtgacctctagtcactaccatcgggcaggatgcctgtggtgccaggcactgactgaattcctctctcacgccagccacactaa

SEQ ID NO: 11280 - DNA, 555 bp, Rattus norvegicus
  ref <308>: DATABASE ACCESSION NUMBER: EMBL / AA874952
  ref <309>: DATABASE ENTRY DATE: 2000-03-03
ttttttttttttttaaagtgtttctgatggtttattggtgacttatcgacaggccaaccgccttcctccaaccaatcgaggtctggaaggaagacgtttccccatcagaaacgacaacacagatggaattaatcatacagactagggcagatttacttctttcacacaattttagtaacaaaaaggatatttgttacaagcagagggacggaaccacaagtacacaatgtcaaaggcccatcttaaagttctgttgtatttaaatgacttttatttgtttaaaaaaaacaaaacaaacaagttgctactcccacctataacatgggacatactgaagttttaagatgacactttggagaagcttatgacttctctcagttctgctgtaagctcagattaacttcaattaaagaagctaagtaattatccaacattattaaaagcttgattcaaaattttgtaggaaagaaactgagaatggagatgcgggagacagcctggtaatgtcacatacacctaggccttgcaatcctcatgaactaagacagctagaat

SEQ ID NO: 11281 - DNA, 6108 bp, Homo sapiens
  ref <308>: DATABASE ACCESSION NUMBER: EMBL / AB007885
  ref <309>: DATABASE ENTRY DATE: 1999-11-18
caaaaaagtggtgcagtttttgatgaaattgtagagaactgagtatagtcatggccaacagcaaaaaactcaagagggggaactgaaaattagtgctgtgttttcagtcagtggcagccctcttgctccacagttgactactggctttcagccctcactggcgtcatctggcatgaataaaatgcttccttcagttccagccacagctgttcgagtttcctgttctggttgtaaaaaaatcctccagaaggggcaaactgcttatcagaggaaagggtctactcagctattctgctccacactgtgcctcactggatatacagttccacctgcccgcccaccgcctcctctcaccaagaaaacttgttcaagttgctcaaaagacattttaaatccaaaggatgtgatcagtgcccagtttgaaaacaccaccactagtaaagatttttgcagtcagtcatgtttgtcaacatatgaactgaaaaaaaaacctattgttaccataaatacaaatagtatttcaaccaaatgcagcatgtgtcagaagaatgctgttattcgacatgaagttaattaccagaatgtggtccataaactttgcagtgatgcctgcttctctaagtttcgttctgctaacaacctcaccatgaactgttgtgagaactgtgggggttactgttacagtgggtcgggacaatgccacatgcttcagatagagggacagtctaagaagttttgtagttcatcgtgtatcacggcatacaagcagaaatcagccaaaattacaccgtgtgcgctttgcaaatcattgagatcctcagcagaaatgattgaaaataccaatagcttggggaagacagagcttttctgttctgttaattgcttatctgcttacagagttaaaatggttacttctgcaggtgtacaagttcagtgtaacagttgtaaaacctcagcaattcctcagtatcacctagccatgtcagatggaagtatacgcaacttctgcagctacagctgtgtggtagctttccagaatttattcaacaaaccaactggaatgaattcttcagtagtgcccttgtctcagggccaagtaattgtaagcatccccacaggttccacagtgtcagccggaggaggtagcacatctgctgtttctcccacctccatcagtagctctgctgcagctggtctccagcgtctcgctgcccagtcccagcatgttgggtttgcacgaagtgttgtgaaactcaaatgtcaacactgtaaccgtctttttgccacaaaaccagaacttcttgactataagggcaaaatgtttcagttctgtggcaagaattgttctgatgaatataagaaaataaataatgtaatggcaatgtgtgaatattgtaaaattgagaaaattgtaaaggagactgttcggttctcaggtgctgacaagtcattctgtagtgaaggttgcaaattgctttataaacatgacttggcaaaacgctggggaaatcactgtaaaatgtgcagttattgtttacagacatctcccaaattggtacagaataatttaggagggaaagtggaagagttctgttgtgaagaatgcatgtccaaatatacagttttgttctatcagatggccaaatgtgatgcttgtaagcgacagggtaaactcagtgagtccttgaaatggcgaggggaaatgaaacatttctgtaacctgctttgtatcttgatgttctgtaatcagcaaagtgtatgtgacccgccttcacaaaataatgcagcaaatatttccatggttcaagctgcttcagcaggacccccatctctgagaaaagattcgactccagttatagccaatgtagtatcattggcaagtgcccctgctgctcagcctacagtgaattctaacagtgtcttacaaggtgcagttccaacagtaacagcgaaaatcatcggtgatgcaagtactcaaacagatgccctgaaactgccaccttcccaacctccaaggcttttgaagaacaaagctttattatgcaaacccatcacacagactaaagccacctcttgcaaaccacatacccaaaacaaagaatgccagacagaagacactccaagtcagccccagattattgtggtgccagttcccgtaccagtgtttgttcccatacctcttcacctttatactcaatatgctccagtcccatttggaattccagttccaatgcctgtccctatgcttattccatcttcaatggatagtgaagataaagtcacagagagtattgaagacattaaagaaaagcttcccacacatccatttgaagctgatctccttgagatggcagaaatgattgcagaagatgaagagaagaagactctatctcagggagagtcccaaacttctgaacacgaactctttctagacaccaagatatttgaaaaagaccaaggaagtacatacagtggtgatcttgaatcagaggcagtatctactccacatagctgggaggaagagctgaatcactatgccttaaagtcaaatgctgtgcaagaggctgattcagaattgaagcagttctcaaaaggggaaactgaacaggacctggaagcagattttccatcagactcctttgacccacttaataaaggacagggaatccaggcacgttcccgaacaagacgacgacacagagatggcttcccccaacccagacgaagaggacggaagaagtctatagtggctgtggagcccaggagtcttattcaaggagcctttcaaggctgctcagtgtccgggatgacactgaaatacatgtatggggtaaatgcttggaagaactgggttcagtggaaaaatgccaaggaagagcagggggatctaaaatgtggaggggttgaacaggcctcatctagcccacgttctgaccccttaggaagtactcaagaccatgcactctctcaagaatcctcagagccaggctgtagagtccgctctatcaagctgaaggaagacattctgtcctgcacttttgctgagttgagtttgggcttatgccagtttatccaagaggtgcggagaccaaatggtgaaaaatatgatccagacagtatcttatacttgtgccttggaattcaacagtacctgtttgaaaatggtagaatagataacatttttactgagccctattccagatttatgattgaacttaccaaactcttgaaaatatgggaacctacaatacttcctaatggttacatgttctctcgcattgaggaagagcatttgtgggagtgcaaacagctgggcgcttactcaccaatcgtccttttaaacaccctccttttcttcaataccaaatacttccaactaaagaatgttactgagcacttgaagctttcctttgcccatgtgatgagacggaccaggactctgaagtacagtaccaagatgacatatctgaggttcttcccacctttacagaagcaggagtcagaaccagataaactgactgttggcaagaggaaacgaaatgaagatgatgaggttccagtgggggtggagatggcagagaatactgacaatccactaagatgcccagtccgactttatgagttttacctgtcaaaatgttctgaaagtgtgaagcaaaggaatgatgtgttttaccttcaacctgagcgctcctgtgtcccgaatagccccatgtggtactccacattcccgatagaccctggaaccctggacaccatgttaacacgtattctcatggtgagggaggtacatgaagaacttgccaaagccaaatctgaagactctgatgttgaattatcagattaaaacggaagtgaggttcttattttcatacatattggtatgcaccaaactgtgaatgcatccagctgttggaaaatgatgtataagtctaagtcctcttgacttgaccataagatcatggaaaacagatgacttgtgaaccccacagtgtggatgtgcaaatgaaaattgaaggaaagaatatgaactgagaaatgttctttggcagtgatatagttcttagacatcttcagaatgactaatttctccgagtggtgcataatcttattttgtttgggagtaacaaatcgtggaatatttttaaggaaaactgttgtataaaactttaccatagtaaccttagaccttagagaggtagctttggagtgaaactttggctgcaataggctactttggcaagccctccgtaaaagtcagaggagagatcagtacagagctaagagtgacatcaaatgaggactgtgggacccagatttgaagacccaataaaaatactcaactttttaaaaaagatagtgaagtggtcttgattgattttgattttcactgccaagccaatcatgtgaaggacagaagcttttgccatgggcccctcacatcagggaaaatgaccttcactgctgttaacagtaatgtgtccctttcattttctggatcaagccttctcagcggtgggtctggatgtgggtaaactaaggtaaaggggatgatattccacaaactaattatgcacacagaaaatctgtggagcctatcagaccccaagtgtcttgaaatgtttgtagaaacccactaaaatgccccttctctgggtgtgggcccttattgcagctgtctcacagcctgagctgtggtacagagaaatgggggttctccttttattttcattttttttccccaatggcagcttttctcccgttgttttaccttcctatttcccaaacagttcctcttattttgtcttttgcaccagtttctggaggcccttgtcatttcaaaaaggatagtctcttttcttactctggcaaacctgtgagtgattccacaaagatacagtattacttagctatctgaattatgatagaaaaggtcctagttaggttcctatataaagcatttggaagatgaccttgttgcccttgaaacttgaaaatagggattctggggtgaggatacaaagacattgtcttgcatatccataagcaggtcttagagcattattccaaactctagctgtttcagtagttctatgaggattgcaagtcataggtgtgtgtggcatatcagtccatctccctcatctccattctcagtttcttccccacaaaatttggaatcaaagcttttatgacgtttgccaattgcagaacttcttcagctaaggttaatttgacgctatgataaaactgagagatgtcaaaaagcctcttagaaattttaatcttgaaagacttttcagggtatctcattttttaggtgggggtggcaggtgtatttcttttttaacaaataaaaggcatttaagtaaaactaaaatgaaaaaagtaggccttctgacattgtgtacttggtggttctgtccctctgcctgtaacaaatctcatttttgttaccaagaactgtatgaaagaagtaaatccaccccgattctgtatgattaattccatctgtgtttgtcatttctgactggaaaacttcttactccataccttgttcgatatggaggacaaataattggattgtctgataagtctgccaataaactatccagaaatagcaagtgtaatagtccccactatacgaattttatggtttgtataaacactaacattttccccttctgtagttgtatgaaaaaacaaatattgttagcatagtagataaattgttatgaaataccagaaaaaaaaatctgtatcttttactgagaacacccaatacccagataaatgactgtatcaggatttcatttgcatgttagtccacagagttgcccagaaccctaaatttattcataagagaaaatattgattaattattggtcattcctcataagtgtagctgttgatgtgtgcgtctgattattgcttttttaattttatgaaaattgtgtaaaattacattttttttccaggggagaaaaaaacatcaaacaaaaacatctaaatcatcctttttgttctttttcagtttttaaccacttttaggttttccccttacagaaaccacagaaatattcccttagaataaaatagtatatttgt

SEQ ID NO: 11282 - protein, 1224 aa, Homo sapiens
  ref <308>: DATABASE ACCESSION NUMBER: Refseq / NP_005086
  ref <309>: DATABASE ENTRY DATE: 2002-11-05
MNKMLPSVPATAVRVSCSGCKKILQKGQTAYQRKGSTQLFCSTLCLTGYTVPPARPPPPLTKKTCSSCSKDILNPKDVISAQFENTTTSKDFCSQSCLSTYELKKKPIVTINTNSISTKCSMCQKNAVIRHEVNYQNVVHKLCSDACFSKFRSANNLTMNCCENCGGYCYSGSGQCHMLQIEGQSKKFCSSSCITAYKQKSAKITPCALCKSLRSSAEMIENTNSLGKTELFCSVNCLSAYRVKMVTSAGVQVQCNSCKTSAIPQYHLAMSDGSIRNFCSYSCVVAFQNLFNKPTGMNSSVVPLSQGQVIVSIPTGSTVSAGGGSTSAVSPTSISSSAAAGLQRLAAQSQHVGFARSVVKLKCQHCNRLFATKPELLDYKGKMFQFCGKNCSDEYKKINNVMAMCEYCKIEKIVKETVRFSGADKSFCSEGCKLLYKHDLAKRWGNHCKMCSYCLQTSPKLVQNNLGGKVEEFCCEECMSKYTVLFYQMAKCDACKRQGKLSESLKWRGEMKHFCNLLCILMFCNQQSVCDPPSQNNAANISMVQAASAGPPSLRKDSTPVIANVVSLASAPAAQPTVNSNSVLQGAVPTVTAKIIGDASTQTDALKLPPSQPPRLLKNKALLCKPITQTKATSCKPHTQNKECQTEDTPSQPQIIVVPVPVPVFVPIPLHLYTQYAPVPFGIPVPMPVPMLIPSSMDSEDKVTESIEDIKEKLPTHPFEADLLEMAEMIAEDEEKKTLSQGESQTSEHELFLDTKIFEKDQGSTYSGDLESEAVSTPHSWEEELNHYALKSNAVQEADSELKQFSKGETEQDLEADFPSDSFDPLNKGQGIQARSRTRRRHRDGFPQPRRRGRKKSIVAVEPRSLIQGAFQGCSVSGMTLKYMYGVNAWKNWVQWKNAKEEQGDLKCGGVEQASSSPRSDPLGSTQDHALSQESSEPGCRVRSIKLKEDILSCTFAELSLGLCQFIQEVRRPNGEKYDPDSILYLCLGIQQYLFENGRIDNIFTEPYSRFMIELTKLLKIWEPTILPNGYMFSRIEEEHLWECKQLGAYSPIVLLNTLLFFNTKYFQLKNVTEHLKLSFAHVMRRTRTLKYSTKMTYLRFFPPLQKQESEPDKLTVGKRKRNEDDEVPVGVEMAENTDNPLRCPVRLYEFYLSKCSESVKQRNDVFYLQPERSCVPNSPMWYSTFPIDPGTLDTMLTRILMVREVHEELAKAKSEDSDVELSD

SEQ ID NO: 11283 - DNA, 569 bp, Rattus norvegicus
  ref <308>: DATABASE ACCESSION NUMBER: EMBL / AA874990
  ref <309>: DATABASE ENTRY DATE: 2000-03-03
cgaccgcttcgccgcagaagtatctccggatggagccttcccccttcggcgacgtctcctcccgtctcaccacagaacaaattctgtacaacataaaacaggaatataaacgtatgcagaagaggagacatttagaagctagttttcagcagacagacccaggttgtagttccgattcacagccacatgcatttctcatcagtggaccagcatcaccagggacttcatctgcaacatcctcaccattaaaaaaagaacagcccttatttactctaaggcaggttgggatgatctgtgaacgtttgttgaaagaacgggaagagaaggttcgagaagaatatgaagaaatactgaacacaaaacttgcagaacaatacgatgcatttgtgaagtttacgcatgatcagataatgcggcgatatggagaacagcctgctagttatgtttcatgaatcacgctttttgcatttgtgggctgccttgttccttgttgagttgttgcaggaggtcccagctgtgacatacagcaatgccagcgcccatctgtgaaccaggttatttcaagcttt

SEQ ID NO: 11284 - DNA, 1497 bp, Homo sapiens
  ref <308>: DATABASE ACCESSION NUMBER: EMBL / BC003042
  ref <309>: DATABASE ENTRY DATE: 2001-07-13
gttggacgtgttcgcttgggttcctgctgcggcagccacctcgcaatctctctgcatcgatcgccgctcgcaagctactgaccgtactcgggcgtattaggagccgcgttccagcctcacaccccacggtgctgttttcgacttcagaaaggatctagcctcagcacagaagcgcctcaggcgcggcgcaaagctcgagcggacggcgggggcggccggagcctctctcgggggagccgcgcctgaggaggcggaagaacccccctgacgcgactggcgtgtgcttctgcccgccaccgcccctcccgctctcacccgggccgtccctggccactgcccctgccgcggaggcagcggcggcagcggctctcctttccacagccggcgctccgcgacccgcttggctcctgagcccgtcgggtaggctctcctcgagttcccgctcttcaccccttccctcaccctcttctttcgtcacccgtccccgaccccacccgagcccggcgcctcagctgcccccggccatggcgtgcggagccactctgaaaaggactctggatttcgacccgctgttgagcccggcgtccccgaagcgcaggcgatgtgcgccattgtcggcgcccacctcggccgctgcctccccgttgtcggcggccgcggccaccgccgcctccttctccgctgcggccgcctcgccgcagaagtatctccgaatggagccatcccccttcggcgacgtctcctcccgcctcaccacagaacaaattctgtacaacataaaacaagagtataaacgaatgcagaagagaagacatttagaaacgagtttccaacagacagatccgtgttgtacttctgatgcacagccacatgcatttctcctcagtggaccagcttcaccagggacttcatctgcagcatcctcaccattaaaaaaagaacagcccttatttactctacggcaggttgggatgatctgtgaacgtttgttgaaagaacgtgaagagaaagttcgagaagaatatgaagaaatattgaacacaaaacttgcagaacaatatgatgcgtttgtgaagtttacgcatgatcaaataatgcgacgatatggagaacagcctgctagctatgtttcatgaatcacgtatcctgcatttgtgggctgccttgttccttgttgagttgttgcaagaggtcccaattatgacatgcagcaatgccaataccccttctgtgaatacaggttatttcaagctttcgtcagtggcaaccactcttaggcagcagcaactggttttggaaatttccctgatgtcagtaccacctggatgtggacctttgctacctgtattaataccagtggcctcattttgctgtatcattacaatttggcttcttatattaatgtttgaaaaggattaaagctggtattctagaacatgcccttcactggttgtgtaaataaaactgtagaatgacaaaaaaaaaaaaaaaaaaaaa

SEQ ID NO: 11285 - protein, 204 aa, Homo sapiens
  misc_feature (1)..(204): Xaa=Unknown amino acid
MACGATLKRTLDFDPLLSPASPKRRRCAPLSAPTSAAASPLSAAAATAASFSAAAASPQKYLRMEPSPFGDVSSRLTTEQILYNIKQEYKRMQKRRHLETSFQQTDPCCTSDAQPHAFLLSGPASPGTSSAASSPLKKEQPLFTLRQVGMICERLLKEREEKVREEYEEILNTKLAEQYDAFVKFTHDQIMRRYGEQPASYVSX

SEQ ID NO: 11286 - DNA, 580 bp, Rattus norvegicus
  ref <308>: DATABASE ACCESSION NUMBER: EMBL / AA875032
  ref <309>: DATABASE ENTRY DATE: 2000-03-03
tttttttttttttttttctgatcttaattcattttattctacaaaatgctactcagtggaaagtaggaaagccaacaagacaacaagaacataaaacgagaacaaaccccgagggaaaataagttttaatatgttcttccctccatagcagcaagctctaaacagctttccttagtgcaaatactgtaggcttgtgtcacacacagtacacagaacaacgcaacacacaccaccacagatgcttctgagcagagatactcctcaaaaatttaaaactatacaaagattttttgagcacgtggtcctgcctggagaattcgactagagagaccctcctaggaccatttcaccattactgtaaaaacgggacaaaaggtccccagaaaggaaattagaattccccatggagccataaaaccttgtacaactcgtttgcctccagggtctaatagcaaatttcactgcacgtcattgacatatcccaaatacggatgcataaagcttgagtttctacgatataccaaaatacgatatatatacaactcccactgcaaaagaaaccctgatacctagtctttat

SEQ ID NO: 11287 - DNA, 420 bp, Homo sapiens
  ref <308>: DATABASE ACCESSION NUMBER: EMBL / AA579711
  ref <309>: DATABASE ENTRY DATE: 2000-03-03
tttaaatggaataaacttttaatcatacagagaaaataatttttgagaatcaggacaggatcttccactgtgttctcttacaatgtagatgtcttggcgaccactgtccccagaggaatgaaaatccacctttaaaaacagaaccttttatacagtttatacagcacaaatcacaaatcactttagaaacaaaaatgtgttatcctaaatttaaaaaaaaaaaaaaaaggaagcgagaagagagagaggaacggagtattttaatgctatcagtttctattcaggcttgatacaacataaagaagatgtaaacatttaaaataaataataaaataaatgtcaatttcttctccccctccctttcccataaccctctcaaaatttgatccagcccctcctgaacatgtcgtcaagcattgg

SEQ ID NO: 11288 - DNA, 507 bp, Rattus norvegicus; identical to SEQ ID NO: 5225
  ref <308>: DATABASE ACCESSION NUMBER: EMBL / AA875059
  ref <309>: DATABASE ENTRY DATE: 2000-03-03

SEQ ID NO: 11289 - DNA, 354 bp, Homo sapiens; identical to SEQ ID NO: 5226
  ref <308>: DATABASE ACCESSION NUMBER: EMBL / R67025
  ref <309>: DATABASE ENTRY DATE: 2000-03-04

SEQ ID NO: 11290 - DNA, 498 bp, Rattus norvegicus; identical to SEQ ID NO: 5229
  misc_feature (1)..(498): n=a, c, g or t
  ref <308>: DATABASE ACCESSION NUMBER: EMBL / AA875090
  ref <309>: DATABASE ENTRY DATE: 2000-03-03

SEQ ID NO: 11291 - DNA, 1542 bp, Homo sapiens; identical to SEQ ID NO: 5230
  ref <308>: DATABASE ACCESSION NUMBER: Refseq / NM_017595
  ref <309>: DATABASE ENTRY DATE: 2002-11-05

SEQ ID NO: 11292 - protein, 191 aa, Homo sapiens; identical to SEQ ID NO: 5231
  ref <308>: DATABASE ACCESSION NUMBER: Refseq / NP_060065
  ref <309>: DATABASE ENTRY DATE: 2002-11-05

SEQ ID NO: 11293 - DNA, 583 bp, Rattus norvegicus; identical to SEQ ID NO: 5238
  ref <308>: DATABASE ACCESSION NUMBER: EMBL / AA875121
  ref <309>: DATABASE ENTRY DATE: 2000-03-03

SEQ ID NO: 11294 - protein, 335 aa, Rattus norvegicus; identical to SEQ ID NO: 5239
  ref <308>: DATABASE ACCESSION NUMBER: SWISS-Prot / Q62725
  ref <309>: DATABASE ENTRY DATE: 2002-06-15

SEQ ID NO: 11295 - DNA, 2684 bp, Homo sapiens; identical to SEQ ID NO: 5240
  ref <308>: DATABASE ACCESSION NUMBER: EMBL / AK055329
  ref <309>: DATABASE ENTRY DATE: 2002-08-06

SEQ ID NO: 11296 - DNA, 475 bp, Rattus norvegicus
  ref <308>: DATABASE ACCESSION NUMBER: EMBL / AA875171
  ref <309>: DATABASE ENTRY DATE: 2000-03-03
tttttttttttttttttatgagtatggaattaattaaaacttcgaatctttattttgtctggatctttgggcacaacaaaggctggccagcaggtccctcttgtcagtgatattgtctggcctagaagatgccaaaagaagccatgtccacaccacaccagtttggtgcactctgctgagaccacacttggcctctctctgaaaagacactcaaggctcagaacatttctgttcttcatggccgcctggctcacaggatgttccctcgtagtcctgggtcgccccgcaactgctctgagatttcacctaccgggagctgctgacccaggagctgagagtgggtggtttctgtgggctgagtgtgtgggattccatgctgttcgagcagacttgtcagtctttgtacctcccgtgacagctctgcgtgtgcctttctgcaaatgtccagagtctcaagccagcatcctcaaaaagt

SEQ ID NO: 11297 - DNA, 918 bp, Homo sapiens
  ref <308>: DATABASE ACCESSION NUMBER: Refseq / NM_032520
  ref <309>: DATABASE ENTRY DATE: 2002-05-14
atggcggcggggctggcgcggctcctgttgctcctcgggctctcggccggcgggcccgcgccggcaggtgcagcgaagatgaaggtggtggaggagcccaacgcgtttggggtgaacaacccgttcttgcctcaggccagtcgcctccaggccaagagggatccttcacccgtgtctggacccgtgcatctcttccgactctcgggcaagtgcttcagcctggtggagtccacgtacaagtatgagttctgcccgttccacaacgtgacccagcacgagcagaccttccgctggaacgcctacagtgggatcctcggcatctggcacgagtgggagatcgccaacaacaccttcacgggcatgtggatgagggacggtgacgcctgccgttcccggagccggcagagcaaggtggagctggcgtgtggaaaaagcaaccggctggcccatgtgtccgagccgagcacctgcgtctacgcgctgacgttcgagacccccctcgtctgccacccccacgccttgctagtgtacccaaccctgccagaggccctgcagcggcagtgggaccaggtagagcaggacctggccgatgagctgatcaccccccagggccatgagaagttgctgaggacactttttgaggatgctggctacttaaagaccccagaagaaaatgaacccacccagctggagggaggtcctgacagcttggggtttgagaccctggaaaactgcaggaaggctcataaagaactctcaaaggagatcaaaaggctgaaaggtttgctcacccagcacggcatcccctacacgaggcccacagaaacttccaacttggagcacttgggccacgagacgcccagagccaagtctccagagcagctgcggggtgacccaggactgcgtgggagtttgtga

SEQ ID NO: 11298 - protein, 305 aa, Homo sapiens
  ref <308>: DATABASE ACCESSION NUMBER: Refseq / NP_115909
  ref <309>: DATABASE ENTRY DATE: 2002-05-14
MAAGLARLLLLLGLSAGGPAPAGAAKMKVVEEPNAFGVNNPFLPQASRLQAKRDPSPVSGPVHLFRLSGKCFSLVESTYKYEFCPFHNVTQHEQTFRWNAYSGILGIWHEWEIANNTFTGMWMRDGDACRSRSRQSKVELACGKSNRLAHVSEPSTCVYALTFETPLVCHPHALLVYPTLPEALQRQWDQVEQDLADELITPQGHEKLLRTLFEDAGYLKTPEENEPTQLEGGPDSLGFETLENCRKAHKELSKEIKRLKGLLTQHGIPYTRPTETSNLEHLGHETPRAKSPEQLRGDPGLRGSL

SEQ ID NO: 11299 - DNA, 559 bp, Rattus norvegicus
  ref <308>: DATABASE ACCESSION NUMBER: EMBL / AA875205
  ref <309>: DATABASE ENTRY DATE: 2000-03-03
tttttttttttttttttcacacagggttgcttttatttccacatccaacttgagcagaggccctgccacaacctgaacagctgtgaggtgctgggtgcctccagagtttctggcacagtaagtgttgggtgtgcagacttcctgatggccacatgacactggcccacacaggaacagcaagtccatgaatggaaatcccactgagctggaagtggaggctctggaaaccccatgggcagcagcaggagttaaaggagccaccaggaacactgcagtgaggctccaatgcagacagggctgataaaaacccaaacagggcattgtgagagcagaggctcgagtgtccccgctgaggacccggggctgaaggcacagagctgtgtcgggatggaagaaccctgggtgcactcgcagtccagagcacgaaagcacaggtgagaacccagcccgaggctctctgtgaagagtgtggccttggatcttgggcacggcacagtgacacacagtgctgaggtcaatcctgacttcccagaggaatgacctcttcagtgacaaaaaa

SEQ ID NO: 11300 - DNA, 1670 bp, Homo sapiens
  ref <308>: DATABASE ACCESSION NUMBER: EMBL / BC007892
  ref <309>: DATABASE ENTRY DATE: 2001-07-13
ggcacgaggcggcctccctgccccttcacggcccgcctgcctccctgcccaagtcctgagccaccatgctgaccccgatggtggccgggggggtggtgttccccggactcttcctcctctccaagaacacgctccagcggctgccccagctacgctgggaggaggccgacgcagtcattgtctcagccaggctggtgtcctctgtccaggccatcatggcctccactgccggctacatcgtctccacctcctgcaagcacatcattgatgaccaacactggctgtcctctgcctacacgcaatttgctgtgccctacttcatctacgacatctacgccatgttcctctgtcactggcacaagcaccaggtcaaagggcatggaggggacgacggagcggccagagccccgggcagcacgtgggccatagcgcgtggctacctgcacaaggagttcctcatggtgctccaccatgccgccatggtgctggtgtgcttcccactctcagtggtgtggcgacagggtaagggagacttctttctgggttgcatgttgatggcagaggtcagcacgcccttcgtctgccttggcaagatcctcatccagtacaagcagcagcacacactgctgcacaaggtgaacggggccctgatgctgctcagcttcctctgctgccgggtgctgctctttccctacctgtactgggcctacgggcgccatgccggcctgcccctgctggccgtgcccctggccatccctgcccacgtcaacctgggcgctgcgctgctcctggcccctcagctctactggttcttcctcatctgccgtggggcctgccgcctcttctggccccgctcccggccgcccccggcctgccaggcccaggactgaggccgggggccgggaccctccccctccccacccccacccccgtggagacagggctctggggctgatggctggggttgggagccagggtcctcttgcccggacaaccccaggactgacgatgaccccgaaagggaagaggccccatctctcggggactgagggggtggagagaggggacctcttccccctactctgcccccttcctgcacacccttgcgctggaggaggggagggggcaccgcctcccacccactgagggcaggagggcttgtggggagggacaccaacagggtttcaaggggaccaggagtcagaatgtggggagacgcctctgccaaggccatcccagcccctatgctgccatcccccagggctccccatcacccgagaggagaggacgccccaactaacccccgctggccctcgggcctcccgagtggccggctgcaaccacggctcctctccagggtaggccagcttgaggaatcttatttattttatttatttacccaaatttgaactagtctgttgggttgggggaaggaggtggctgctacccccaagccttcccagtgctgacaaccccgggggcaggcgagggcgcccagtccctcaccatcggctgcacatcgcgccctcgggccctgccatgtccctggtgctactgacctctcaaggcttcctccaatctggggtcgggggaccctgggaggtgctttacagaccgctaataaaagacgatctgcgtgaacgccaaaaaaaaaaaaaaaaaaaaaaaaa

SEQ ID NO: 11301 - protein, 814 aa, Homo sapiens
  ref <308>: DATABASE ACCESSION NUMBER: SWISS-Prot / P55884
  ref <309>: DATABASE ENTRY DATE: 2002-06-15
MQDAENVAVPEAAEERAEPGQQQPAAEPPPAEGLLRPAGPGAPEAAGTEASSEEVGIAEAGPEPEVRTEPAAEAEAASGPSESPSPPAAEELPGSHAEPPVPAQGEAPGEQARDERSDSRAQAVSEDAGGNEGRAAEAEPRALENGDADEPSFSDPEDFVDDVSEEELLGDVLKDRPQEADGIDSVIVVDNVPQVGPDRLEKLKNVIHKIFSKFGKITNDFYPEEDGKTKGYIFLEYASPAHAVDAVKNADGYKLDKQHTFRVNLFTDFDKYMTISDEWDIPEKQPFKDLGNLRYWLEEAECRDQYSVIFESGDRTSIFWNDVKDPVSIEERARWTETYVRWSPKGTYLATFHQRGIALWGGEKFKQIQRFSHQGVQLIDFSPCERYLVTFSPLMDTQDDPQAIIIWDILTGHKKRGFHCESSAHWPIFKWSHDGKFFARMTLDTLSIYETPSMGLLDKKSLKISGIKDFSWSPGGNIIAFWVPEDKDIPARVTLMQLPTRQEIRVRNLFNVVDCKLHWQKNGDYLCVKVDRTPKGTQGVVTNFEIFRMREKQVPVDVVEMKETIIAFAWEPNGSKFAVLHGEAPRISVSFYHVKNNGKIELIKMFDKQQANTIFWSPQGQFVVLAGLRSMNGALAFVDTSDCTVMNIAEHYMASDVEWDPTGRYVVTSVSWWSHKVDNAYWLWTFQGRLLQKNNKDRFCQLLWRPRPPTLLSQEQIKQIKKDLKKYSKIFEQKDRLSQSKASKELVERRRTMMEDFRKYRKMAQELYMEQKNERLELRGGVDTDELDSNVDDWEEETIEFFVTEEIIPLGNQE

SEQ ID NO: 11302 - DNA, 469 bp, Rattus norvegicus; identical to SEQ ID NO: 5290
  ref <308>: DATABASE ACCESSION NUMBER: EMBL / AA875263
  ref <309>: DATABASE ENTRY DATE: 2000-03-03

SEQ ID NO: 11303 - DNA, 1866 bp, Homo sapiens; identical to SEQ ID NO: 5291
  misc_feature (1)..(1866): n=a, c, g or t
  ref <308>: DATABASE ACCESSION NUMBER: EMBL / AF015308
  ref <309>: DATABASE ENTRY DATE: 2000-03-03

SEQ ID NO: 11304 - protein, 463 aa, Homo sapiens; identical to SEQ ID NO: 5292
  misc_feature (1)..(463): Xaa=Unknown amino acid

SEQ ID NO: 11305 - DNA, 552 bp, Rattus norvegicus; identical to SEQ ID NO: 5299
  misc_feature (1)..(552): n=a, c, g or t
  ref <308>: DATABASE ACCESSION NUMBER: EMBL / AA875275
  ref <309>: DATABASE ENTRY DATE: 2000-03-03

SEQ ID NO: 11306 - DNA, 424 bp, Homo sapiens; identical to SEQ ID NO: 5300
  ref <308>: DATABASE ACCESSION NUMBER: EMBL / AA761673
  ref <309>: DATABASE ENTRY DATE: 2000-03-03

SEQ ID NO: 11307 - DNA, 497 bp, Rattus norvegicus
  ref <308>: DATABASE ACCESSION NUMBER: EMBL / AA875288
  ref <309>: DATABASE ENTRY DATE: 2000-03-03
tttttttttttttttttcacagatgaggttaatattttaatctatacatcactttttttttttgcaaaccattacacttttatttaaattaactttttcttgcaaaatattcatttcatttttccaacaaaatcttataaaggcaaaaaataaaatcttattttggcaaatgtcatgaagttgatactggcagcatatggagttagttaaaaacagacagtaacttctaaatatattcaaggattttttttcttcttcttttaagcatagtcaaagacaaatttttgtttaaaatgtggctccgcccaatgaaggtgtttttttgttctcattgtttcccgcatgtagaatatcatgagacatgttaaataaagggccccctcctcctcagcggggctggtgtcaagtcacaatcctgtgtcccggccctgcctgccctcctcaccatacggagtcaatggaaactgtccgggctttccccacagcagacagcaaag

SEQ ID NO: 11308 - DNA, 488 bp, Homo sapiens
  misc_feature (1)..(488): n=a, c, g or t
  ref <308>: DATABASE ACCESSION NUMBER: EMBL / AI807080
  ref <309>: DATABASE ENTRY DATE: 1999-12-23
tttcaggntaatattttaatctgnacatcacattttttgggcggaccattacatttttaaattaactttttcttgcaaaatattcatttcattttttccaagaaaatcttataaaggcaaaaataaaattttattttggcaaatgtcatgaagtcgatactggcagcatatggagttagttaaaaatagacaacaactgctaaatatattcaaaattctatttttttttctgagcatagtcaaagagaaattttcatttaaagtgtggctccacccaatggaggttttcgttgttgttgttttttccatttaaacgtcattgtttatatgcagaataatataagaaaacaacttaaataaagggccacaaacactgcacctggcttggtagcccccctcctcatgtggggctggaagtcaaatcaaagtcctgccattatggccctgctggcggcaggccatgagggatggtgggggcacactgctgc

SEQ ID NO: 11309 - DNA, 467 bp, Rattus norvegicus
  ref <308>: DATABASE ACCESSION NUMBER: EMBL / AA875316
  ref <309>: DATABASE ENTRY DATE: 2000-03-03
tttttttttttttttttaggatttcccaatgactttattgaggtaacatttcccaattttatacacacatatatgcatttacgtatacttaggaaagctaaacaatgttctaaggcacttggaactgtgcacagcggagtatcctattatattacattatactactagatagggtataattttccactttaaataacacaaacaccagtatgaattaaaaaaagataatgcatggtctttcaggttacaattgtggaatacataggcttcggtgtggatactcgcaggggtaatacccacgtactatgatatagtagtgaatcaggaacatgaagagagagaaactgtcgtgttgtccgggtacagttccagttatcaacacccacagatagcacacccatggtaagattagatcacacactagagactcacccagctagtctccccaccatcacagtgtgtaccat

SEQ ID NO: 11310 - DNA, 317 bp, Homo sapiens
  ref <308>: DATABASE ACCESSION NUMBER: EMBL / AI267376
  ref <309>: DATABASE ENTRY DATE: 2000-03-03
gcgtggtcgcggccgaggtaccaggccttacatgtctcaagaccttacatacaaagaggtgttaaaaacttaggtgaagctgaaataacaggcaattagggaagttgtcttactcttttttcttttttcatttaaaaaggctgagcactatccaaatataagagaaactggaacaaactaaaactggggatttcccaatgattttattgaggtaacttttcccaattttatacatatatgcatttatatatacttaggaaagctaaacaatgttctaaggcacttggaattgtgcacagcaaagtatcctctaatat

SEQ ID NO: 11311 - DNA, 472 bp, Rattus norvegicus; identical to SEQ ID NO: 5323
  ref <308>: DATABASE ACCESSION NUMBER: EMBL / AA875348
  ref <309>: DATABASE ENTRY DATE: 2000-03-03

SEQ ID NO: 11312 - DNA, 393 bp, Rattus norvegicus; identical to SEQ ID NO: 5343
  ref <308>: DATABASE ACCESSION NUMBER: EMBL / AA875511
  ref <309>: DATABASE ENTRY DATE: 2000-03-03

SEQ ID NO: 11313 - DNA, 887 bp, Homo sapiens; identical to SEQ ID NO: 5344
  misc_feature (1)..(887): n=a, c, g or t
  ref <308>: DATABASE ACCESSION NUMBER: EMBL / BF980184
  ref <309>: DATABASE ENTRY DATE: 2001-01-25

SEQ ID NO: 11314 - DNA, 481 bp, Rattus norvegicus
  ref <308>: DATABASE ACCESSION NUMBER: EMBL / AA875559
  ref <309>: DATABASE ENTRY DATE: 2000-03-03
ttttttttttttttttccaggcttaaggttttttatttcctttgtaatgtttggaacacaaatgaagatttgataactttattccattatctaaaaagcataaattattcatgcatagtgtatggacttcgttttgtagcaaatcacaggatttgttcaaataacagatattttaagtgtgtgaatgtaaataatcatagatgagaatgtaccttgctgtattttcaaataagtaaccttctcctttttaagacattaagactcgttgatctatcagttgacccgctcctcctgctatgcctggaattctgttgtggtaatgctgactcctgttttccatcaaaaagatggagttttcagaatcatctggcacctgtaaaacatcactaacatagtgtgtaggcctgcggcctaccgatgactctgtacacgtttgttgctaactgtaaattactaataaatcttttttcctcgtgccgaa

SEQ ID NO: 11315 - DNA, 1241 bp, Homo sapiens
  ref <308>: DATABASE ACCESSION NUMBER: EMBL / AL117499
  ref <309>: DATABASE ENTRY DATE: 2000-02-18
ggaagagattgacagagagtttcataataaacttaaattaaaagaagataaacttgagaaacaggagaagcctgtaaatggtgaagataaaggagactcaggagttgatacccaaaacagtgaaggaaatgccgatgaagaagatccacttggacctaattgctattatgacaaaactaaatccttctttgataatatttcttgtgatgacaatagagaacggagaccaacctgggctgaagaaagaagattaaatgctgaaacatttggaatcccacttcgtccaaaccgtggccgtgggggatacagaggcagaggaggtcttggtttccgtggtggcagagggcgtggtggtggcagaggtggtaccttcactgcccctcgaggatttcgcggtggattcagaggaggtcgtgggggccgggagtttgcggattttgaatataggaaaaccacagcttttggaccctaaaaggtctggattgatcgtactgctttctgaaagaaagacaacaaagttgctgcatagtctacaaacaagtctctgaaaataggtgaatttctagctcttcatggtcctgaacattgatttcagtctttgcaaagaatgaagaagtgaattcgctgtacatttgtcaccagcactgggtttttgttttttgtttgtttttccgcttaatttcaaagataaaatgcagttacttttgggggtggaaggctcatcttaaaacatgagcattaaatatatttggaatagcagaaggttaagtaatttcttatgtatagttaaactaaagcagtacttcagtgggacttaacaagtattttttcatcactgaaaggttttttttttttatcactaaattgtatttggcaattgcaagttgcctgcagatagggccgtgatactgtgttttgagccacagaaggttgtgtgtgtgtgtgtgtgtgtgtgtgtgtgtgtgtgtgtatgtgtgtgtctttttcctcctttcttttggggaatcctgtaatatgaggtagcttatttcgtcaattaattagggtgctggatggtagagaattttgtcagtcaactatgtacacacagtaaatactgtttcttaggcaaaggtaacttttttatatagttgtaaaattccattatattccattgccaaagaaacattaagaactttgtatagctgtataaaaagcaactaattttttaaagaataaacattttaaagtcaaaaaaaaaa

SEQ ID NO: 11316 - DNA, 3913 bp, Rattus norvegicus
  ref <308>: DATABASE ACCESSION NUMBER: EMBL / X77209
  ref <309>: DATABASE ENTRY DATE: 1997-01-30
acactcggatagctggcacaaggcagtagtaagaaggagtccaacttgtcagttttgagtagcagctaaggcctgaaaattaagaagaatgtatttcaggacaacacaaagctgggtatgtgcttcaaatccaggacattttaacaaggtcagcagcagtcagcattacaacccgcaagtgatgacttcattgtgctcgttaactttacaggccccagtgactggcatctcataagacaaagccttcaacagccccctcctcccccaggctcttagtcacgctttattacagtgaattaaccacagcacagcactcaccttcccagcacagaggacaaagggcttgttagacaatgagatgatcatgacattctagtcacttgtaggaactccaccttagtctgggtcctaggttagcccacatctaggtgaggggatggggcccctgggcggccttcagacatcgccctggaagagttaattaagacaatcgatgagaagcaggaacagggcatgtacctcaatagagccagtgctggaacatggttccatctcaaggaagaggagtaagaattcaggttccccaaatgagtcagatttatagttgacatcaagggcagagtcagagactctagtctgtgaaatcatcattctcaattgagggagacccaaaccaagggcagcatccagggatgttaatccagagagacagtaagaacagggtgtggtagcccgtgtctgtactgttaggtttagactgttacagagctgcaaaaacccaaaaccactctggagactgaaatagaacctaaaatcataacgaaaaagtgacacaaccccaagccaagcactaggactaaagccatcctggactgaatgagcccgtctgaataccccaaaacatggtctagagcagtggctctccacccttagtcaccaagggagctttacacagggctcccagataggacaccctgcatatcgcatcagcaccaaagactagatatgaagaagcaacgaaataactttgatggttgggaacataacacgagggaactgtattaaaggtttgcaggggggggctggggatttagctcagtggtagagcacttgcctagcaagggcaaggccctgggttcggtcctcagctccggaaaaaaaaaatcttgaagaaaacggatcaatagacaacttgagttttatttatttcttttcttttctttttttgggagctggggaccgaacccagggccttgtgcttgcgaggcaagtgctctaccactgagctaaatccccaaccccttgagttttatttttaaaaaacccccactaccttaaatacgattttacatctcctttctccataggcctcggaaaaccatggctgctaataaaggaatggccataggcatcgacctgggcaccacctactcgtgcgtgggcgtgttccagcacggcaaggtggagatcatcgccaacgaccagggcaaccgcacgaccccaagctacgtggccttcaccgacaccgagcggctcatcggggacgccgccaagaaccaggtggccatgaatccccagaacactgtttttgacgccaaacgtctaattggcaggaagtttaatgatcccgtcgtgcagtcggatatgaagctgtggccatttcaagtgatcaatgaagcgggcaagcctaaggtgctggtgtcctacaaaggagagaagaaagccttctacccggaggagatctcgtccatggtgctgaccaagatgaaggagactgcagaggcttttttgggccacagtgtcaccaacgctgtgatcaccgtgccagcctatttcaatgactcccagagacaggccactaaagatgcaggggtcatcgcaggactcaacgtgctgcgaatcatcaatgagcccacagcggcggccatcgcctacggcttggataaaggaagtcacggagagcggcacgtgctcatcttcgacctggggggcggcacgttcgacgtgtccatcctgacgatcgacgacggcatcttcgaggtgaaggccacggcgggcgacacgcacctgggcggggaggacttcgacaaccggctggtgagccacttcgtggaggagttcaagaggaaacacaagaaggacatcagccagaacaagcgagcggtgcggcgtctggccacggcgtgcgagagggccaagaggacgctgtcgtccagcacccaggccaacctggagatcgactctctgtacgagggcatcgacttctacacgtccatcacgcgggcgcggttcgaggagctgtgtgcagacctatttagaggcacgcttgagcccgtggagaagtctctccgggacgccaagatggacaaggctaaaatccatgacattgttctagtagggggctctacccgcatcccaaaggtgcaaaagctgcttcaagactactttaatggacgggatctcaacaagagtatcaatcccgatgaggcggtggcgtacggagctgcagtccaggcagctattttaatgggcgacaaatctgaaaaagtacaggatttgcttttgttggacgtagctcccctgtctctaggattggagacagccgggggtgtgatgactgttctgatcaagcgcaactccaccatccccaccaagcagacgcagatcttcaccacctactcggacaaccagcccggggtgctgatccaggtgtacgagggcgagagggccatgacgcgcgacaacaacctcctggggcgctttgacctgactggaataccccctgcacctaggggtgtgccccagatcgaggtgaccttcgacatcgacgccaacgggattctcaacgtcacagccatggacaagagcaccggcaaggccaacaagatcaccatcaccaacgacaagggccgcttgagcaaggaggagatcgagcgcatggtgcaagaggccgagcggtacaaggccgaggacgagggccagagggagaagatcgctgccaaaaatgccttagaatcgtatgcctttaacatgaagagcgctgtaggcgatgagggtctgaaggacaagatcagcgagtctgataaaaagaaaatactggataaatgcagtgaggtcctttcctggctggaggccaaccagctggcggagaaagaagagttcgatcataaaagaaaagagctggaaaacatgtgcaaccctatcatcacaaagctgtaccagagcggctgcacagggcccacctgcgcgccagggtatacacccggcagggctcgcacaggccccaccattgaggaagtagattagctttcccagaaaggcagggtgctagggtgcctctaggcgacatttattcacctccaaacatcatcactgtgattcttgaactgactggacttgagcctaagtcaccatcctttgggatctgatgcagaacccacggactccgcctttccacgcccccaccctctgatctatgatcctgaactggatctttagcacaaccaggcccctctttgagcctcgtgaagaatttggatgtctgttatttatcatccacaccccgcctttcacctccctgtgtggatggttatttgtctctcagtaaatttgttcccaaaggaaacgtctgtcacttttcgatttgtttagtcgagggccttactgtatatgtctagctgacctgacgcttaccgcattggccaatttggtccttaacttgcagcaatcctcctgtctctgccacctgaatttcgagattacggacctgcaccatcatgcccaacttgtgattttttttttttgggaggcagggtttcttgaagcctaggttagcctagaacattctatacaccgagctctactaccttaaatacgattttacatctcctttctccataggcctcggaaaacc

SEQ ID NO: 11317 - protein, 641 aa, Rattus norvegicus
  ref <308>: DATABASE ACCESSION NUMBER: SWISS-Prot / CAA54424
  ref <309>: DATABASE ENTRY DATE: 1996-10-01
MAANKGMAIGIDLGTTYSCVGVFQHGKVEIIANDQGNRTTPSYVAFTDTERLIGDAAKNQVAMNPQNTVFDAKRLIGRKFNDPVVQSDMKLWPFQVINEAGKPKVLVSYKGEKKAFYPEEISSMVLTKMKETAEAFLGHSVTNAVITVPAYFNDSQRQATKDAGVIAGLNVLRIINEPTAAAIAYGLDKGSHGERHVLIFDLGGGTFDVSILTIDDGIFEVKATAGDTHLGGEDFDNRLVSHFVEEFKRKHKKDISQNKRAVRRLATACERAKRTLSSSTQANLEIDSLYEGIDFYTSITRARFEELCADLFRGTLEPVEKSLRDAKMDKAKIHDIVLVGGSTRIPKVQKLLQDYFNGRDLNKSINPDEAVAYGAAVQAAILMGDKSEKVQDLLLLDVAPLSLGLETAGGVMTVLIKRNSTIPTKQTQIFTTYSDNQPGVLIQVYEGERAMTRDNNLLGRFDLTGIPPAPRGVPQIEVTFDIDANGILNVTAMDKSTGKANKITITNDKGRLSKEEIERMVQEAERYKAEDEGQREKIAAKNALESYAFNMKSAVGDEGLKDKISESDKKKILDKCSEVLSWLEANQLAEKEEFDHKRKELENMCNPIITKLYQSGCTGPTCAPGYTPGRARTGPTIEEVD

SEQ ID NO: 11318 - DNA, 453 bp, Rattus norvegicus
  ref <308>: DATABASE ACCESSION NUMBER: EMBL / AA891311
  ref <309>: DATABASE ENTRY DATE: 2000-03-03
cccggagctggggaccaaacccagggccttgtgcttgctaggcaagcgctctaccactgagctaaatccccaacccctgtaaacttttttcttaagaaagtaaggattcttactaatttgcggtaaacccacaccaatctgtgctgttagatttctttcagttcactggtgcgttcaagaacagacatttctcctcagagctgtggacttacctttcttaacactgtttgcaaactcactaactgacgaaaagtactgagttttcttgtatttattgagtttacttttaatgtttaataaacataccacatggtttattttaaaccattaatgaagccggaaggcttcagttccaaacctgcatagcaatgttacacacacccacagagaggcagcttaaacctccattcctcctctaattgatagctgcttttttaagccaatgatctgatt

SEQ ID NO: 11319 - DNA, 485 bp, Rattus norvegicus; identical to SEQ ID NO: 5406
  misc_feature (1)..(485): n=a, c, g or t
  ref <308>: DATABASE ACCESSION NUMBER: EMBL / AA891314
  ref <309>: DATABASE ENTRY DATE: 2000-03-03

SEQ ID NO: 11320 - DNA, 1964 bp, Homo sapiens; identical to SEQ ID NO: 5407
  ref <308>: DATABASE ACCESSION NUMBER: EMBL / AF176330
  ref <309>: DATABASE ENTRY DATE: 2000-10-28

SEQ ID NO: 11321 - protein, 403 aa, Homo sapiens; identical to SEQ ID NO: 5408
  ref <308>: DATABASE ACCESSION NUMBER: SWISS-Prot / P57723
  ref <309>: DATABASE ENTRY DATE: 2002-06-15

SEQ ID NO: 11322 - DNA, 410 bp, Rattus norvegicus; identical to SEQ ID NO: 5457
  ref <308>: DATABASE ACCESSION NUMBER: EMBL / AA891578
  ref <309>: DATABASE ENTRY DATE: 2000-03-03

SEQ ID NO: 11323 - DNA, 486 bp, Rattus norvegicus
  misc_feature (1)..(486): n=a, c, g or t
  ref <308>: DATABASE ACCESSION NUMBER: EMBL / AA891580
  ref <309>: DATABASE ENTRY DATE: 2000-03-03
aaagccatatgctacacatataacaccttctctctctgtaaggttgacattattcagagagacagtcagaccacaaaccacaaaacaacagtcagacaacaagcactttacagcgcccaccacagtctgtacactaagaacagtcctaagacggcatccgccttctccttcttcaatcaggatgaagctgtcactgacattccagtaacatgctgacgtggttgtcattgtttcaagtcacaccaaactgacatcagagagtacaaggttctttaatcaaacaaaaaattagtcttatttaaattaagagaaattcacttaaactaaaaataatttatttgagctgagagttttaaatacctaacacattttttcagggaaatgttggtaccatctctgagccagctttccttcctccagactgtatctgtataagaatatataatttacttatctctcagtcattttcagannacacgtatctct

SEQ ID NO: 11324 - DNA, 2022 bp, Rattus norvegicus
  ref <308>: DATABASE ACCESSION NUMBER: EMBL / AF262320
  ref <309>: DATABASE ENTRY DATE: 2001-06-08
tcgccgaaatgttccggtgtggaggcctggcgggtgctttcaagcagaaactggtgcccttggtgcggtcggtgtgcgtccagaggccgaaacagaggaaccggcttccagttgtgcagtgtcatctcctaggattcccttctagatcactagcgtctgcaggtgcttctgggaaagatggcagcaacctagtatacttcttaattgtaggagcaacagtgactggggcaggaatttattatgcctacaagactattaaagaagaccaaaaaagatataatgaaagaataatgggattaggactgtcaccagaagagaaacagagaagagccattgcctctgctgcagaaggaggctcagttcctccaatcagggtaccaagtcacgtccctttcctgctgattggtggaggtactgctgcctttgcagcagctagatccatccgggctcgggatcctggggccagggtcctcatcgtatctgaagaccctgaactaccatacatgcgacctcctctttcaaaagaattgtggttttcagatgacccaaatgtcacaaagacactgcagttcagacagtggaatggaaaagagagaagcatctatttccagccaccttctttctatgtctctgctcaggacctgcctcatattgagaatggtggtgtggctgtcctcaccgggaagaaggtagtccacctggatgtaagaggcaacatggtgaaacttaatgatggctctcagattacctttgaaaagtgcttgattgcaacgggaggcactccaagaagtctgtctgctatcgatagggctggagcagaggtgaagagtagaacaacacttttcagaaagattggagattttagagccttggagaagatctcccgggaagtcaagtcaattacagttattggtggaggcttccttgggagcgaactggcctgtgctcttggcagaaagtctcaagcctcaggcatagaagtgattcagctcttccctgagaaaggaaatatggggaagatccttcctgaatacctcagcaactggaccatggaaaaagtcaaacgagagggagtgaaagtgatgcccaatgcaattgtacaatcagttggagtcagcggtggcaagttactcattaagctaaaggacggaaggaaggtagaatctgaccacatagtaacagctgtgggcctagaacccaatgtcgagttggccaagactggtgggctggaaatagattccgattttggtggcttccgggtaaatgcagagctccaagcacgttctaacatctgggtggcaggagatgctgcatgcttctatgatataaagttgggtcgaaggagagtagaacatcatgatcacgctgttgtgagtggaagactggctggagaaaatatgactggagctgctaagccatactggcatcagtcaatgttctggagtgatttgggtcctgatgttggctatgaagctattggtctggtggatagtagtttgcccacagttggtgtttttgcaaaagcaactgcacaagacaacccaaaatctgccacagagcagtcaggaactggtatccgttcggagagtgagacagagtctgaagcttctgaaatcacaatccctcccagtgaccctgcagtcccacaggtccctgttgaaggggaggactacggcaaaggtgtcatcttctacctcagggacaaagttgtggtggggattgtgctatggaacgtctttaaccgaatgccgattgcaaggaagatcattaaagacggtgagcaacatgaagacctcaatgaagtagccaaactcttcaacattcatgaagattgaatccctatcatggaatacacaagcacttttccatccctgacagggaatgggtggataaaagaacattttttattcagcatactttttctttatgtaggagcaggaatcgaacaagcctctgtgaatattttcatctgtataaatgcacatcacaaattaaaatctgattctttaaaaaaaaaaaaaa

SEQ ID NO: 11325 - protein, 612 aa, Rattus norvegicus
  ref <308>: DATABASE ACCESSION NUMBER: SWISS-Prot / Q9JM53
  ref <309>: DATABASE ENTRY DATE: 2002-06-15
MFRCGGLAGAFKQKLVPLVRSVCVQRPKQRNRLPGNLFQQWRVPLELQMARQMASSGPSGGKMDNSVLVLIVGLSTIGAGAYAYKTIKEDQKRYNERIMGLGLSPEEKQRRAIASAAEGGSVPPIRVPSHVPFLLIGGGTAAFAAARSIRARDPGARVLIVSEDPELPYMRPPLSKELWFSDDPNVTKTLQFRQWNGKERSIYFQPPSFYVSAQDLPHIENGGVAVLTGKKVVHLDVRGNMVKLNDGSQITFEKCLIATGGTPRSLSAIDRAGAEVKSRTTLFRKIGDFRALEKISREVKSITVIGGGFLGSELACALGRKSQASGIEVIQLFPEKGNMGKILPEYLSNWTMEKVKREGVKVMPNAIVQSVGVSGGKLLIKLKDGRKVETDHIVTAVGLEPNVELAKTGGLEIDSDFGGFRVNAELQARSNIWVAGDAACFYDIKLGRRRVEHHDHAVVSGRLAGENMTGAAKPYWHQSMFWSDLGPDVGYEAIGLVDSSLPTVGVFAKATAQDNPKSATEQSGTGIRSESETESEASEITIPPSDPAVPQVPVEGEDYGKGVIFYLRDKVVVGIVLWNVFNRMPIARKIIKDGEQHEDLNEVAKLFNIHED

SEQ ID NO: 11326 - DNA, 600 bp, Homo sapiens
  ref <308>: DATABASE ACCESSION NUMBER: EMBL / AV651040
  ref <309>: DATABASE ENTRY DATE: 2002-01-10
gttaaactagcatatctgcctttattgtgtttgtcattagcctgagtagaaaggcctttaaaatttttttagaaagcatttgaatgcattttgtttggtattgtatttattcaataaagtatttaattagtaaaaaaaaaaaaaaaaaaaaactcgagactagatttcacgggaagtcaaatcaattacgattatcggtgggggcttccttggtagcgaactggcctgtgctcttggcagaaaggctcgagccttgggcacagaagtgattcaactcttccccgagaaaggaaatatgggaaagatcctccccgaatacctcagcaactggaccatggatggagtcagcagtggcaagttacttatcaagctgaaagacggcaggaaggtagaaactgaccacatagtggcagctgtgggcctggagcccaatgttgagttggccaagactggtggcctggaaatagactcagattttggtggcttccgggtaaatgcagagctacaagcacgctctaacatctgggtggcaggagatgctgcatgcttctacgatataaagtttgggaaggaagcgggtagagcaccatgatcacgctg

SEQ ID NO: 11327 - DNA, 2356 bp, Rattus norvegicus
  ref <308>: DATABASE ACCESSION NUMBER: Refseq / NM_013006
  ref <309>: DATABASE ENTRY DATE: 2002-11-05
ctcgcacgcccttcggctgccgggagcccgagctcccttccgccttccgacgcgctgtccgccagccggtggatgtgcggcaacaacatgtccgccccgatgcccgccgttgtgcccgccgcccggaaggccaccgccgcggttattttccttcacggattgggagatactgggcacggatgggcagaagccttcgcaggtatcaaaagttcccacatcaaatacatctgtccacatgcgcctgttatgccagtcacactaaacatgagtatgatgatgccttcttggtttgatattattggactttcaccagattcccaggaggatgaatctggaattaagcaggcggcagaaactgtaaaagccttgatagatcaagaagtgaagaatggcattccttctaacagaattattttgggaggattttctcagggaggcgccttatctttatacactgctctcaccacacagcagaaactggctggtgtcactgcactcagttgctggcttccacttcgggcttcgttttcacaggggcctatcaatagtgctaatcgagatatttctgttctccagtgtcatggagactgtgaccctttagttcccctaatgtttggttctcttactgttgaaagactaaaaggattggtaaatccagccaatgtaaccttcaaagtctatgaaggcatgatgcacagctcatgtcagcaggaaatgatggatgtcaagtacttcattgataagctcctacctccaattgattgatgtcactaagaggccttgagtagacgttcaccagcatcacagtagtggagtataaacctttccccatgactgatcataaaactgctaatgtttgcagtgttaaaatgttttgcaaatacataccaatgagacagactaaatgatgtctccctcatgggaaatgtatgatccttttacgtttctatgcatatatttgtataatacaattcagaatatactagtattacagtaggtaagtgaagcaactagcttctttgtctcaaattaattcagcaaaataagataacacaagcagagttttattacatcatttcaattactagtatgctctctgaaagtttgttcaggtctaaacaagctgttaagatgtaagtgacttcttaattctgtgagttagactatagttttactccacaagtgttgagtcatcacgcagtgtctgtgtttctgtttgtattcacacatacgtgactgggatacctaagatggtattacatcatccctgaccatagggatcgtgctcttaagtgtcaaaagtaatactgctctctgcaattaatcgccctgctactgggggaccaggcttccccccttcgatgtaacttttctcctttcaagaagaaaaaggtagattcttttttggtttccatagaaaagtaatattgcctccctgtcataaagaaatatctgtcattatatattattttgacattctgaaacacagacatacagtatttccaatataggtaatatgaaaagaaaccacacattacttaagcgtacatatttcaaataacaatcttcagaccagaatcttcagtgctggtcattaattctgtggttttatttttctataaaaacttaaagggtaaataatatcttggcgtgtttagaaatacttgtgactggttttagaatataatttcttaaacatagcagagtttaagtttacattttctgtacatgttatgcttaaaaccaaatactgttcaagatgagcagtcaaatttgttttattttcatctgggtaacatgctaatttgaaattttcatcttcagtaaaggagcttttgataatcagtctcctgtgcaaatattaaaataacaatcatttgattttaaatcatcaacatgttcaaaatactgctgaaaattatttaatttatggataataaggactggttagaacccacatatataaacccatatttataactgtttccacacagttgagtatgttacaaaaattatggttatttctgaacagtttcttttcctgctgtttttcaaccgaccaagaagaaggaagcatctttgtaagcaggagctaactgatgtggggtcatttggtgtgtccgagatagagtgttaacaatgaagccgattgtttatgtctagatttaaaacaatttcaaacaatcatttactattttgctttactttgaagagcatacatttacttcagttattgtatctgtaaaaatttatttggggtaagaaatattccgttgaatttgtgtgctgtaatgtgggaaaatgtcatgtttttcacagtttctatcaatgtgaaataaaatttaattttggcttt

SEQ ID NO: 11328 - protein, 230 aa, Rattus norvegicus; identical to SEQ ID NO: 4612
  ref <308>: DATABASE ACCESSION NUMBER: Refseq / NP_037138
  ref <309>: DATABASE ENTRY DATE: 2002-11-05

SEQ ID NO: 11329 - DNA, 442 bp, Homo sapiens; identical to SEQ ID NO: 4613
  ref <308>: DATABASE ACCESSION NUMBER: EMBL / BE018412
  ref <309>: DATABASE ENTRY DATE: 2000-06-14

SEQ ID NO: 11330 - protein, 230 aa, Homo sapiens; identical to SEQ ID NO: 4614
  ref <308>: DATABASE ACCESSION NUMBER: Refseq / NP_006321
  ref <309>: DATABASE ENTRY DATE: 2002-11-05

SEQ ID NO: 11331 - DNA, 450 bp, Rattus norvegicus
  ref <308>: DATABASE ACCESSION NUMBER: EMBL / AA891713
  ref <309>: DATABASE ENTRY DATE: 2000-03-03
aagtcaaataatttattagcacatagaaccctccagaaaaatattgccttgtggtctgttgggcaggagcaaaggcagcacctgaatgtggccatcatcttcagtgtgaacttctaagtcctagcccaggtgggtagccctcacttctcatagcttcagaatatggtattggggcaggtgggtggggcagccctgctactcattttgaacactgaagatcaggtcattccatggttatcactttaataatgtaaaactcaagcaggtgatgagctctcactcagctgtctaaatgcaccctctacctacaggagcagtgactaaggaccctttggtccccacatccctggtcggcggtggaggaagggcaggccaggcaggcatgaggcacaaacagtctttactgggttcacaccaagagtccattggtcttgaggacctctgtgaact

SEQ ID NO: 11332 - protein, 202 aa, Rattus norvegicus
  ref <308>: DATABASE ACCESSION NUMBER: SWISS-Prot / P35427
  ref <309>: DATABASE ENTRY DATE: 1995-11-01
AEGQVLVLDGRSHLLGRLAAIVAKQVLLGRKVVVVRCEGINISGNFYRNKLKYLAFLRKRMNTNPSRGPYHFRAPSRIFWRTVRGMLPHKTKRGQAALERLKVLDGIPPPYDKKKRMVVPAALKVVRLKPTRKFAYLGRLAHEVGWKYQAVTATLEEKRKEKAKIHYRKKKQLLRLRKQAEKNVEKKICKFTEVLKTNGLLV

SEQ ID NO: 11333 - DNA, 161 bp, Homo sapiens
  ref <308>: DATABASE ACCESSION NUMBER: EMBL / AA093491
  ref <309>: DATABASE ENTRY DATE: 2000-03-03
aggcggaggtgcaggtctggtgcttgatggtcgaggccatctcctgggccgcctggcgcaattcgtggctaaacaggtactgctgggccggaaggtggtggtcgtacgctgtgaaggcatcaacatttctggcaatttctacagaacaagttgaagtcacc

SEQ ID NO: 11334 - protein, 923 aa, Homo sapiens
  ref <308>: DATABASE ACCESSION NUMBER: SWISS-Prot / P52790
  ref <309>: DATABASE ENTRY DATE: 2002-06-15
MDSIGSSGLRQGEETLSCSEEGLPGPSDSSELVQECLQQFKVTRAQLQQIQASLLGSMEQALRGQASPAPAVRMLPTYVGSTPHGTEQGDFVVLELGATGASLRVLWVTLTGIEGHRVEPRSQEFVIPQEVMLGAGQQLFDFAAHCLSEFLDAQPVNKQGLQLGFSFSFPCHQTGLDRSTLISWTKGFRCSGVEGQDVVQLLRDAIRRQGAYNIDVVAVVNDTVGTMMGCEPGVRPCEVGLVVDTGTNACYMEEARHVAVLDEDRGRVCVSVEWGSLSDDGALGPVLTTFDHTLDHESLNPGAQRFEKMIGGLYLGELVRLVLAHLARCGVLFGGCTSPALLSQGSILLEHVAEMEDPSTGAARVHAILQDLGLSPGASDVELVQHVCAAVCTRAAQLCAAALAAVLSCLQHSREQQTLQVAVATGGRVCERHPRFCSVLQGTVMLLAPECDVSLIPSVDGGGRGVAMVTAVAARLAAHRRLLEETLAPFRLNHDQLAAVQAQMRKAMAKGLRGEASSLRMLPTFVRATPDGSERGDFLALDLGGTNFRVLLVRVTTGVQITSEIYSIPETVAQGSGQQLFDHIVDCIVDFQQKQGLSGQSLPLGFTFSFPCRQLGLDQGILLNWTKGFKASDCEGQDVVSLLREAITRRQAVELNVVAIVNDTVGTMMSCGYEDPRCEIGLIVGTGTNACYMEELRNVAGVPGDSGRMCINMEWGAFGDDGSLAMLSTRFDASVDQASINPGKQRFEKMISGMYLGEIVRHILLHLTSLGVLFRGQQIQRLQTRDIFKTKFLSEIESDSLALRQVRAILEDLGLPLTSDDALMVLEVCQAVSQRAAQLCGAGVAAVVEKIRGNRGLEELAVSVGVDGTLYKLHPRFSSLVAATVRELAPRCVVTFLQSEDGSGKGAALVTAVACRLAQLTRV

SEQ ID NO: 11335 - DNA, 989 bp, Rattus norvegicus
  ref <308>: DATABASE ACCESSION NUMBER: Refseq / NM_031777
  ref <309>: DATABASE ENTRY DATE: 2002-11-05
atgaaggggcagcagaaaacagctgaaaccgaagaggggacagtgcagattcaggaaggtgcagtggctactggagaggacccaactagtgtagctatcgccagcatccaatcagctgccactttccccgaccccaacgtcaagtacgtcttccgaactgagaatgggggccaggtgatgtacagggtgatccaggtgtctgaggggcagctggatggccagacagagggctctggcgctatcagtggctaccctgccactcagtctatgactcaggcagtaatccagggggctttcaccagtgatgatgctgttgacgcggagggaacagctgccgagacccactacacttacttccccagcaccgcagtgggagatgggtcagggggtacgacatctgggagtacaaccgccgtggtcaccacccagggctcagaggcactgctggggcaggcaaccccgcccagcacaggccaattctttgtgatgatgtcaccacaagaagtgttacagggagggagccagcggtcaattgcccccaggacccacccttattccccgaagtcagaggctcccaggacaacgcgagatgagaaacggagggctcaacataacgaagtggagcgccgccgccgggacaagatcaacaactggattgtacagctgtccaaaatcatcccagactgctctatggagagcaccaagtctggccagagtaagggtggaatcctgtccaaagcctgtgactatatccaggaactacgtcagagcaaccaccggctgtctgaagagctgcaggggttagatcagttgcagctcgacaatgacgtgcttcgacagcaggtggaagatcttaaaaacaagaacctgctactacgagctcagttacggcaccacggattagaggtcgtcatcaagaatgacagcaactaactgtggggactcaggggctttgggcccgagaactgcacatagcccagtagccactg

SEQ ID NO: 11336 - protein, 310 aa, Rattus norvegicus
  ref <308>: DATABASE ACCESSION NUMBER: Refseq / NP_113965
  ref <309>: DATABASE ENTRY DATE: 2002-11-05
MKGQQKTAETEEGTVQIQEGAVATGEDPTSVAIASIQSAATFPDPNVKYVFRTENGGQVMYRVIQVSEGQLDGQTEGSGAISGYPATQSMTQAVIQGAFTSDDAVDAEGTAAETHYTYFPSTAVGDGSGGTTSGSTTAVVTTQGSEALLGQATPPSTGQFFVMMSPQEVLQGGSQRSIAPRTHPYSPKSEAPRTTRDEKRRAQHNEVERRRRDKINNWIVQLSKIIPDCSMESTKSGQSKGGILSKACDYIQELRQSNHRLSEELQGLDQLQLDNDVLRQQVEDLKNKNLLLRAQLRHHGLEVVIKNDSN

SEQ ID NO: 11337 - DNA, 1739 bp, Homo sapiens
  ref <308>: DATABASE ACCESSION NUMBER: EMBL / X55666
  ref <309>: DATABASE ENTRY DATE: 1991-02-15
ggaattccttgaaaattttccttggataggaaaggacttagcactcaggcctgtgaatctaggagatacaaagacctccaaaaaaggaccagttcctcggatgtgccccctcacagagagatgaaggggcagcagaaaacagctgaaacggaagaggggacagtgcagattcaggaaggtgcagtggctactggggaagacccaaccagtgtggctattgccagcatccagtcagctgccaccttccctgaccccaacgtcaagtacgtcttccgaactgagaatgggggccaggtgatgtacagggtgatccaggtgtctgaggggcagctggatggccaaactgagggaactggcgccatcagtggctaccctgccactcaatccatgacccaggcggtgatccagggtgctttcaccagtgatgatgcagttgacacggaggggacagctgctgagacgcactatacttacttccccagcacggcagtgggagatggggcagggggtaccacatcggggagtacagctgctgttgttactacccagggctcagaggcactgctggggcaggcgacccctcctggcactggtcaattctttgtgatgatgtcaccacaagaagtactgcagggaggaagccagcgctcaattgcccctaggactcacccttattccccgaagtcagaagctccccggacgactcgggatgagaaacgcagggctcagcataatgaagtggagcgtcgccgccgagacaagatcaacaactggatcgtgcagctctccaagataatcccagactgctctatggagagcaccaagtctggccagagtaaaggtgggattctatccaaagcttgtgattatatccaggagcttcggcagagtaaccaccgcttgtctgaagaactgcagggacttgaccaactgcagctggacaatgacgtgcttcgacaacaggtggaagatcttaaaaacaagaatctgctgcttcgagctcagttgcggcaccacggattagaggtcgtcatcaagaatgacagcaactaactatggggattcaggggctttgggcccaagaactgcagatagcccaggagcaacagcctaatcccgtgcccctttccttcactgccccacttctggcatgggacagggggaagttcagaaggtgtgtccttgaactgaggccctgtgatatggcggcctgcagtggtgtgaagcacacaatgtggaacgtgcactgacagccttgcccacccccaccatgcagcccctgggccttgtgctcctctcgcacaatgcatgtgctgtctccatgctggatactggacacactaaactctggggcttgtcctgtgcttgcttagagtgcccagcagaggtttgctgacaggtgatgctctggcttgccccaggactctggcacttccattggttcttcctttccctggagctgaggtttagatgtgcaacctgtggctcaggggagcaagcttacacaagaagtgagggaaggatgtttagcagtggctggtgcccatgaagaggagattggccagtgagaagctgaggcctatgcagacatctctggagccagagagaacaacaggcaggggcccacttggggccttcccccttgtggggggtcgttttttttttttcttttctttttttttttttttttttttttttttaagataaaattgttcaaagccaaaaaaaaaaggaattcc

SEQ ID NO: 11338 - protein, 310 aa, Homo sapiens
  ref <308>: DATABASE ACCESSION NUMBER: SWISS-Prot / P22415
  ref <309>: DATABASE ENTRY DATE: 2002-06-15
MKGQQKTAETEEGTVQIQEGAVATGEDPTSVAIASIQSAATFPDPNVKYVFRTENGGQVMYRVIQVSEGQLDGQTEGTGAISGYPATQSMTQAVIQGAFTSDDAVDTEGTAAETHYTYFPSTAVGDGAGGTTSGSTAAVVTTQGSEALLGQATPPGTGQFFVMMSPQEVLQGGSQRSIAPRTHPYSPKSEAPRTTRDEKRRAQHNEVERRRRDKINNWIVQLSKIIPDCSMESTKSGQSKGGILSKACDYIQELRQSNHRLSEELQGLDQLQLDNDVLRQQVEDLKNKNLLLRAQLRHHGLEVVIKNDSN

SEQ ID NO: 11339 - DNA, 648 bp, Rattus norvegicus; identical to SEQ ID NO: 5549
  ref <308>: DATABASE ACCESSION NUMBER: EMBL / AA891802
  ref <309>: DATABASE ENTRY DATE: 2000-03-03

SEQ ID NO: 11340 - DNA, 646 bp, Rattus norvegicus
  ref <308>: DATABASE ACCESSION NUMBER: EMBL / AA891821
  ref <309>: DATABASE ENTRY DATE: 2000-03-03
gcaacagaaactgtttattgaaacctcagttctataaaagcatgaaaaacccagatacaaagcagtggcgcccagagaggcctgtgaagagaacacccaaaaaggcagagtgggaagccttggagcaggatgctatggttggaagacaaagggacaaggttaaaggacccagcaattcttggctatgacaaattcgtccaagggacaggtgtggcaagtttcccgccttggggagccttctgtccctcagcatctctcgtcttggttttcctgactcacacatcagagattcacatcgatgctttcccactctccttactcacttcccacaactcccatttaccttcccatctctggaaacttcaaagcagaaatctaccctcctgggcttgtgaaggcaaagagataggtgattctctgtcatttgtggcatgcctctggtcactgagctgacactgtcccaggcaccactggtgtcctagcctattagccagcctctgaggtctaggagagtgagtgaccttgtgctgcccccataatcccttatgttcctacccagcaggacaggggactagccaagggcccagagaggtagcataattctaaatcaagttttcctcttccaggttctcaaggactcccaaac

SEQ ID NO: 11341 - DNA, 1375 bp, Homo sapiens
  ref <308>: DATABASE ACCESSION NUMBER: EMBL / AF070638
  ref <309>: DATABASE ENTRY DATE: 1999-07-05
gtggctgagcagcagggacggtggcgaggctggtacacctacacagacctgtgtgtgctgctggagcagccgacctggcagttggccctgggctccctctgccagcggctggtaaagctgtcttgcctgttagctgtggcatatgtgagcagtgtggccctggctgtggcatcggtggccgtaatacatcagtctttggggctgtcctgcatccctacacctgggccgcctgaccttggactgacctcccgttgcctcctggagccctgcataccttctgtgccacaatgcctgccgtctctcgctaatgtctccagctgcctggaaggcagcatggggctgcggtcactctggggcagtcttctggcctcactgactcctccaccattgcctcccccagacccccctgcccctcccactcttcttcataactgccacctttgccagaagctccagagagactccccaacctgccatgcctgcctccaccccaaccgtacagtccccactgcgctgtccagcccctggtaccatacctatggcctggctcccccctggccttggagcccggtgcccctttcacttcctcagcctcagcaatgttcccttttcagtgtcatggagctggctcgcctcaagtctttcgttttcccaggctaggtagggctgtgaggaatgcattaagagggtttgggagtttctgagaacctggaggagcaaagcttgattcagatcctgtctgcctcgctgggtccttggcaggtcccctgtcctcctgggtgggagcttatggggtggtggggcagaaggactgaaggtaattcactcctagatcgcagtggctggctgcttggccaggacagtgatgccgccagggagagcttccgcttggtgaccagggacatgtcccagatggacatagaagcccctctctgcctccctgggattttttagacttttacttttgatttccctaggatggaagagtataggtgggagataagggaagtggggtgagaggagaaaggaaatgttggcatgggcctgtgtgatgtccctgaggcagaagagccggggactgatgggttcaggtgggagctgctgggtgaggcagggaacccttttcactcccattccttagctttagtctaatggagccaaggactgctgggaccttcaaccctgatcttttgtcttccagtcttctcttagtgtcctgctcctaggtttccctctcttctggttcttctcccaggtattctcttcccaggcctctctggccactgctttgtatcagggtttttcacgcttttgtagaactgaggtttcaataaacagtttcagttgcaaaaaaaaaaaaaaaaaaaaaaaaaaa

SEQ ID NO: 11342 - protein, 410 aa, Homo sapiens
  ref <308>: DATABASE ACCESSION NUMBER: SWISS-Prot / AAH01393
  ref <309>: DATABASE ENTRY DATE: 2002-10-01
MDLTGLLLDEEGTFSLAGFQDFTFLPGHQKLSARIRRRLYYGWDWEADCSLEELSSPVADIAVELLQKAAPSPIRRLQKKYVAHVSREACISPCAMMLALVYIERLRHRNPDYLQHVSSSDLFLISMMVASKYLYDEGEEEEVFNDEWGAAGGVAVPTLNALERGFLSAMDWHLYTDPREIFEVLSWLESCVAEQQGRWRGWYTYTDLCVLLEQPTWQLALGSLCQRLVKLSCLLAVAYVSSVALAVASVAVIHQSLGLSCTPTPGPPDLGLTSRCLLEPCIPSVPQCLPSPANVSSCLEGSMGLRSLWGSLLASLTPPPLPPPDPPAPPTLLHNCHLCQKLQRDSPTCHACLHPNRTVPTALSSPWYHTYGLAPPWPWSPVPLSLPQPQQCSLFSVMELARLKSFVFPG

SEQ ID NO: 11343 - DNA, 620 bp, Rattus norvegicus
  ref <308>: DATABASE ACCESSION NUMBER: EMBL / AA891839
  ref <309>: DATABASE ENTRY DATE: 2000-03-03
aagattagaacattttattgaaactactttagccatatgaagggcaaagaaaacatttgaacttgcaatggcctcttatctgaaacccaagttacttagcattttcctgtgatggttaatcttggttgtcaacttgactgatctggagtcaactaaaagacaagcagctggccattccactgggggattatctctcaagagggaagtgtacagtaaatgtgggcagaaccatgctttctgcctgcttgccttctctgtcctggcaaatacatgtatctcgttcctgccattgctgcatctcttcgtttgtatcagaacagcttcttcagggagccagcatggactgaagaccagtaagctcttcaaagactccccgaggccttcagcagcggcttgctactaccgagactgtccgcctcatgaagggtacaagtatgtgcctgaggttcttggcctctctggtgtgagacagtcattgatggactacccagatcctaatgtaagctaacataataaatcccatttaaataggcttccatgctaccacttctgttcctctcaacaaccctgactatataccatggaataagaatgttttcataaattatcaagacttgatt

SEQ ID NO: 11344 - DNA, 591 bp, Rattus norvegicus; identical to SEQ ID NO: 5610
  ref <308>: DATABASE ACCESSION NUMBER: EMBL / AA891842
  ref <309>: DATABASE ENTRY DATE: 2000-03-03

SEQ ID NO: 11345 - DNA, 1101 bp, Homo sapiens; identical to SEQ ID NO: 5611
  ref <308>: DATABASE ACCESSION NUMBER: EMBL / BC005192
  ref <309>: DATABASE ENTRY DATE: 2001-07-13

SEQ ID NO: 11346 - protein, 124 aa, Homo sapiens; identical to SEQ ID NO: 5612
  ref <308>: DATABASE ACCESSION NUMBER: SWISS-Prot / AAF64274
  ref <309>: DATABASE ENTRY DATE: 2002-10-01

SEQ ID NO: 11347 - DNA, 3844 bp, Rattus norvegicus
  ref <308>: DATABASE ACCESSION NUMBER: EMBL / Z49204
  ref <309>: DATABASE ENTRY DATE: 1996-04-15
ctgcctgccggtccagtaatccaccttcaaggaattggggatccgaaacgttgggagcgtaaagcagcatggcgcacctactgaagacggtggtggctggctgttcatgtcctttccttagcaacttggggtcctctaaggttctacctgggaagagagactttgtacgaatgcttcgtactcaccaggcactgtggtgtaaatccccggtaaagccaggaattccatataagcagttgacagttggggtccccaaggagattttccaaaacgagaagcgagttgcattgtctcctgcgggggtccaggccctggtcaagcagggcttcaatgttgtcgtggaatcaggcgcaggcgaagcttccaagttcccagatgacctctacagagcagcaggggcccagatccaagggatgaaggaagttctggcttctgatctggtggtcaaagtgagggcccccatggtgaacccgacgttaggcgctcacgaagctgactttttaaagccatcaggaactctaattagcttcatctacccagcccaaaatccagacttgctcaataaactttctgaaagaaaaaccacagttctggcgatggaccaggttccaagagtgacaatagctcagggctatgatgctctcagttccatggccaacatctctggttataaggctgttgttttagcagcgaatcattttgggaggtttttcactgggcagatcacagctgctggaaaagttccccctgcgaagatcctgatagttggtggtggcgttgctgggctcgcttctgcgggggcagcaaagtcgatgggcgcagttgtccgaggatttgatacaagagctgccgctttggaacagttcaaatcccttggtgctgaacccttggaggttgacttgaaggaatctggtgagggccaaggaggatacgcgaaagagatgtccaaagagttcattgaagctgaaatgaagctctttgctcaacagtgcaaggaggtggacatccttatcagcacagctctgattccaggtaagaaagctcctgttttatttagtaaagaaatgatcgagtccatgaaggaagggtcagttgttgtggatttagctgctgaggctggaggaaactttgaaacgactaagccgggagaactttacgttcataagggaatcactcatattggctacacagaccttcccagcaggatggccacccaggcgagcactctctattccaacaacatcactaagctcctgaaggccatcagccctgacaaggacaattttcactttgaagtgaaggatgactttgactttggtacaatgagtcacgtcattcgagggaccgtggtgatgaaggatggcaaagtgattttcccagctcccacaccaaaaaatattcccgaagaagccccagtcaaaccgaagaccgtggctgagctggaagccgagaaagcaggcaccgtctccatgtacacaaagacactgacgacagcatctgtgtactcggcaggtctcactgggatgttaggtttgggcatcgtggcccccaatgtagccttttctcagatggtgaccacttttggcctagccggcattattggctaccacactgtttggggagtgacccctgctctccactcaccgctgatgtctgtgaccaatgccatctcaggtttgactgcagttggtgggctggcgttgatgggagggcatttttatccctccacaacttctcagagtcttgctgctcttgctacatttatatcatcagtcaacattgcaggtggttttctggtgactcagagaatgctggacatgttcaagcgacccacggaccctccagagtataattatctgtatctgctccctggtggcaccttcgtaggtggatatttagctgctctctacggtggctataacatcgaagaaatcatgtacctgggctcaggcttgtgctgtgttggggccctgggcggcctttccactcagggaacagctcgactcggcaatgccttgggcatgatcggggttgcaggaggcctggcagccacccttggaggcctgaagccggacccgcagctgttagctcagatgtctggagcaatggcaatgggtggcaccatcggcctgacgatcgcaaagcggatccagatttccgacttgcctcagctggtcgctgctttccacagtttggtggggctggcagcagttcttacctgcatggccgagtacatcgtagagtatccacattttgcaatggatgccacgtcaaatttcaccaagattgtggcttaccttggcacttacatcggcggagtcacctttagtgggtctcttgttgcctacggaaaattacagggtattttgaaatcagctcctctgctgctccttggaaggcacgcactcaatgcaggcctgctggctgctagcgtgggtgggataatcccatttatggctgaccctagctttaccaccggcatcacctgtctgggctctgtgtccgcactctctactctcatgggtgtgactttgacggctgctattggtggtgctgacatgcctgtcgtcatcaccgtgctaaacagctactcgggctgggctctgtgtgccgagggcttcctgctcaacaacaacctgctgaccatcgtgggcgcgctcatcggctcctctggtgcaatcctgtcgtacatcatgtgtgtggccatgaaccgctccctggctaatgtcattcttggaggctatggcacaacgtcaacagctggtggaaaacccatggaaatttctggcacacatacagaaatcaacctggacaacgcagttgagatgatccgggaagctaacagcattgttattactccagggtatgggctctgtgctgctaaagctcagtaccccattgccgatttggtgaagatgcttactgaacaaggcaaaaaagtcaggtttggaatccacccagttgcgggccgaatgcctggtcagcttaatgtgctcctggccgaggcgggagtgccctatgatattgtgttagaaatggatgagatcaacagtgattttccagacaccgacttggttcttgtcattggagcaaacgacactgtgaattcggcggctcaagaagaccccaattctataattgcaggcatgccggtccttgaggtctggaagtccaaacaggtcattgtcatgaagaggtcccttggcgttggctacgctgccgtggacaatccgatcttctacaaacctaacacagctatgcttctaggggacgccaagaagacatgtgacgctctgcaggccaaagttcgggaatcctatcagaagtgaagattgaagatccagccgatgcttcggttgcaggaacagagaaaggagcggttcatagatgagcaaagctctcaagacccaaagaagcctcacaaaacaatggagattttcaagatcagcaccccatgcttctcaaaaagcattggaaattctcatcgcctacctatgtactgtcgccattgcccaaaaaagcaagagtattttgtccacagtgaaaaggcagcctcactttagatgcaaccccactggattcttaaaattccctttcagtagctagaaatcagttcagaagttgaatgttcgagatttcaggatatgggttggtctgaaaaatattacacaatatgatcattgtagacacctgcatttagtgcctttttttcttttttcttttcaccagatgtgactaatttgaaacctttatcaactcctgacctgttctcttgcatcttagccatactctggattgatcatgccaaatctgcagcaggttatcagccttcactatagatctt

SEQ ID NO: 11348 - protein, 1086 aa, Rattus norvegicus; identical to SEQ ID NO: 5631
  ref <308>: DATABASE ACCESSION NUMBER: SWISS-Prot / Q61941
  ref <309>: DATABASE ENTRY DATE: 2001-10-16

SEQ ID NO: 11349 - DNA, 3567 bp, Homo sapiens
  misc_feature (1)..(3567): n=a, c, g or t
  ref <308>: DATABASE ACCESSION NUMBER: EMBL / Z50101
  ref <309>: DATABASE ENTRY DATE: 1996-04-15
cttcaggaactggggagtcagaaaattgggaactcatatcaacatggcaaacctattgaaaacagtggtgactggctgctcgtgtcctctacttagcaatttggggtcctgtaagggtctacgtgtgaagaaggattttttacgaacattttatactcaccaagaactgtggtgtaaagcgcctgtaaaaccaggaattccatataagcaactgactgttggagtccccaaagagatattccaaaatgagaagcgagtggcattgtctcctgctggtgttcagaacttggtcaagcagggttttaatgttgtcgtggaatcgggtgcgggcgaagcttccaagttctcagatgatcactatagagtggcaggtgcccaaatccaaggggcaaaggaagtgctggcctctgatttggtggtcaaagtgcgagcccctatggttaatccaacattaggtgttcatgaagctgaccttttaaagacatcaggaacgctgattagttttatttacccagcccaaaatccagagttgctaaataaactttcccaaagaaaaactacagttctgacaatggaccaggttccaagagtcacaattgctcagggatatgatgcgctaagctccatggccaacattgcgggttataaggctgttgtcctagcagcaaatcattttggacgtttttttactggtcagatcacagctgctggaaaagttcctccagctaagattctgatagttggtggtggtgttgctgggcttgcttctgcaggcgcagcaaagtcgatgggtgcaattgttcgaggatttgacacaagagctgcagctttggaacagttcaagtctcttggtgctgagcccttggaggtggacttgaaggaatctggtgagggacaaggaggatatgcaaaagagatgtccaaagagttcattgaagctgaaatgaaactctttgctcaacaatgcaaggaggtagacatccttatcagcacagcacttattccaggtaaaaaagctccagttttatttaataaagaaatgattgagtcaatgaaggaaggttcagttgttgtggatttagctgctgaggctggtggaaactttgaaaccactaagccaggagaactctacattcataagggaattactcacataggctacacagacctncccagccgaatggccactcaggccagcnccctatattccaacaacatcaccaaactcctgaaggccatcagcccggacaaagataatttttattttgatgtgaaagatgactttgactttggtacgatgggtcatgtcattagaggaactgtagtgatgaaagatggtaaagtgattttcccagctcccacaccgaaaaatattcctcaaggtgccccagtaaaacagaagacagtggctgagctggaagctgaaaaagcagctaccattacacccttcaggaagacaatgtcaacggcttctgcatatacagcaggtctcacagggatactgggtttgggcattgcggctcccaatctagccttttctcagatggtgaccacttttggcttggctggcattgtggggtatcataccgtctggggagtgacccctgctctccactcaccactgatgtctgtgacaaatgcaatctcagggctgactgcagttggtgggttggcactgatgggaggacatttgtatccttccacaacttctcagggccttgctgctcttgctgcattcatatcctctgtcaacattgcaggtggctttctggtgactcagagaatgctggacatgttcaagcgtcccactgaccccccagaatacaactacctgtacctgctccctgccggcacctttgttggtggatatttagctgccctctacagtggttataacattgaacagatcatgtacctaggctcgggtttgtgctgtgtcggtgccttggctggcctctccacccagggaacagcacgtcttggcaatgcactgggcatgattggggttgctggaggactggcagccaccctcggagtcctaaaaccgggcccagaattactagctcagatgtctggagcgatggctttgggtggtaccattggattgacaattgccaaacgcatccagatttctgatttacctcaattagttgctgcttttcacagtttagtgggtttggcagctgtacttacttgcatagctgagtacattatagaatatccacattttgctacggatgcagcagcaaatctcaccaagattgtggcctacctcggcacttacattggtggcgtcacctttagtgggtctctcattgcctatggaaaattgcagggtctcctgaaatctgcccctctcctactgcctggaaggcacttactcaatgcaggcttactggctgctagtgtgggcgggataatcccattcatggtggacccaagctttactactggcatcacctgtctgggtgcagtgtctgctctctctgctgtcatgggtgtgactttgacgcctgctattgggggtgctgacatgcccgtcgttatcactgtgctgaacagctactcaggctgggccctgtgtgcagagggcttcctgctcaacaacaatctgctgaccatcgtgggtgcactcataggctcgtctggtgctatcctgtcatacatcatgtgtgtggcaatgaatcgctccctggctaatgtgattcttggaggctatggcaccacttcaacagctggtggaaaacccatggaaatttctggcacacatacggaaatcaaccttgacaatgcaattgacatgattcgagaagctaatagcattattattacaccaggctatggtctctgtgcagccaaagctcaataccccattgctgatttggtaaagatgctcactgagcaaggcaaaaaagtcaggtttggaattcacccagttgcaggccgaatgcctggtcagcttaatgtgctgctggctgaggctggtgtgccatatgacattgtgttggaaatggatgagatcaaccatgattttccagatactgatttggtccttgtaattggagctaatgacactgttaattcngcagctcaagaagatcccaactctattattgcaggcatgccagtccttgaggtctggaaatcaaagcaggtgattgttatgaagaggtctttgggtgttggctatgctgcagtggacaatccaatcttctacaaacctaacacggccatgcttctaggtgatgccaagaaaacatgtgacgcgctccaggcgaaagttagagaatcctatcagaagtaaatattaaggatcaagctgttagctaataatgccacctctgcagttttgggaacaggcaaataaagtatcagtatacatggtgatgtacatctgtagcaaagctcttggagaaaatgaagactgaagaaagcaaagcaaaaactgtatagagagatttttcaaaagcagtaatccctcaattttaaaaaaaggattgaaaattctaaatgtctttctgtgcatattttttgtgttaggaatcaaaagtattttataaaaggagg

SEQ ID NO: 11350 - protein, 1086 aa, Homo sapiens; identical to SEQ ID NO: 5633
  misc_feature (1)..(1086): Xaa=Unknown amino acid
  ref <308>: DATABASE ACCESSION NUMBER: SWISS-Prot / Q13423
  ref <309>: DATABASE ENTRY DATE: 2002-06-15

SEQ ID NO: 11351 - DNA, 383 bp, Rattus norvegicus; identical to SEQ ID NO: 5646
  ref <308>: DATABASE ACCESSION NUMBER: EMBL / AA891911
  ref <309>: DATABASE ENTRY DATE: 2000-03-03

SEQ ID NO: 11352 - protein, 152 aa, Rattus norvegicus; identical to SEQ ID NO: 5647
  ref <308>: DATABASE ACCESSION NUMBER: SWISS-Prot / Q63532
  ref <309>: DATABASE ENTRY DATE: 2002-06-15

SEQ ID NO: 11353 - DNA, 585 bp, Rattus norvegicus
  ref <308>: DATABASE ACCESSION NUMBER: EMBL / AY026068
  ref <309>: DATABASE ENTRY DATE: 2001-02-27
atggctgccatcaggaagaaactggtgattgttggtgatggagcttgtggtaagacatgcttgctcatagtcttcagcaaggaccagttcccagaggtttatgtgcccacggtgtttgaaaactatgtggcagatattgaagtggacgggaagcaggtagagttggctttatgggacacagctggacaggaagattatgaccgtctgaggcctctctcctacccagacactgatgttatactgatgtgtttttccatcgacagccctgatagtttagaaaacatcccagaaaaatggactccagaagtcaagcatttctgtccaaatgtgcccatcatcctagttgggaacaagaaggatcttcggaatgatgagcacacaaggcgggagttagccaaaatgaagcaggagccggtaaaacctgaagaaggcagagatatggcaaacaggattggcgcttttgggtacatggagtgttcagcaaagaccaaagacggagtgagagaggtttttgagatggccacgagagctgctctgcaagctagacgcgggaagaaaaagtcggggtgcctcatcttgtgaagc

SEQ ID NO: 11354 - protein, 193 aa, Rattus norvegicus
  ref <308>: DATABASE ACCESSION NUMBER: SWISS-Prot / AAK11717
  ref <309>: DATABASE ENTRY DATE: 2001-03-15
MAAIRKKLVIVGDGACGKTCLLIVFSKDQFPEVYVPTVFENYVADIEVDGKQVELALWDTAGQEDYDRLRPLSYPDTDVILMCFSIDSPDSLENIPEKWTPEVKHFCPNVPIILVGNKKDLRNDEHTRRELAKMKQEPVKPEEGRDMANRIGAFGYMECSAKTKDGVREVFEMATRAALQARRGKKKSGCLIL

SEQ ID NO: 11355 - DNA, 1399 bp, Homo sapiens
  ref <308>: DATABASE ACCESSION NUMBER: EMBL / BC000946
  ref <309>: DATABASE ENTRY DATE: 2002-09-02
agccctgatagtttagaaaacatcccagaaaagtggaccccagaagtcaagcatttctgtcccaacgtgcccatcatcctggttgggaataagaaggatcttcggaatgatgagcacacaaggcgggagctagccaagatgaagcaggagccggtgaaacctgaagaaggcagagatatggcaaacaggattggcgcttttgggtacatggagtgttcagcaaagaccaaagatggagtgagagaggtttttgaaatggctacgagagctgctctgcaagctagacgtgggaagaaaaaatctgggtgccttgtcttgtgaaaccttgctgcaagcacagcccttatgcggttaattttgaagtgctgtttattaatcttagtgtatgattactggcctttttcatttatctataatttacctaagattacaaatcagaagtcatcttgctaccagtatttagaagccaactatgattattaacgatgtccaacccgtctggcccaccagggtccttttgacactgctctaacagccctcctctgcactcccacctgacacaccaggcgctaattcaaggaatttcttaacttcttgcttctttctagaaagagaaacagttggtaacttttgtgaattaggctgtaactactttataactaacatgtcctgcctattatctgtcagctgcaaggtactctggtgagtcaccacttcagggctttactccgtaacagattttgttggcatagctctggggtgggcagttttttgaaaatgggctcaaccagaaaagcccaagttcatgcagctgtggcagagttacagttctgtggtttcatgttagttaccttatagttactgtgtaattagtgccacttaatgtatgttaccaaaaataaatatatctaccccagactagatgtagtattttttgtataattggatttcctaatactgtcatcctcaaagaaagtgtattggttttttaaaaaagaaagtgtatttggaaataaagtcagatggaaaattcattttttaaattcccgttttgtcactttttctgataaaagatggccatattaccccttttcggccccatgtatctcagtaccccatggagctgggctaagtaaataggaattggtttcacgcctgaggcaattagacactttggaagatggcataacctgtctcacctggacttaagcatctggctctaattcacagtgctcttttctcctcactgtatccaggttccctcccagaggagccaccagttctcatgggtggcactcagtctctcttctctccagctgactaaactttttttctgtaccagttaatttttccaactactaatagaataaaggcagttttctaaaaaaaaaaaaaaaaa

SEQ ID NO: 11356 - protein, 193 aa, Homo sapiens
  ref <308>: DATABASE ACCESSION NUMBER: SWISS-Prot / P06749
  ref <309>: DATABASE ENTRY DATE: 2002-06-15
MAAIRKKLVIVGDGACGKTCLLIVFSKDQFPEVYVPTVFENYVADIEVDGKQVELALWDTAGQEDYDRLRPLSYPDTDVILMCFSIDSPDSLENIPEKWTPEVKHFCPNVPIILVGNKKDLRNDEHTRRELAKMKQEPVKPEEGRDMANRIGAFGYMECSAKTKDGVREVFEMATRAALQARRGKKKSGCLVL

SEQ ID NO: 11357 - DNA, 3482 bp, Rattus norvegicus
  ref <308>: DATABASE ACCESSION NUMBER: EMBL / BC005419
  ref <309>: DATABASE ENTRY DATE: 2002-09-22
cccacgcgtccggaggaaacctaggagctcaggctgcccttcagctgctcctgcctcttctaatcgctcttccccacaggaccctgccccaccacacttctctctctcctgaccgtcctgagcctggattgcagctttgtaaggcttctgagcaggttgccccgttgctcgacaacatggaagaggcagttgagtcacctgaggttaaagaatttgaatacttctccgacgctgtattcattcccaaagacggcaatactttatctgtaggagtcattaagagaattgagactgccgtgaaagaaggggagatagtgaaagtggtttctatagttaaagagatcatacagaacgtttccagaaacaaaataaagatcgctgtgactggggactctggcaatggcatgtcatctttcatcaatgcccttaggcttgtcggacacgaagagaaagattcagctcccactggggtggtgaggaccacccagaaaccaacctgttacttttcctcccactttccctatgtggagctgtgggacctgcctggcttaggggccacagcccagagtgtggagagctacctggaggagatgcagatcagcacatacgaccttatcatcatcgtagcttctgagcagttcagctcaaatcatgtgaagctggccataaccatgcagaggatgagaaagaggttctatgtcgtctggaccaagctggacagggacctcagcacaagtaccttccctgaaccccagctactgcagagtatccaaaagaatatccgggatagtcttcagaaggagaaagtgaaggagcaccccatgttcctggtatctgtctttaagcctgaatcacatgacttcccaaagcttagggagacactacaaaaagacctccctgtcatcaagtaccatggcctcgtcgaaaccctttaccaagtctgtgagaaaactgttaatgagagagtagagttcattaaaaagagtatagatgaagataacctacacacagattttgggatctcggatccgggtaacgcgatagagattcggaaagccttccaaaaaacctttggtttggatgacatatctctccacctggtttctctggaaatgaaaaataaacatttcaacactagtatggagtcccaggagacccagaggtaccaacaagatgactgggtgctggctcggttgtatcgcactggaacccgggttggctctataggttttgactacatgaagtgctgctttagctctcatcacagtcgatgcaaacaacagaaagatatacttgatgaaactgctgccaaagccaaggaagttctgttaaaaatcctgagactctccattcctcatccttaggaaggtttagacaactggagtcttctccccagccctgtaccccatgtgtacccccagttgagataacacccctctcccccacgccatggggtccaagttccttgaggttactaggctgactgtcttaatgggtatccctctcgtgagacaccataatgggttttgctaactgaattacctgggatctgactataggataagtttccctgttctaattgtttggaatgccatgtttgacacatgctcaccttagggccaacgacgaggggcctcttggtctactcctgtctctttttgtctcttttcgtccttgactctggagatggagtatctcttagggaatggggaagagcttgtctttggctattgtccgaaaaacatggccagcagaggcctgttctccaacccctcctctgatgtgtaaagaggagaggggcattaactctggcattactagtaataggattcacacagtgctgaagagaaggattctcagcaccctacactacccttgatggtgtcaatggtatcatgattagtcctggcccttcacactctgggctctcagtccttatattggacttcaacttcttcagcagcccctaattctgcaggctgcacctccatccagacacacaaggacccttctccctttgccatgaagcactcacatttgaatctgtgtgtgtgactttgcatttaagacaggtgccgctccgtgttctgtcatgctcctttctctcagccctgctttcgatagatatcagtactgtcagcccaacttccctagcggtctcaggcctctgtcctccccttctcccctttcacctctttgacacaatgttaaatgctttctttcttttttctctgtgtagccctggctgtcctggaactcactctgtagaccaggctggcctcaaactcagaaatccacctgcctctgccaactgttaccagcatcacaccggagcgtttagtttgggctcatagtttgctagtacagtccatcacagctgaaagtcatcacagtgggagcacagagcagctgatcccgtgtgtccgctatcagggagcagagagagatgaatagggctctttggcacacattctccttttcattcagcccaagaccagcctatagaatgatatcatccacgttcagagtgggtcttccaaccttcatgaaccaagtccagagactccttcatagacacgcccaaaggtctctttgcatagtgattctagatcctgccaacctgccaaccaatattaactacacaggcactcaggggatctaggacttttattggttaatagtgggaagaaggttgggtgtggcttagtagtacaatgttttcctagcacatggaaggctatggttttgatacctagaaagaaacaaaatctgttctgaaatggaaggaaaatgccaattatatttgttgagaaaatacaattaaattatattattggcacaggcacttcaaaaaaagaatcacttaaatgtaaaaggtgggtttactgtatatgctgtgggtaaggataggatggactaagaagtctcacgatggtgggattgggggtgagccaagttctgctaagactcaccttccacctgcttgttctttggttaatgtggtgccatggaagtcacaggagaggtctgcaaagaaaccgcagaggttttgtctgtcgtccttatgacattcatgtgtactcagaaataattcctgaggtcaaggttatggcatagatgctgctccgcaatgtcagctgtaaataagaaagcgagtttgctctttaaaagctcgcctgaggttgtatgtgttggtcacagggtatctcacctggccccagcactgaggaaactgtgatctcactgttggccgggctggagaagcagggtgtgaattctctccatgtcttaggtcatagacatagattttctctttgctggttgtatgtacatacctatctatatacagatacagaagtatatgtacacagatattatatattcatcacacacatttattatgcattgtatgtaacatacatgtagtgttgatctttgtgatggaataaataatcacagtatattataaaaaaaaaaaaaaa

SEQ ID NO: 11358 - protein, 395 aa, Rattus norvegicus; identical to SEQ ID NO: 5654
  ref <308>: DATABASE ACCESSION NUMBER: SWISS-Prot / AAH05419
  ref <309>: DATABASE ENTRY DATE: 2002-10-01

SEQ ID NO: 11359 - DNA, 244 bp, Rattus norvegicus
  ref <308>: DATABASE ACCESSION NUMBER: EMBL / AA891962
  ref <309>: DATABASE ENTRY DATE: 2000-03-03
caggttaaaaccagctttatttggaacaagcaacatacaaatcatttatctgtaaaataatagcatctattctctaactcacaaaagtttcacacaaatcaaaatccttcctaagaaaatgtgacagtaagccaagatattactatttagcctaagctttaactcaagagttgataatgatgatttgagaatttatcttttatacgtcacttgcagaccttaattgtgcacatgaataaactgg

SEQ ID NO: 11360 - DNA, 489 bp, Rattus norvegicus
  ref <308>: DATABASE ACCESSION NUMBER: EMBL / AA892083
  ref <309>: DATABASE ENTRY DATE: 2000-03-03
gaaaagtatataacagaatttcttctttatttacagtcaagttctgttgggacacataattaaataaataaaagatgtgccctggccagccactctcaactcccaacaccactagctctctggcagcgaatgacaggtgagttgcaagcagggaaggactgctgtccctcttccctagttctagaactcatgtctgttcctactgtccagagagccagcgcggaagcaaaaaataaagtgcaaagtaaatgtgacaaacgtggtgctttggacacccagacaccgtgctcagaccgtgtgcatgggtaagcaggacagagggtgctttcccagccttcagcatgaccagctcccagataggcttctcttaccaacactacactgcatacacaggcagtggctggactccccaacaccagctccagatgagcgctaagctactgctgtgactggcagtgatgctgggtaaagatgtgtttctcatttcag

SEQ ID NO: 11361 - DNA, 490 bp, Rattus norvegicus
  ref <308>: DATABASE ACCESSION NUMBER: EMBL / AA892132
  ref <309>: DATABASE ENTRY DATE: 1999-01-28
ggcgggcgggtgttgttttatttcagtctgggcatgatgcgtatgaacaggatcatgctgatgaacacgaagcacacgacgatgagcatggcccacagcagccagttcaccgacttctgtgcgtgctgctccagccgctctgactccagcttcagcttctccaggttctggtctgccatcttgagcgaatgtgacagggtctggttgtccttcttgatgacactctgggcagccagtgtgttggtcttcaggctgcgggccaagcctagcatctcctcagccagcttttcctggagaccctggtgcctctggaggacgaggtctagctcggacgctgactgcttctcatctgcaggtctaggccccttcacaactcgcttcctcatgtctgcctccagctctccagaggactccgtgcccaacagctcactccgcatctcactggtgtaacgtgctctagactgcagatgtacagtcttggtggcaggca

SEQ ID NO: 11362 - DNA, 839 bp, Homo sapiens
  ref <308>: DATABASE ACCESSION NUMBER: Refseq / NM_018467
  ref <309>: DATABASE ENTRY DATE: 2002-05-30
gggcggaaggggtgggtagggccgggcgataatggcggcgtcgaggctggagctaaacctggtgcggctgctatcccgctgcgaggcgatggcagcggagaaacgggacccggacgagtggcgcctggagaagtacgtgggagccctagaggacatgttgcaggccctgaaggtccacgcgagcaaaccggcctctgaggtgatcaatgaatattcctggaaggtggattttctgaaggggatgctgcaagccgagaagctgacctcctcctcagagaaagcactggccaaccagttcctggcccctggccgtgtgccaaccacagccagagagcgagtgcccgccacaaagacggtgcatctgcagtcacgggcgcggtacaccagcgagatgcggagtgagctactaggcacggactctgcagagcctgagatggacgtaaggaagagaactggagtggcagggtcccagccagtgagtgagaagcagtcggcagctgagctagacctcgtcctgcagcgacatcagaacctccaggaaaagctggcggaagagatgctaggactggcccggagcctcaagaccaataccctggccgcccagagtgtcatcaagaaggacaaccagaccctgtcacactcactgaaaatggcggaccagaacctggagaaactgaagacggagtcagagcgtctggagcagcacacgcagaagtcagtcaactggctgctctgggccatgctcattatcgtctgcttcatcttcattagcatgatcctcttcattcgaatcatgcctaaactcaaataaagacccccgcccacctaaaaaaaaaaaa

SEQ ID NO: 11363 - protein, 259 aa, Homo sapiens
  ref <308>: DATABASE ACCESSION NUMBER: SWISS-Prot / AAH08455
  ref <309>: DATABASE ENTRY DATE: 2001-12-01
MAASRLELNLVRLLSRCEAMAAEKRDPDEWRLEKYVGALEDMLQALKVHASKPASEVINEYSWKVDFLKGMLQAEKLTSSSEKALANQFLAPGRVPTTARERVPATKTVHLQSRARYTSEMRSELLGTDSAEPEMDVRKRTGVAGSQPVSEKQSAAELDLVLQRHQNLQEKLAEEMLGLARSLKTNTLAAQSVIKKDNQTLSHSLKMADQNLEKLKTESERLEQHTQKSVNWLLWAMLIIVCFIFISMILFIRIMPKLK

SEQ ID NO: 11364 - DNA, 486 bp, Rattus norvegicus; identical to SEQ ID NO: 5680
  ref <308>: DATABASE ACCESSION NUMBER: EMBL / AA892149
  ref <309>: DATABASE ENTRY DATE: 1999-01-28

SEQ ID NO: 11365 - DNA, 386 bp, Rattus norvegicus; identical to SEQ ID NO: 5681
  ref <308>: DATABASE ACCESSION NUMBER: EMBL / AA892154
  ref <309>: DATABASE ENTRY DATE: 1999-01-28

SEQ ID NO: 11366 - protein, 228 aa, Rattus norvegicus; identical to SEQ ID NO: 5682
  ref <308>: DATABASE ACCESSION NUMBER: Refseq / NP_037292
  ref <309>: DATABASE ENTRY DATE: 2002-11-14

SEQ ID NO: 11367 - DNA, 3773 bp, Homo sapiens; identical to SEQ ID NO: 5683
  ref <308>: DATABASE ACCESSION NUMBER: Refseq / NM_006454
  ref <309>: DATABASE ENTRY DATE: 2002-11-14

SEQ ID NO: 11368 - protein, 209 aa, Homo sapiens; identical to SEQ ID NO: 5684
  ref <308>: DATABASE ACCESSION NUMBER: SWISS-Prot / Q14582
  ref <309>: DATABASE ENTRY DATE: 2002-06-15

SEQ ID NO: 11369 - DNA, 604 bp, Rattus norvegicus
  ref <308>: DATABASE ACCESSION NUMBER: EMBL / AA892257
  ref <309>: DATABASE ENTRY DATE: 1999-01-28
gccactgttaaggcttagcacagatggccaacaagaaaaaacaatcaaaaataaaaccctgaaggaaaagcagaacaaacccctcagagaagcttctccctccccacccttcaaaagccctgtaataactgtacattataattcagatcacatttaaaaacaagttgattattaaaaaacaagtatttcattggaaacccaactttttggttcagtaaaatgtgatataaatatatatgtatactgtatgtgtgcacatagaataaaaaaatagcctccttgtccactctattacctggcaccggactggagacaaatggagggaaacagtaacattccctcagcctctccatgagcctctctacctgggcttctcatcccccatcaatacacagaatagatcttttccacattaatttaatctttgacaggagccagtttaacagaaaaaaaaaaaaaggctgctgatgtaggaggctcacctgaggacggacatgggtgaaagcagtaacctgcttctatggctgtaattatcaaaggaccctgttgggattgagtccacctaacacagacttatgtttgtgctctaaagcaaaacccaatt

SEQ ID NO: 11370 - DNA, 2078 bp, Rattus norvegicus; identical to SEQ ID NO: 3664
  ref <308>: DATABASE ACCESSION NUMBER: Refseq / NM_012591
  ref <309>: DATABASE ENTRY DATE: 2002-11-05

SEQ ID NO: 11371 - protein, 328 aa, Rattus norvegicus; identical to SEQ ID NO: 3665
  ref <308>: DATABASE ACCESSION NUMBER: SWISS-Prot / P23570
  ref <309>: DATABASE ENTRY DATE: 1997-11-01

SEQ ID NO: 11372 - DNA, 2035 bp, Homo sapiens; identical to SEQ ID NO: 3666
  ref <308>: DATABASE ACCESSION NUMBER: EMBL / X14454
  ref <309>: DATABASE ENTRY DATE: 1996-09-05

SEQ ID NO: 11373 - protein, 325 aa, Homo sapiens; identical to SEQ ID NO: 3667
  ref <308>: DATABASE ACCESSION NUMBER: SWISS-Prot / P10914
  ref <309>: DATABASE ENTRY DATE: 2002-06-15

SEQ ID NO: 11374 - DNA, 665 bp, Rattus norvegicus; identical to SEQ ID NO: 5705
  ref <308>: DATABASE ACCESSION NUMBER: EMBL / AA892271
  ref <309>: DATABASE ENTRY DATE: 1999-01-28

SEQ ID NO: 11375 - DNA, 529 bp, Rattus norvegicus; identical to SEQ ID NO: 5706
  misc_feature (1)..(529): n=a, c, g or t
  ref <308>: DATABASE ACCESSION NUMBER: EMBL / AA892273
  ref <309>: DATABASE ENTRY DATE: 1999-01-28

SEQ ID NO: 11376 - DNA, 824 bp, Rattus norvegicus
  ref <308>: DATABASE ACCESSION NUMBER: EMBL / AF321130
  ref <309>: DATABASE ENTRY DATE: 2001-02-19
tatgagactgcagttgcccttgattgtgaaattcccaatgagttgccatataatgattacttcgagtattttggaccagacttcaaactgcatattagtccctcaaacatgacaaaccagaacactccagaatatatggaaaagataaaacagcgtttatttgaaaatctgcgaatgttgccacatgcgcctggtgttcaaatgcaagctattccagaagatgctgttcatgaagacagtggtgatgaggatggagaagaccctgacaagagaatttctattcgagcatcagacaagcggatagcttgtgatgaagagttctcagattctgaggatgaaggtgaaggaggtcgtaggaatgtcgctgatcataagaagggagccaaaaaagccaggattgaggaagacaagaaggaggcggaggacaagaagacagatgttaaggaagaagacaaatccaaggacaatagtggtgagaaaacagacaccaaaggagccaaatcagaacaactcaacaacccttgaatttgactccccaaccttaggaacctcgaaaagtgagacgattctgggataagaaaccttcgctgtttgaggaagtttggcttcattttatactgttttggcatggactgtatttattttcaaaatggcttgtttttggttttccttggcaagttttattgtgagtttttctaattatgaagcaaatttttttccaccatgctttatgtgattgtatttaaattgatgtgttattatgtcaaaaaaaaaaaaccggatctattaaagaaacaattggcctttcaaaaaaaaaaaaaaaa

SEQ ID NO: 11377 - protein, 174 aa, Rattus norvegicus; identical to SEQ ID NO: 5709
  ref <308>: DATABASE ACCESSION NUMBER: SWISS-Prot / AAK11183
  ref <309>: DATABASE ENTRY DATE: 2001-06-01

SEQ ID NO: 11378 - DNA, 1985 bp, Homo sapiens; identical to SEQ ID NO: 5710
  ref <308>: DATABASE ACCESSION NUMBER: EMBL / U31814
  ref <309>: DATABASE ENTRY DATE: 1999-07-01

SEQ ID NO: 11379 - protein, 488 aa, Homo sapiens; identical to SEQ ID NO: 5711
  ref <308>: DATABASE ACCESSION NUMBER: SWISS-Prot / Q92769
  ref <309>: DATABASE ENTRY DATE: 2002-06-15

SEQ ID NO: 11380 - DNA, 601 bp, Rattus norvegicus; identical to SEQ ID NO: 5712
  ref <308>: DATABASE ACCESSION NUMBER: EMBL / AA892298
  ref <309>: DATABASE ENTRY DATE: 1999-01-28

SEQ ID NO: 11381 - protein, 163 aa, Rattus norvegicus; identical to SEQ ID NO: 4784
  ref <308>: DATABASE ACCESSION NUMBER: SWISS-Prot / CSRTA
  ref <309>: DATABASE ENTRY DATE: 2002-06-15

SEQ ID NO: 11382 - DNA, 1137 bp, Homo sapiens; identical to SEQ ID NO: 5714
  ref <308>: DATABASE ACCESSION NUMBER: EMBL / AF251049
  ref <309>: DATABASE ENTRY DATE: 2001-04-16

SEQ ID NO: 11383 - protein, 48 aa, Homo sapiens; identical to SEQ ID NO: 5715
  ref <308>: DATABASE ACCESSION NUMBER: PIR / S64705
  ref <309>: DATABASE ENTRY DATE: 2000-07-21

SEQ ID NO: 11384 - DNA, 665 bp, Rattus norvegicus; identical to SEQ ID NO: 5716
  ref <308>: DATABASE ACCESSION NUMBER: EMBL / AA892299
  ref <309>: DATABASE ENTRY DATE: 1999-01-28

SEQ ID NO: 11385 - DNA, 472 bp, Rattus norvegicus
  ref <308>: DATABASE ACCESSION NUMBER: EMBL / AF329827
  ref <309>: DATABASE ENTRY DATE: 2002-02-23
agccccatcactgaccgaatgcctgaggcaactgcaaagcctaccaccccacattgcttcacctgtgtggtctgcgcctgtcccctggagggcacttccttcattgtggacaagcgttgctctgtctgctcggagcccatcatgcctgagcctggccgggatgagactgtgcgagtagtcgcgctggataagaactttcatatgaagtgttacaagtgtgaggactgtgggaaagccctgtccattgaggcagatgacaacggctgtttccctctggatggccatgtcctttgtcggaagtgccactctgctagagcccagacctgagttgaagatggacctccttccacaccacaggtccatcccccaccgtggaccacccacagaggccagtccttgcctccaccctccctgcattccaaatccctcccttgtgtctcaagtgccctgacccagggccccagcatggcct

SEQ ID NO: 11386 - protein, 108 aa, Rattus norvegicus
  ref <308>: DATABASE ACCESSION NUMBER: SWISS-Prot / AAK32142
  ref <309>: DATABASE ENTRY DATE: 2003-02-01
SPITDRMPEATAKPTTPHCFTCVVCACPLEGTSFIVDKRCSVCSEPIMPEPGRDETVRVVALDKNFHMKCYKCEDCGKALSIEADDNGCFPLDGHVLCRKCHSARAQT

SEQ ID NO: 11387 - DNA, 1449 bp, Homo sapiens
  ref <308>: DATABASE ACCESSION NUMBER: EMBL / BC012596
  ref <309>: DATABASE ENTRY DATE: 2001-08-21
ggggggctttccggcccagccagcgcccgcgatgactgccactctccgcccctacctgagtgccgtgcgggccacattgcaggctgccctctgcctggagaacttctcctcccaggttgtggaacgacacaacaagccggaagtggaagtcaggagtagcaaagagctcctgttacaacctgtgaccatcagcaggaatgagaaggaaaaggttctgattgagggctccatcaactctgtccgggtcagcattgctgtgaaacaggctgatgagatcgagaagattttgtgccacaagttcatgcgcttcacgatgatgcgagcagagaacttctttatccttcgaaggaagcctgtggaggggtatgatatcagctttctgatcaccaacttccacacagagcagatgtacaaacacaagttggtggactttgtgatccacttcatggaggagattgacaaggagatcagtgagatgaagctgtcagtcaatgcccgtgcccgcattgtggctgaagagttccttaagaatttttaaaccatctggctggatctcgtggccttccccctcagactacccatgtctccacgaaggcgtcctggagtcactccccgagcagcgcggcggcggcagggagttgggttggggtgggcatttgatgcgggaggtgggtggtgtgcttgctagctgggcaagaaagcagcagtggacctgccccaaggccacacgtgcctggtcaggctggcttctgatgttcagtcccctgggccgggacagattttttttaacgtcttgaaacttaaactctgtgcttgtaggatactgtaacctttttgtctttttttttttttttttaaacctccacctccagtggctgtgactggtcccagtgattatacgttattggttgctgtgggtctgggcgggcctggagccagaaggcgacttattttttctctcctatgccaccccaggtggggagggagggaggtttcagactccagtttctcccttgcccttttattcccaagcctccttggccccagtataagtgttgggaactctctgccagcttcctgagttctgcctaaagatggccccccagcactggttggggacaagggccaaattggtgaccaccagtcatgcctaggacctggggcccaaaagccgggcaacctctggctacaggggccattgggtgccctcccagttgagaggggccgctgtttcgccttgtccgtcagtgccagtgcctgtgccagaggtggcgaggtgagtcctccagagcttcctggccgggccctcctcctgcctgttctggctcctctgctcccacgctagctgtcccttttctgattctggtggatcctccctcccctaattaaagtctctttttgcccctttggggctgcatgaaaaaaaaaaaaaaaaaaaaaaaaaaaaaa

SEQ ID NO: 11388 - protein, 168 aa, Homo sapiens
  ref <308>: DATABASE ACCESSION NUMBER: SWISS-Prot / O15509
  ref <309>: DATABASE ENTRY DATE: 2002-06-15
MTATLRPYLSAVRATLQAALCLENFSSQVVERHNKPEVEVRSSKELLLQPVTISRNEKEKVLIEGSINSVRVSIAVKQADEIEKILCHKFMRFMMMRAENFFILRRKPVEGYDISFLITNFHTEQMYKHKLVDFVIHFMEEIDKEISEMKLSVNARARIVAEEFLKNF

SEQ ID NO: 11389 - DNA, 501 bp, Rattus norvegicus
  ref <308>: DATABASE ACCESSION NUMBER: EMBL / AA892390
  ref <309>: DATABASE ENTRY DATE: 2000-03-03
acagcaagttcacaagctgtcagaggctcactaacagcctccttgtagtcacttgttgccctcctggcaggaccttacaagacaagctgctgctgttccccagccaccagctcccagagcagagggaacaactatttcaggtcgcagaagaacgaggaccaagtgagaacgtacaagatggctcgccaacgtaacgccaggccacactggcgtggcagggttgaaatgcttacaggttacgtacagagcactgttggaagcattgtttcccagtgacggccaaatggacaggcgacacttttaatctttgacactgtaaatactgtaggcatagagtcagagaccgccgtacacaatggaaccgtctatcactgtaaacgaacatactacagcagaactctggggcaggaagtgagatctgcagcacagccttgctagcacgcacaaagcaagaccctgggcatgactgccatcagctctgggctggactgtaagtacagt

SEQ ID NO: 11390 - protein, 568 aa, Rattus norvegicus; identical to SEQ ID NO: 449
  ref <308>: DATABASE ACCESSION NUMBER: SWISS-Prot / O54902
  ref <309>: DATABASE ENTRY DATE: 2002-06-15

SEQ ID NO: 11391 - DNA, 4103 bp, Homo sapiens; identical to SEQ ID NO: 450
  ref <308>: DATABASE ACCESSION NUMBER: EMBL / AB004857
  ref <309>: DATABASE ENTRY DATE: 1998-03-10

SEQ ID NO: 11392 - protein, 568 aa, Homo sapiens; identical to SEQ ID NO: 451
  ref <308>: DATABASE ACCESSION NUMBER: SWISS-Prot / P49281
  ref <309>: DATABASE ENTRY DATE: 2002-06-15

SEQ ID NO: 11393 - DNA, 609 bp, Rattus norvegicus; identical to SEQ ID NO: 5772
  ref <308>: DATABASE ACCESSION NUMBER: EMBL / AA892394
  ref <309>: DATABASE ENTRY DATE: 2000-03-03

SEQ ID NO: 11394 - DNA, 1884 bp, Homo sapiens; identical to SEQ ID NO: 5773
  ref <308>: DATABASE ACCESSION NUMBER: EMBL / AK057016
  ref <309>: DATABASE ENTRY DATE: 2002-08-06

SEQ ID NO: 11395 - DNA, 448 bp, Rattus norvegicus; identical to SEQ ID NO: 5778
  ref <308>: DATABASE ACCESSION NUMBER: EMBL / AA892414
  ref <309>: DATABASE ENTRY DATE: 2000-03-03

SEQ ID NO: 11396 - protein, 1241 aa, Rattus norvegicus; identical to SEQ ID NO: 5779
  ref <308>: DATABASE ACCESSION NUMBER: SWISS-Prot / AAF14345
  ref <309>: DATABASE ENTRY DATE: 2003-02-01

SEQ ID NO: 11397 - DNA, 7785 bp, Homo sapiens; identical to SEQ ID NO: 5780
  ref <308>: DATABASE ACCESSION NUMBER: EMBL / AF047033
  ref <309>: DATABASE ENTRY DATE: 2000-03-03

SEQ ID NO: 11398 - protein, 1214 aa, Homo sapiens; identical to SEQ ID NO: 5781
  ref <308>: DATABASE ACCESSION NUMBER: SWISS-Prot / AAD38322
  ref <309>: DATABASE ENTRY DATE: 2003-02-01

SEQ ID NO: 11399 - DNA, 555 bp, Rattus norvegicus
  ref <308>: DATABASE ACCESSION NUMBER: EMBL / AA892486
  ref <309>: DATABASE ENTRY DATE: 2000-03-03
aaaattaagtacacttcacagtaagtttctcaagtctcagtggctgtgcagcctgatgttggtgcagacacgacgtccccacgccgagctccacattctctagtgggaggcgagggacagacagctggggtagggcaggcgaggcaagcctcactctcctcctaaccacacagagcttcaggggcgcatgcagcaacacaatgggaaagctcaaaggtgtgtcaggagagcaggacgcaggtcctcacaggagccaccagccagagcgagctcaaactcgcatggcctctaggggggcctctgtaaagtctcctaggaccaatcgatttgaaaccgctctcccatcagcagtgagacagggatggacaggctcttgtcgtccgggctgtaggtgaaattggagacagagatgccattggaaaggacctgggtgggagctgtggtcactcccaagatggtcacctccctcagttgcagttcacctccctccttggtcacgtgcactaacttgtttacaatggtattattcttggctgagaaggtgaccagtgtgta

SEQ ID NO: 11400 - DNA, 3624 bp, Homo sapiens
  ref <308>: DATABASE ACCESSION NUMBER: EMBL / Y00839
  ref <309>: DATABASE ENTRY DATE: 1995-07-28
cagttgggaaagctgaggttgtcgccggggccgcgggtggaggtcggggatgaggcagcaggtaggacagtgacctcggtgacgcgaaggaccccggccacctctaggttctcctcgtccgcccgttgttcagcgagggaggctctgggcctgccgcagctgacggggaaactgaggcacggagcgggcctgtaggagctgtccaggccatctccaaccatgggagtgaggcacccgccctgctcccaccggctcctggccgtctgcgccctcgtgtccttggcaaccgctgcactcctggggcacatcctactccatgatttcctgctggttccccgagagctgagtggctcctccccagtcctggaggagactcacccagctcaccagcagggagccagcagaccagggccccgggatgcccaggcacaccccggccgtcccagagcagtgcccacacagtgcgacgtcccccccaacagccgcttcgattgcgcccctgacaaggccatcacccaggaacagtgcgaggcccgcggctgctgctacatccctgcaaagcaggggctgcagggagcccagatggggcagccctggtgcttcttcccacccagctaccccagctacaagctggagaacctgagctcctctgaaatgggctacacggccaccctgacccgtaccacccccaccttcttccccaaggacatcctgaccctgcggctggacgtgatgatggagactgagaaccgcctccacttcacgatcaaagatccagctaacaggcgctacgaggtgcccttggagaccccgcgtgtccacagccgggcaccgtccccactctacagcgtggagttctccgaggagcccttcggggtgatcgtgcaccggcagctggacggccgcgtgctgctgaacacgacggtggcgcccctgttctttgcggaccagttccttcagctgtccacctcgctgccctcgcagtatatcacaggcctcgccgagcacctcagtcccctgatgctcagcaccagctggaccaggatcaccctgtggaaccgggaccttgcgcccacgcccggtgcgaacctctacgggtctcaccctttctacctggcgctggaggacggcgggtcggcacacggggtgttcctgctaaacagcaatgccatggatgtggtcctgcagccgagccctgcccttagctggaggtcgacaggtgggatcctggatgtctacatcttcctgggcccagagcccaagagcgtggtgcagcagtacctggacgttgtgggatacccgttcatgccgccatactggggcctgggcttccacctgtgccgctggggctactcctccaccgctatcacccgccaggtggtggagaacatgaccagggcccacttccccctggacgtccaatggaacgacctggactacatggactcccggagggacttcacgttcaacaaggatggcttccgggacttcccggccatggtgcaggagctgcaccagggcggccggcgctacatgatgatcgtggatcctgccatcagcagctcgggccctgccgggagctacaggccctacgacgagggtctgcggaggggggttttcatcaccaacgagaccggccagccgctgattgggaaggtatggcccgggtccactgccttccccgacttcaccaaccccacagccctggcctggtgggaggacatggtggctgagttccatgaccaggtgcccttcgacggcatgtggattgacatgaacgagccttccaacttcatcagaggctctgaggacggctgccccaacaatgagctggagaacccaccctacgtgcctggggtggttggggggaccctccaggcggccaccatctgtgcctccagccaccagtttctctccacacactacaacctgcacaacctctacggcctgaccgaagccatcgcctcccacagggcgctggtgaaggctcgggggacacgcccatttgtgatctcccgctcgacctttgctggccacggccgatacgccggccactggacgggggacgtgtggagctcctgggagcagctcgcctcctccgtgccagaaatcctgcagtttaacctgctgggggtgcctctggtcggggccgacgtctgcggcttcctgggcaacacctcagaggagctgtgtgtgcgctggacccagctgggggccttctaccccttcatgcggaaccacaacagcctgctcagtctgccccaggagccgtacagcttcagcgagccggcccagcaggccatgaggaaggccctcaccctgcgctacgcactcctcccccacctctacacactgttccaccaggcccacgtcgcgggggagaccgtggcccggcccctcttcctggagttccccaaggactctagcacctggactgtggaccaccagctcctgtggggggaggccctgctcatcaccccagtgctccaggccgggaaggccgaagtgactggctacttccccttgggcacatggtacgacctgcagacggtgccaatagaggcccttggcagcctcccacccccacctgcagctccccgtgagccagccatccacagcgaggggcagtgggtgacgctgccggcccccctggacaccatcaacgtccacctccgggctgggtacatcatccccctgcagggccctggcctcacaaccacagagtcccgccagcagcccatggccctggctgtggccctgaccaagggtggagaggcccgaggggagctgttctgggacgatggagagagcctggaagtgctggagcgaggggcctacacacaggtcatcttcctggccaggaataacacgatcgtgaatgagctggtacgtgtgaccagtgagggagctggcctgcagctgcagaaggtgactgtcctgggcgtggccacggcgccccagcaggtcctctccaacggtgtccctgtctccaacttcacctacagccccgacaccaaggtcctggacatctgtgtctcgctgttgatgggagagcagtttctcgtcagctggtgttagccgggcggagtgtgttagtctctccagagggaggctggttccccagggaagcagagcctgtgtgcgggcagcagctgtgtgcgggcctgggggttgcatgtgtcacctggagctgggcactaaccattccaagccgccgcatcgcttgtttccacctcctgggccggggctctggcccccaacgtgtctaggagagctttctccctagatcgcactgtgggccggggcctggagggctgctctgtgttaataagattgtaaggtttgccctcctcacctgttgccggcatgcgggtagtattagccacccccctccatctgttcccagcaccggagaagggggtgctcaggtggaggtgtggggtatgcacctgagctcctgcttcgcgcctgctgctctgccccaacgcgaccgcttcccggctgcccagagggctggatgcctgccggtccccgagcaagcctgggaactcaggaaaattcacaggacttgggagattctaaatcttaagtgcaattattttaataaaaggggcatttggaatc

SEQ ID NO: 11401 - protein, 953 aa, Homo sapiens
  misc_feature (1)..(953): Xaa=Unknown amino acid
MGVRHPPCSHRLLAVCALVSLATAALLGHILLHDFLLVPRELSGSSPVLEETHPAHQQGASRPGPRDAQAHPGRPRAVPTQCDVPPNSRFDCAPDKAITQEQCEARGCCYIPAKQGLQGAQMGQPWCFFPPSYPSYKLENLSSSEMGYTATLTRTTPTFFPKDILTLRLDVMMETENRLHFTIKDPANRRYEVPLETPRVHSRAPSPLYSVEFSEEPFGVIVHRQLDGRVLLNTTVAPLFFADQFLQLSTSLPSQYITGLAEHLSPLMLSTSWTRITLWNRDLAPTPGANLYGSHPFYLALEDGGSAHGVFLLNSNAMDVVLQPSPALSWRSTGGILDVYIFLGPEPKSVVQQYLDVVGYPFMPPYWGLGFHLCRWGYSSTAITRQVVENMTRAHFPLDVQWNDLDYMDSRRDFTFNKDGFRDFPAMVQELHQGGRRYMMIVDPAISSSGPAGSYRPYDEGLRRGVFITNETGQPLIGKVWPGSTAFPDFTNPTALAWWEDMVAEFHDQVPFDGMWIDMNEPSNFIRGSEDGCPNNELENPPYVPGVVGGTLQAATICASSHQFLSTHYNLHNLYGLTEAIASHRALVKARGTRPFVISRSTFAGHGRYAGHWTGDVWSSWEQLASSVPEILQFNLLGVPLVGADVCGFLGNTSEELCVRWTQLGAFYPFMRNHNSLLSLPQEPYSFSEPAQQAMRKALTLRYALLPHLYTLFHQAHVAGETVARPLFLEFPKDSSTWTVDHQLLWGEALLITPVLQAGKAEVTGYFPLGTWYDLQTVPIEALGSLPPPPAAPREPAIHSEGQWVTLPAPLDTINVHLRAGYIIPLQGPGLTTTESRQQPMALAVALTKGGEARGELFWDDGESLEVLERGAYTQVIFLARNNTIVNELVRVTSEGAGLQLQKVTVLGVATAPQQVLSNGVPVSNFTYSPDTKVLDICVSLLMGEQFLVSWCX

SEQ ID NO: 11402 - DNA, 1524 bp, Rattus norvegicus
  ref <308>: DATABASE ACCESSION NUMBER: Refseq / NM_019793
  ref <309>: DATABASE ENTRY DATE: 2002-01-07
ccatgggccaatgcggcatcacctcctctaagaccgtgctggtcttcctcaacctcatcttctggggggcagctggcatcctctgctacgtgggagcctatgtcttcatcacctatgacgactatgaccacttcttcgaggatgtgtacacgctcttccctgctgtggtgatcatagctgtaggagccttgcttttcatcattggcctgatcggctgctgtgctacaatccgggagagccgctgtggacttgccacgtttgtcttcatcctgctcttggttttcgtcacagaagtggttgttgtggttttgggatacgtgtacagagcaaaggtggagaacgaggttgatcgcagcattcagaaagtgtataagacctacaacgggaccaactccgacgctgccagccgtgctattgactatgtgcagagacagttgcactgttgtggaattcataactattcagactgggaaaatacagattggttcaaagaaacaaaaaaccagagtgtccctcttagctgctgcagagagactgccaaaagctgtaacggcagcctggccaacccctctgacctctacgccgagggctgtgaggctcttgttgtgaagaagctacaagaaatcttgatgcatgttatctgggcagcgttggcctttgcagctattcagctgctgggcatgctgtgcgcatgcatcgtgttgtgcagacggagtagagatcctgcctatgagctcctcatcactggcggaacctacgcgtagggacagcacgtgcctgagctaatttgtagtatccttgttctgattcagaaggtgaattgagcaggcctgcagcagttggctcctgagttcatctagtcaaagcacacgtacactggtgttgactagcaggttggcatttcatgtacccaccttcctacctgcccctctggctttcttacccttgttctagatgattctccatgcccttaatttcagaaccatttacaagttctgtaatgtggtagagctataggagggtgtggcctgcttctgtcacctctgaggagtaatggactgtgttgtggtatcactgggcccttttcgtcttcataacgagaactcttggccaaaggtttgagggtaagagggaggacgccagctgtctggtgccgcacaccagtgtccttttaaagaatatatactgtagtacaataatatagcaattgtacaaaatggctaacatagattttagaatcaaacagtatgtgtctttgttcatcttcaaaatcagagactgatctttgaaattagtggtttttaatcaaagctggctttataggaagactataatgtatgcactactgttttaaagcagttggtgtgagtgtgtgcgtttctctgtgtgattgaacccattcatcataagtcttacactcgttagagataatgtacccatggagactagcaaaatagtatgtagatgtgatctcaattgtaaatagaaaaatttaattcaataaactctgtatcagctcgtgcc

SEQ ID NO: 11403 - protein, 253 aa, Rattus norvegicus
  ref <308>: DATABASE ACCESSION NUMBER: SWISS-Prot / Q9QY33
  ref <309>: DATABASE ENTRY DATE: 2002-06-15
MGQCGITSSKTVLVFLNLIFWGAAGILCYVGAYVFITYDDYDHFFEDVYTLFPAVVIIAVGALLFIIGLIGCCATIRESRCGLATFVFILLLVFVTEVVVVVLGYVYRAKVENEVDRSIQKVYKTYNGTNSDAASRAIDYVQRQLHCCGIHNYSDWENTDWFKETKNQSVPLSCCRETAKSCNGSLANPSDLYAEGCEALVVKKLQEILMHVIWAALAFAAIQLLGMLCACIVLCRRSRDPAYELLITGGTYA

SEQ ID NO: 11404 - protein, 253 aa, Homo sapiens
  ref <308>: DATABASE ACCESSION NUMBER: SWISS-Prot / O60637
  ref <309>: DATABASE ENTRY DATE: 2002-06-15
MGQCGITSSKTVLVFLNLIFWGAAGILCYVGAYVFITYDDYDHFFEDVYTLIPAVVIIAVGALLFIIGLIGCCATIRESRCGLATFVIILLLVFVTEVVVVVLGYVYRAKVENEVDRSIQKVYKTYNGTNPDAASRAIDYVQRQLHCCGIHNYSDWENTDWFKETKNQSVPLSCCRETASNCNGSLAHPSDLYAEGCEALVVKKLQEIMMHVIWAALAFAAIQLLGMLCACIVLCRRSRDPAYELLITGGTYA

SEQ ID NO: 11405 - DNA, 547 bp, Rattus norvegicus
  ref <308>: DATABASE ACCESSION NUMBER: EMBL / AA892520
  ref <309>: DATABASE ENTRY DATE: 2000-03-03
gacacagacacaaaggcagctgtggtaatggggtgggggacacaaaagcaaaaatcacacttcctacatggaggcctcaattagacaagagagaggctgggtccctcccctcacactccttctgacagtggctggagtaacagctctctctaatccaagctcagaagcagcaggtgacccccacctagcctcaaaggtccccactttggctccagaagcccctgtccttttaaccagcccagtaattcccctacccgagctccttctcccccaccagtgtaaacagagtttggggctgaacaacagagctctgggaaggcaggagcctcctagatagcaaagggaatgtgcttggagtttcacttcggtcccagaatgagacccagcagtgtctcccagaactcgggctgatccagtatactgcctcttcattctccaccactgacagagataggccaggccccagaccacagtaaaaacaattgatccccagaggttagagctactccctacccccgacccctggcacatacacagatttttggca

SEQ ID NO: 11406 - DNA, 559 bp, Rattus norvegicus; identical to SEQ ID NO: 5822
  ref <308>: DATABASE ACCESSION NUMBER: EMBL / AA892531
  ref <309>: DATABASE ENTRY DATE: 2000-03-03

SEQ ID NO: 11407 - DNA, 2329 bp, Homo sapiens; identical to SEQ ID NO: 5823
  ref <308>: DATABASE ACCESSION NUMBER: EMBL / AL136746
  ref <309>: DATABASE ENTRY DATE: 2002-07-12

SEQ ID NO: 11408 - protein, 331 aa, Homo sapiens
  ref <308>: DATABASE ACCESSION NUMBER: SWISS-Prot / PIHUB6
  ref <309>: DATABASE ENTRY DATE: 2002-06-15
MLLILLSVALLALSSAQNLNEDVSQEESPSLIAGNPQGPSPQGGNKPQGPPPPPGKPQGPPPQGGNKPQGPPPPGKPQGPPPQGDKSRSPRSPPGKPQGPPPQGGNQPQGPPPPPGKPQGPPPQGGNKPQGPPPPGKPQGPPPQGDKSQSPRSPPGKPQGPPPQGGNQPQGPPPPPGKPQGPPQQGGNRPQGPPPPGKPQGPPPQGDKSRSPQSPPGKPQGPPPQGGNQPQGPPPPPGKPQGPPPQGGNKPQGPPPPGKPQGPPAQGGSKSQSARAPPGKPQGPPQQEGNNPQGPPPPAGGNPQQPQAPPAGQPQGPPRPPQGGRPSRPPQ

SEQ ID NO: 11409 - DNA, 618 bp, Rattus norvegicus; identical to SEQ ID NO: 5830
  ref <308>: DATABASE ACCESSION NUMBER: EMBL / AA892548
  ref <309>: DATABASE ENTRY DATE: 2000-03-03

SEQ ID NO: 11410 - protein, 451 aa, Rattus norvegicus; identical to SEQ ID NO: 5831
  ref <308>: DATABASE ACCESSION NUMBER: SWISS-Prot / P02551
  ref <309>: DATABASE ENTRY DATE: 2002-06-15

SEQ ID NO: 11411 - DNA, 4087 bp, Homo sapiens; identical to SEQ ID NO: 5832
  ref <308>: DATABASE ACCESSION NUMBER: EMBL / X01703
  ref <309>: DATABASE ENTRY DATE: 1993-04-26

SEQ ID NO: 11412 - DNA, 566 bp, Rattus norvegicus; identical to SEQ ID NO: 5834
  ref <308>: DATABASE ACCESSION NUMBER: EMBL / AA892550
  ref <309>: DATABASE ENTRY DATE: 2000-03-03

SEQ ID NO: 11413 - DNA, 1486 bp, Homo sapiens; identical to SEQ ID NO: 5835
  ref <308>: DATABASE ACCESSION NUMBER: EMBL / AK024048
  ref <309>: DATABASE ENTRY DATE: 2002-08-06

SEQ ID NO: 11414 - protein, 277 aa, Homo sapiens; identical to SEQ ID NO: 5836
  misc_feature (1)..(277): Xaa=Unknown amino acid

SEQ ID NO: 11415 - DNA, 467 bp, Rattus norvegicus
  misc_feature (1)..(467): n=a, c, g or t
  ref <308>: DATABASE ACCESSION NUMBER: EMBL / AA892759
  ref <309>: DATABASE ENTRY DATE: 2000-03-03
gaagaacaataccattaattacaaaatttaattgtaagaatcaagcaatggttactggtcaaaccgatctactttgcgctaattgcgatctacaatcagcaattgtacatgctgatttttaaacaaaggtgacaaataccagttcataacacttcagggtctacacaaacttgattctgtgtgtaaggcagagagaatggcagtgtggtcatcaataattaatcaaaggcataattttccaaacaacttttagtaacagattataactttttaaatgtctaaaactatacaaaactcaaagcaatctatttttctacctgagatcaaaacaagtctttttcatatctaaacataattcttatgaggtanatctgaattcacatgatacaccctgctttagtgaggaagtctccgatttcacatatatatgtacatcttttcaaggctactgacaactccatgaagtt

SEQ ID NO: 11416 - DNA, 477 bp, Homo sapiens
  ref <308>: DATABASE ACCESSION NUMBER: EMBL / Y09568
  ref <309>: DATABASE ENTRY DATE: 1998-02-11
atggataatctgtcatcagaagaaattcaacagagagctcaccagattactgatgagtctctggaaagtacgaggagaatcctgggtttagccattgagtctcaggatgcaggaatcaagaccatcactatgctggatgaacaaaaggaacaactaaaccgcatagaagaaggcttggaccaaataaataaggacatgagagagacagagaagactttaacagaactcaacaaatgctgtggcctttgtgtctgcccatgtaatagcataactaatgatgccagagaagatgaaatggaagagaacctgactcaagtgggcagtatcctgggaaatctaaaagacatggccctgaacataggcaatgagattgatgctcaaaatccacaaataaaacgaatcacagacaaggctgacaccaacagagatcgtattgatattgccaatgccagagcaaagaaactcattgacagctaa

SEQ ID NO: 11417 - protein, 211 aa, Homo sapiens
  ref <308>: DATABASE ACCESSION NUMBER: SWISS-Prot / O00161
  ref <309>: DATABASE ENTRY DATE: 2002-06-15
MDNLSSEEIQQRAHQITDESLESTRRILGLAIESQDAGIKTITMLDEQKEQLNRIEEGLDQINKDMRETEKTLTELNKCCGLCVCPCNRTKNFESGKAYKTTWGDGGENSPCNVVSKQPGPVTNGQLQQPTTGAASGGYIKRITNDAREDEMEENLTQVGSILGNLKDMALNIGNEIDAQNPQIKRITDKADTNRDRIDIANARAKKLIDS

SEQ ID NO: 11418 - DNA, 635 bp, Rattus norvegicus
  ref <308>: DATABASE ACCESSION NUMBER: EMBL / AA892774
  ref <309>: DATABASE ENTRY DATE: 2000-03-03
ttcaaattgattaataaaatagaaattttattatatcttgcatatccttataatatgaaaaacaaagccaaaagtttaaaaaccagttttacagatgtacatgctaataacaatggtttaatacatttgcaattatataaaatacattatacaaaagatgcctaccttttacataaagtgaattaaataaagcattcatatatttctatgatctaggtgcaatatgcacatacttagataaaaaataccaatttcctgagcaacaatgctgtaattcaaaatcagaagcagttccatggtaattcagtgtttcaataacttaactctgtaatactctaagactagatctccacttctgtttctaactatagccttcgcattgcagtgaggtaatgtcagaaaatgttttttactaaagactaacaattactaaagagtggttcatttaatgaacttttcacaccaccaaaaagcagagtccaaaaataaaaataaaataaaagtcaacaatcaactccatcagaaaagaacacttgagattacatacttcttcctaatctataacatggccagcagatcataacctggttttgcagacaggaatatgtttaaataattaaccattgggtcaaagc

SEQ ID NO: 11419 - DNA, 447 bp, Rattus norvegicus
  ref <308>: DATABASE ACCESSION NUMBER: Refseq / NM_012771
  ref <309>: DATABASE ENTRY DATE: 2002-11-05
atgaaggctctcctagttctggggttcctcctgctctctgcctctgtccaggccaagatctatgaacgctgtcagttcgccagaactctgaaaaggaatgggatgtctggctactatggagtcagcctggcagactgggtgtgtttagctcagcatgagagcaattataacacacaagccagaaactacaaccctggagaccaaagcaccgactatgggatatttcagatcaatagccgatactggtgtaatgacggcaaaaccccaagagcaaagaacgcctgtgggataccctgcagcgctctgctgcaggatgacatcactcaagccatacaatgtgcgaagagagttgtgagggatccccaaggcattcgagcatgggtggcatggcaaagacactgtaaaaaccgagatctatccgggtatattcggaactgcggagtctga

SEQ ID NO: 11420 - protein, 148 aa, Rattus norvegicus; identical to SEQ ID NO: 5874
  ref <308>: DATABASE ACCESSION NUMBER: Refseq / NP_036903
  ref <309>: DATABASE ENTRY DATE: 2002-11-05

SEQ ID NO: 11421 - DNA, 1487 bp, Homo sapiens; identical to SEQ ID NO: 5875
  ref <308>: DATABASE ACCESSION NUMBER: Refseq / NM_000239
  ref <309>: DATABASE ENTRY DATE: 2002-11-05

SEQ ID NO: 11422 - protein, 148 aa, Homo sapiens; identical to SEQ ID NO: 5876
  ref <308>: DATABASE ACCESSION NUMBER: SWISS-Prot / P00695
  ref <309>: DATABASE ENTRY DATE: 2002-06-15

SEQ ID NO: 11423 - DNA, 528 bp, Rattus norvegicus; identical to SEQ ID NO: 5884
  ref <308>: DATABASE ACCESSION NUMBER: EMBL / AA892801
  ref <309>: DATABASE ENTRY DATE: 2000-03-03

SEQ ID NO: 11424 - protein, 857 aa, Rattus norvegicus; identical to SEQ ID NO: 5885
  ref <308>: DATABASE ACCESSION NUMBER: SWISS-Prot / P05197
  ref <309>: DATABASE ENTRY DATE: 2002-06-15

SEQ ID NO: 11425 - DNA, 1573 bp, Homo sapiens; identical to SEQ ID NO: 5886
  ref <308>: DATABASE ACCESSION NUMBER: EMBL / M19997
  ref <309>: DATABASE ENTRY DATE: 2000-03-04

SEQ ID NO: 11426 - protein, 857 aa, Homo sapiens; identical to SEQ ID NO: 5887
  ref <308>: DATABASE ACCESSION NUMBER: SWISS-Prot / P13639
  ref <309>: DATABASE ENTRY DATE: 2002-06-15

SEQ ID NO: 11427 - DNA, 543 bp, Rattus norvegicus; identical to SEQ ID NO: 5905
  ref <308>: DATABASE ACCESSION NUMBER: EMBL / AA892818
  ref <309>: DATABASE ENTRY DATE: 2000-03-03

SEQ ID NO: 11428 - DNA, 590 bp, Rattus norvegicus; identical to SEQ ID NO: 5906
  ref <308>: DATABASE ACCESSION NUMBER: EMBL / AA892820
  ref <309>: DATABASE ENTRY DATE: 2000-03-03

SEQ ID NO: 11429 - DNA, 4879 bp, Homo sapiens; identical to SEQ ID NO: 5907
  ref <308>: DATABASE ACCESSION NUMBER: EMBL / AB007899
  ref <309>: DATABASE ENTRY DATE: 1999-01-11

SEQ ID NO: 11430 - protein, 995 aa, Homo sapiens; identical to SEQ ID NO: 5908
  ref <308>: DATABASE ACCESSION NUMBER: SWISS-Prot / BAA23711
  ref <309>: DATABASE ENTRY DATE: 2003-02-01

SEQ ID NO: 11431 - DNA, 570 bp, Rattus norvegicus; identical to SEQ ID NO: 5946
  ref <308>: DATABASE ACCESSION NUMBER: EMBL / AA892835
  ref <309>: DATABASE ENTRY DATE: 2000-03-03

SEQ ID NO: 11432 - DNA, 2160 bp, Homo sapiens; identical to SEQ ID NO: 5947
  ref <308>: DATABASE ACCESSION NUMBER: EMBL / AK027582
  ref <309>: DATABASE ENTRY DATE: 2002-08-06

SEQ ID NO: 11433 - DNA, 591 bp, Rattus norvegicus; identical to SEQ ID NO: 5973
  ref <308>: DATABASE ACCESSION NUMBER: EMBL / AA892854
  ref <309>: DATABASE ENTRY DATE: 2000-03-03

SEQ ID NO: 11434 - DNA, 1216 bp, Homo sapiens; identical to SEQ ID NO: 5975
  ref <308>: DATABASE ACCESSION NUMBER: EMBL / AF044197
  ref <309>: DATABASE ENTRY DATE: 1998-04-25

SEQ ID NO: 11435 - protein, 109 aa, Homo sapiens; identical to SEQ ID NO: 5976
  ref <308>: DATABASE ACCESSION NUMBER: SWISS-Prot / O43927
  ref <309>: DATABASE ENTRY DATE: 2002-06-15

SEQ ID NO: 11436 - DNA, 528 bp, Rattus norvegicus
  ref <308>: DATABASE ACCESSION NUMBER: EMBL / AA892868
  ref <309>: DATABASE ENTRY DATE: 2000-03-03
ccacacaatcacaatgtttattgctgtgctgttgtgaaaacaccatgcaaatgccaaagtgcattgagtattgcccagcccctcaaatgtgtaagaatcccaagagtctagacccactccaccaaggtctgctcctgtcccacatcagcacccatgtgcactcgcagctcacacacacccagcacgctcgcgcgctctcgcgctctctctctctctctctctctctctctctcacacacacacacacacacacacacacacacacacacacacacagagtcaaattcatagctctcacacacacaggagtgcgtgatgttctttggagcagcagagaagtcctcccccgctgggaggaatgcgggagaggtagaggtcatggagtttcctcctctttcatgtcacctcctggcaacctgtgcccagcttcgaaaggcagcatgggcaggaaaaggaagcaaaaggggctctggcctgctcctccttgcccacaagcgaagccaacaactgcaggcctgttgtgaggta

SEQ ID NO: 11437 - DNA, 508 bp, Rattus norvegicus; identical to SEQ ID NO: 5987
  ref <308>: DATABASE ACCESSION NUMBER: EMBL / AA892895
  ref <309>: DATABASE ENTRY DATE: 2000-03-03

SEQ ID NO: 11438 - protein, 144 aa, Rattus norvegicus; identical to SEQ ID NO: 2362
  ref <308>: DATABASE ACCESSION NUMBER: SWISS-Prot / P11174
  ref <309>: DATABASE ENTRY DATE: 2002-06-15

SEQ ID NO: 11439 - DNA, 221 bp, Homo sapiens; identical to SEQ ID NO: 5989
  ref <308>: DATABASE ACCESSION NUMBER: EMBL / AA434279
  ref <309>: DATABASE ENTRY DATE: 2000-03-03

SEQ ID NO: 11440 - protein, 144 aa, Homo sapiens; identical to SEQ ID NO: 2362
  ref <308>: DATABASE ACCESSION NUMBER: SWISS-Prot / R3HU15
  ref <309>: DATABASE ENTRY DATE: 2002-06-15

SEQ ID NO: 11441 - DNA, 629 bp, Rattus norvegicus
  ref <308>: DATABASE ACCESSION NUMBER: EMBL / AA892897
  ref <309>: DATABASE ENTRY DATE: 2000-03-03
attttaagttattttatttttcattattttctaacacacagagttagaaaaatgcattttggcaccatgaataaagactttcttcaagtttaacctttaaattaaaaacagtagctctaataaagatatttaaacctcattcagagaaatattaaaaattcaaataaaaattttgctgtgggaatttttaaaaagtggggtagaggaaaagtaataacaagactaagaatgagaaagtagtttatgatgaggaaaagaaatgcccctcctccaggaaaaacaaagagaccaactaccaactacggccaaaggtaagaacaggctcaaaaactattttcctgatataaaattcaagtacttaatcgttaaaaaagaagatagtaaaatgtactactaatctcaatgaaactgatatttttccttactattttctataattagaggggaaaaacagaaggaaacacatcctgtttgacttggagctgacgcctgaagcactctgtaaagcaggcagatgtgagcttcccctgagagcttgccctggagacacacaggggcccagtttccaacggacaggagcacctgcctcacaagctgaggatctccagtggatgggcttccactggcca

SEQ ID NO: 11442 - DNA, 3487 bp, Homo sapiens
atggggggatgcacggtgaagcctcagctgctgctcctggcgctcgtcctccacccctggaatccctgtctgggtgcggactcggagaagccctcgagcatccccacagataaattattagtcataactgtagcaacaaaagaaagtgatggattccatcgatttatgcagtcagccaaatatttcaattatactgtgaaggtccttggtcaaggagaagaatggagaggtggtgatggaattaatagtattggagggggccagaaagtgagattaatgaaagaagtcatggaacactatgctgatcaagatgatctggttgtcatgtttactgaatgctttgatgtcatatttgctggtggtccagaagaagttctaaaaaaattccaaaaggcaaaccacaaagtggtctttgcagcagatggaattttgtggccagataaaagactagcagacaagtatcctgttgtgcacattgggaaacgctatctgaattcaggaggatttattggctatgctccatatgtcaaccgtatagttcaacaatggaatctccaggataatgatgatgatcagctcttttacactaaagtttacattgatccactgaaaagggaagctattaacatcacattggatcacaaatgcaaaattttccagaccttaaatggagctgtagatgaagttgttttaaaatttgaaaatggcaaagccagagctaagaatacattttatgaaacattaccagtggcaattaatggaaatggacccaccaagattctcctgaattattttggaaactatgtacccaattcatggacacaggataatggctgcactctttgtgaattcgatacagtcgacttgtctgcagtagatgtccatccaaacgtatcaataggtgtttttattgagcaaccaaccccttttctacctcggtttctggacatattgttgacactggattacccaaaagaagcacttaaactttttattcataacaaagtaatttatcatgaaaaggacatcaaggtattttttgataaagctaagcatgaaatcaaaactataaaaatagtaggaccagaagaaaatctaagtcaagcggaagccagaaacatgggaatggacttttgccgtcaggatgaaaagtgtgattattactttagtgtggatgcagatgttgttttgacaaatccaaggactttaaaaattttgattgaacaaaacagaaagatcattgctcctcttgtaactcgtcatggaaagctgtggtccaatttctggggagcattgagtcctgatggatactatgcacgatctgaagattatgtggatattgttcaagggaatagagtaggagtatggaatgtcccatatatggctaatgtgtacttaattaaaggaaagacactccgatcagagatgaatgaaaggaactattttgttcgtgataaactggatcctgatatggctctttgccgaaatgctagagaaatgggtgtatttatgtacatttctaatagacatgaatttggaaggctattatccactgctaattacaatacttcccattataacaatgacctctggcagatttttgaaaatcctgtggactggaaggaaaagtatataaaccgtgattattcaaagattttcactgaaaatatagttgaacagccctgtccagatgtcttttggttccccatattttctgaaaaagcctgtgatgaattggtagaagaaatggaacattacggcaaatggtctgggggaaaacatcatgatagccgtatatctggtggttatgaaaatgtcccaactgatgatatccacatgaagcaagttgatctggagaatgtatggcttcattttatccgggagttcattgcaccagttacactgaaggtctttgcaggctattatacgaagggatttgcactactgaattttgtagtaaaatactcccctgaacgacagcgttctcttcgtcctcatcatgatgcttctacatttaccataaacattgcacttaataacgtgggagaagactttcagggaggtggttgcaaatttctaaggtacaattgctctattgagtcaccacgaaaaggctggagcttcatgcatcctgggagactcacacatttgcatgaaggacttcctgttaaaaatggaacaagatacattgcagtgtcatttatagatccctaagttatttacttttcattgaattgaaatttattttggatgaatgactggcatgaacacgtctttgaagttgtggctgagaagatgagaggaatatttaaataacatcaacagaacaacttcactttgggccaaacatttgaaaaactttttataaaaaattgtttgatatttcttaatgtctgctctgagccttaaaacacagattgaagaagaaaagaaagaaaaaacttaaatatttatttctatgctttgttgcctctgagaataatgacaatttatgaatttgtgtttcaaattgataaaatatttaggtacaaataacaagactaataatattttcttatttaaaaaaagcatgggaagatttttatttatcaaaatatagaggaaatgtagacaaaatggatataaatgaaaattaccatgttgtaaaaccttgaaaatcagattctaactggatttgtatgcaactaagtatttttctgaacacctatgcaggtcttatttacagtagttactaagggaacacacaaagaattacacaacgttttcctcaagaaaatggtacaaaacacaaccgaggagcgtatacagttgaaaacatttttgttttgattggaaggcagattattttatattagtattaaaaatcaaaccctatgtttctttcagatgaatcttccaaagtggattatattaagcaggtattagatttaggaaaacctttccatttcttaaagtattatcaagtgtcaagatcagcaagtgtccttaagtcaaacaggttttttttgttgttgtttttgctttgtttccttttttagaaagttctagaaaataggaaaacgaaaaatttcattgagatgagtagtgcatttaattattttttaaaaaactttttaagtacttgaattttatatcaggaaaacaaagttgttgagccttgcttcttccgttttgccctttgtctcgctccttattctttttttggggggagggttatttgcttttttatcttcctggcataatttccattttattcttctgagtgtctatgttaacttccctctatcccgcttataaaaaaattctccaacaaaaatacttgttgacttgatgttttatcacttctctaagtaaggttgaaatatccttattgtagctactgtttttaatgtaaaggttaaacttgaaaagaaattcttaatcacggtgccaaaattcattttctaacaccatgtgttagaaaattataaaaaataaaataatttta

SEQ ID NO: 11443 - protein, 737 aa, Homo sapiens
MGGCTVKPQLLLLALVLHPWNPCLGADSEKPSSIPTDKLLVITVATKESDGFHRFMQSAKYFNYTVKVLGQGEEWRGGDGINSIGGGQKVRLMKEVMEHYADQDDLVVMFTECFDVIFAGGPEEVLKKFQKANHKVVFAADGILWPDKRLADKYPVVHIGKRYLNSGGFIGYAPYVNRIVQQWNLQDNDDDQLFYTKVYIDPLKREAINITLDHKCKIFQTLNGAVDEVVLKFENGKARAKNTFYETLPVAINGNGPTKILLNYFGNYVPNSWTQDNGCTLCEFDTVDLSAVDVHPNVSIGVFIEQPTPFLPRFLDILLTLDYPKEALKLFIHNKVIYHEKDIKVFFDKAKHEIKTIKIVGPEENLSQAEARNMGMDFCRQDEKCDYYFSVDADVVLTNPRTLKILIEQNRKIIAPLVTRHGKLWSNFWGALSPDGYYARSEDYVDIVQGNRVGVWNVPYMANVYLIKGKTLRSEMNERNYFVRDKLDPDMALCRNAREMGVFMYISNRHEFGRLLSTANYNTSHYNNDLWQIFENPVDWKEKYINRDYSKIFTENIVEQPCPDVFWFPIFSEKACDELVEEMEHYGKWSGGKHHDSRISGGYENVPTDDIHMKQVDLENVWLHFIREFIAPVTLKVFAGYYTKGFALLNFVVKYSPERQRSLRPHHDASTFTINIALNNVGEDFQGGGCKFLRYNCSIESPRKGWSFMHPGRLTHLHEGLPVKNGTRYIAVSFIDP

SEQ ID NO: 11444 - DNA, 454 bp, Rattus norvegicus
  ref <308>: DATABASE ACCESSION NUMBER: EMBL / AA892959
  ref <309>: DATABASE ENTRY DATE: 2000-03-03
caaagaatgaacgttgcttttttactcttgtgtcctagaaaggagctgtgataaggagaagtcacgactctccatactgtacactattcacaacagtcatccggctgatcctaatcctgttgaatatgagtcagcaacagcccaaaatgaatatcagtttaaacagactcccactgccagcagggggcaggaaacagtccttcgaggccaaagccaagtggtgaatcccactgacaaatggggcatccacactcaagtctcccgtagccctacatggccaggtcacagggacagtggctacttgagaggcaatggccagctcatctggactggctattgtagctcctgggtgtgacagcgagaggcatcttctaccatttgagattgccctttaagcacctgccgcatcctttgcattcccaggcggagccggttctccttgtccgagaagaca

SEQ ID NO: 11445 - DNA, 2167 bp, Homo sapiens
  ref <308>: DATABASE ACCESSION NUMBER: EMBL / AY026508
  ref <309>: DATABASE ENTRY DATE: 2001-08-02
cctccagctccgccaagtaggtgggatccactactttgcagaggaggaagccgttcaggcctccctctgtgcactttgcaaaagcctctgcccttccatctcgaatcccttggcgccgatcacacttcctctgcctggaaacctggagccgtctctcgcgagacgtcctccgccctgtagaaggccgtttcggttcttcgtgcgcggtagccgccccacttgcgggattccaaggcctcatcgagtgcgggtatctggctgtggattcgccgccgtcctgctggacgcctggaggctcgaaccccgccgcccccctaccccaggctttactcccaccccggcttccgcccactgtgctgcccttcctcggacctgggctgtcgggagagctggagatgttcacccttcctcaaaaggacttcagggctcccaccacctgtctgggccccacctgcatgcaggacctgggcagtagccatggggaagatctggaaggagaatgctccagaaaactggaccagaagctgccagagctccgtggagtgggtgatcctgccatgatctcctctgatacctcctacctgtcctctagaggaagaatgattaaatggttctgggattcagctgaggagggctacaggacctaccacatggatgagtatgatgaggacaagaaccccagtggcatcattaacttgggcaccagtgagaacaaactctgctttgacctgctgtcctggcggctgagtcagcgcgacatgcagagggtggagccatccctgctgcagtatgctgactggaggggacatctgttcctccgggaggaagtggccaagttcctgtctttctactgcaagagcccagtacccctcagaccagagaatgtggttgtcctgaatggtggtgcctcgctcttctctgctctggccacggtgctgtgtgaggccggggaggctttcctgatccccaccccttactatggcgctatcacacagcacgtgtgtctctatggcaacatccggctggcctatgtctacctggacagtgaggtcactgggctagacacacgccccttccagctcacagtggagaagctggagatggccctgagagaagctcactctgagggtgtgaaggtcaaaggcctcatcctcatcagcccccagaaccctctgggtgatgtatactcccctgaagagctacaggagtacctggtatttgccaagaggcacaggctgcatgtgattgtggatgaggtctacatgctgtccgtgtttgagaagtctgttgggtaccgcagtgtcctaagcctggaaaggctccctgacccccagaggacccatgtgatgtgggcaaccagcaaggacttcgggatgtctgggctccgctttggcacgctgtacacagaaaaccaggatgtggccactgccgtggcttccctctgccgctaccacggcctcagtggcttggtccagtaccagatggcacagctgctccgggaccgtgactggatcaaccaggtgtacctgccggaaaaccatgcccggctcaaggctgcccacacctatgtctcagaagagcttagggcattggggatccccttcttgagtcgtggggctggcttcttcatctgggttgacttgagaaagtacctgcccaagggcacctttgaggaggaaatgctgctctggcgccgctttttggacaacaaggtgctgctgtcctttggcaaggccttcgagtgtaaagagcctggttggtttcgctttgtcttctcagaccaggtccaccggctttgcctggggatgcagagggtccagcaggtgcttgcaggcaaatcccaagtggcagaagacccccgtccctctcagagccaggagccaagtgaccaacgcaggtaagctggtcattgtctcgtggccagagggcccagcagccactgtggacctggggcgttctggggctgcagaagactgactgtggatgtgccatttgccaggaaggtatctaacttggctttgtgcctgaagaactgtttcttgtctttcgctgtagcagtgggaaactccttaagctgtggttcagcctgggccctccctctctcctattaaacaaaactaggagagtcagaaaaaaaaaaaaaaaaaaaaaaaaaaaaaaaaaaaaa

SEQ ID NO: 11446 - protein, 502 aa, Homo sapiens
  misc_feature (1)..(502): Xaa=Unknown amino acid
MFTLPQKDFRAPTTCLGPTCMQDLGSSHGEDLEGECSRKLDQKLPELRGVGDPAMISSDTSYLSSRGRMIKWFWDSAEEGYRTYHMDEYDEDKNPSGIINLGTSENKLCFDLLSWRLSQRDMQRVEPSLLQYADWRGHLFLREEVAKFLSFYCKSPVPLRPENVVVLNGGASLFSALATVLCEAGEAFLIPTPYYGAITQHVCLYGNIRLAYVYLDSEVTGLDTRPFQLTVEKLEMALREAHSEGVKVKGLILISPQNPLGDVYSPEELQEYLVFAKRHRLHVIVDEVYMLSVFEKSVGYRSVLSLERLPDPQRTHVMWATSKDFGMSGLRFGTLYTENQDVATAVASLCRYHGLSGLVQYQMAQLLRDRDWINQVYLPENHARLKAAHTYVSEELRALGIPFLSRGAGFFIWVDLRKYLPKGTFEEEMLLWRRFLDNKVLLSFGKAFECKEPGWFRFVFSDQVHRLCLGMQRVQQVLAGKSQVAEDPRPSQSQEPSDQRRX

SEQ ID NO: 11447 - DNA, 1468 bp, Rattus norvegicus
  ref <308>: DATABASE ACCESSION NUMBER: EMBL / AK018158
  ref <309>: DATABASE ENTRY DATE: 2002-09-02
tcaattctgtgtcttctgttggcttactcctacctcacacacaggagcctagaatgaagcatactgaagctgcctagaactcgccagacctctggagcacggactggggtttacccgaaactcctacctagccacagctgtcctgcctgtccaccttccgtgttcatgtcttctgcagagtgaggactggaagctggtaacacctactgataacaagaagtttggaaacacaactacaaatctctagcacacagtatttccttccagtaaaagtccagaagccaaaccttttgagttgttagaaaacaaaggcatttctcaagaatgcctcagaagcccttcactgatcacatggcctctggagagaggagtgaaagcctggagcaagaccctcctgggcaagccacaccttaccatcctagagaagaatgctactgttgctcccaggtgtttacacatgtcgtggtgacatccccaaagttgcctgaggcctagcaagtgcttcccctctggcttcagattctttttgtatgtggagttgtgttgtttctgttttctgaaatcaggttttactggaagcccaggctcgttttgaacttgcaatcctcctgctgggattacgcacatccaactctgttttgtaactgctattaacacgtattcctaatgagtggttctgtttgtattcaccagttggcaccatttcacataagaacttgagtgttaataataataaaagaactatgtatctacattgctaccttcaaagatactaacttgtgacaaaaaatatttgtgcaatattaccccaacaaatatattggaataaaaacaaaaaagtgtcaaaggcaaataatttgcccaagatcacaaagctactttgtatctaagatctaagagaatgatttggggtgtgtgtgggggggggatcctccaagcgtgtctattaaggttaggttaggccatgtcaagttgcctgatgaagcttgcactctctcagctcaacttcaatggtctaaatcaggcaaaatggaaagaaatgtaagaatataaattcatctaaaaagaagcaattagatgcagtttcttagctttccaagcagtgccagtgccttggcagccaaagcacgaggatccctgcaacagcaagggaaggcctatgggctcctgtgagcactcttgtttgagcaggacacacaatagtttgctttttgcatacacatctcaaacatttgagatattcctcttagtgttaattactgaattgtgttactgagtttcatcagctaaacccctaaaaggagttttccacattattgaaccctagctgtggcaaggtaaggacaaggaaaggttaaacggtggggacttgtgcaaaactcaatcctttctgcatttgtttgctgttatgttgctgagtgatgcttgaataaggaaatatgcaataaaattcacccatttgacaaac

SEQ ID NO: 11448 - DNA, 2526 bp, Rattus norvegicus
  ref <308>: DATABASE ACCESSION NUMBER: EMBL / BC003847
  ref <309>: DATABASE ENTRY DATE: 2002-09-22
gagaaatcacggcagaatcatcgagaaacctgaaaaatgagacctagaatgaagtattccaactccaagatttccccggcaaagttcagcagcaccgcaggcgaagccctggtcccgccttgcaaaataagaagatcccaacagaagaccaaagaattctgccatgtctactgcatgagactccgttctggcctcaccataagaaaggagactagttattttaggaaagaacccacgaaaagatattcactaaaatcgggtaccaagcatgaagagaacttctctgcctatccacgggattctaggaagagatccttgcttggcagtatccaagcatttgctgcgtctgttgacacattgagcatccaaggaacttcacttttaacacagtctcctgcctccctgagtacatacaatgaccaatctgttagttttgttttggagaatggatgttatgtgatcaatgttgacgactctggaaaagaccaagagcaagaccaggtgctactacgctactatgagtctccctgtcctgcaagtcaatcaggcgacggtgtggatgggaagaaggtgatggtgaacatgagtcccatcaaagacacagacatctggctgcatgccaacgacaaggactactccgtggagcttcaaaggggtgacgtctcgcctccggaacaggccttcttcgtccttcacaaaaagtcctcggactttgtttcatttgaatgcaagaatcttcctggcacttacataggagtaaaagataaccagctggctctagtggaggagaaagatgagagctgcaacaatattatgtttaagctctcgaaaatctaatgcagtaaaacgcctgtgcgttctgggttgaatgacttaatgcttccaactgaagaaagggtaacagagagaaagaaagccattcttggcttacgatgttgtggaatgttattatgtagaaaacttcttttatttccttttcttcagctacatgttcaatagactcacagatatatgacttacggcgttggtaaagaaactgaaggagattcagccttgctctttccttttctctgccttgagtcctgtatgaaatcacactcacggacttcagaagagcaggcaccacagtgcatggtttgctttagagagggtccatttcaaaaaccttcataaaaacaatgcaaaacaagaaaacaaccgaacaaaaaaaccacctatttcctggttctaaacaaatgattgtaatactagagcagttagtgggaggaccagctagggggaggatcacctaggggaggaccagctagggggaggaccagctgctgcaaagactgactgtttctcacttataataaaatgccaaatgcctccgcagatgccccaggcaaccctcagatcagccctttctgtgaagagtggcgttacctgtgcttgtttccttcttaaacttccaatttttctcttttaacacatttaacatttaactttaagcaagccagcttacattaggaagtgaaagacattttagttcccacccgtgattgaaatcattgactatatctaacaagcttaaagtctcctgtaagaactgatcaggatatacactaggacatgccaatagaatgggatctcatggtgcagtctgaagccctccaactggagagacgctaacatcatccttctcgctgatttccaaggagctatgactttggatgcatgcatctgcttggatgagatgtctcggctgcttgctttccttatgcacacgttctgttcagcttcacagcagcaatgctcacggtggaatagcttagcttagcttctgccccttctttggttcttttgaccaccatatccgtaacggctctcctactccctcagctttctttctctttgctctgacgtctatatgccaacacacttattccactgtctttaccctgcactgcagaattttacatctacctactggttaccaggttgtcccctgaacaaccttcctttgtgttttactgttattaaagtagtaatatttgtattcaaccatgtagtaatattttaagccactaaaggaatagttttacttatttagacaacagcaatttctactacatttttataagcttaaaacttacatgttttaaaacttaaaacgataaagacaataacaacattgatggagtatgatatgacagttcagaaagggttagctcttatcttccagtcgaggaaacctattgtatacaatagctggaggaatgtatgatcaaagaggccgggaaccgccgtgtaggatcgtacggctgtaacaggtataattgtttcattaatttgtcacagtcttactgtagaggaatgtaaaggcggaatctgcgtcattcctctggaaaccacagtgttgactctgtgaatctgtacgatatctttaaagtagtaactacgtagtcaaatgtgttcttgacgttgttcataactttgaataaaccatttttcaaaaccacgtgtgaccacaaaaaaaaaaaaaaa

SEQ ID NO: 11449 - protein, 266 aa, Rattus norvegicus
  ref <308>: DATABASE ACCESSION NUMBER: SWISS-Prot / AAH03847
  ref <309>: DATABASE ENTRY DATE: 2002-06-01
MRPRMKYSNSKISPAKFSSTAGEALVPPCKIRRSQQKTKEFCHVYCMRLRSGLTIRKETSYFRKEPTKRYSLKSGTKHEENFSAYPRDSRKRSLLGSIQAFAASVDTLSIQGTSLLTQSPASLSTYNDQSVSFVLENGCYVINVDDSGKDQEQDQVLLRYYESPCPASQSGDGVDGKKVMVNMSPIKDTDIWLHANDKDYSVELQRGDVSPPEQAFFVLHKKSSDFVSFECKNLPGTYIGVKDNQLALVEEKDESCNNIMFKLSKI

SEQ ID NO: 11450 - DNA, 2645 bp, Homo sapiens
  ref <308>: DATABASE ACCESSION NUMBER: EMBL / AB024518
  ref <309>: DATABASE ENTRY DATE: 1999-03-15
cacaagaatactgaaaaatgaagcctaaaatgaagtattcaaccaacaaaatttccacagcaaagtggaagaacacagcaagcaaagccttgtgtttcaagctgggaaaatcccaacagaaggccaaagaagtttgccccatgtactttatgaagctccgctctggccttatgataaaaaaggaggcctgttactttaggagagaaaccaccaaaaggccttcactgaaaacaggtagaaagcacaaaagacatctggtactcgctgcctgtcaacagcagtctactgtggagtgctttgcctttggtatatcaggggtccagaaatatactagagcacttcatgattcaagtatcacaggaatttcacctattacagagtatcttgcttctctaagcacatacaatgatcaatccattacttttgctttggaggatgaaagttatgagatatatgttgaagacttgaaaaaagatgaaaagaaagataaggtgttactgagttactatgagtctcaacacccctcaaatgaatcaggtgacggtgttgatggtaagatgttaatggtaaccctgagtcctacaaaagacttctggttgcatgccaacaacaaggaacactctgtggagctccataagtgtgaaaaaccactgccagaccaggccttctttgtccttcataatatgcactccaactgtgtttcatttgaatgcaagactgatcctggagtgtttataggtgtaaaggataatcatcttgctctgattaaagtagactcttctgagaatttgtgtactgaaaatatcttgtttaagctctctgaaacttagttgatggaaacctgtgagtcttgggttgagtacccaaatgctaccactggagaaggaatgagagataaagaaagagacaggtgacatctaagggaaatgaagagtgcttagcatgtgtggaatgttttccatattatgtataaaaatattttttctaatcctccagttattcttttatttccctctgtataactgcatcttcaatacaagtatcagtatattaaatagggtattggtaaagaaacggtcaacattctaaagagatacagtctgacctttacttttctctagtttcagtccagaaagaacttcatatttagagctaaggccactgaggaaagagccatagcttaagtctctatgtagacagggatccattttaaagagctacttagagaaataattttccacagttccaaacgataggctcaaacactagagctgctagtaaaaagaagaccagatgcttcacagaattatcattttttcaactggaataaaacaccaggtttgtttgtagatgtcttaggcaacactcagagcagatctcccttactgtcaggggatatggaacttcaaaggcccacatggcaagccaggtaacataaatgtgtgaaaaagtaaagataactaaaaaatttagaaaaataaatccagtatttgtaaagtgaataacttcatttctaattgtttaatttttaaaattctgatttttatatattgagtttaagcaaggcattcttacacgaggaagtgaagtaaattttagttcagacataaaatttcacttattaggaatatgtaacatgctaaaacttttttttttttaaagagtactgagtcacaacatgttttagagcatccaagtaccatataatccaactatcatggtaaggccagaaatcttctaacctaccagagcctagatgagacaccgaattaacattaaaatttcagtaactgactgtccctcatgtccatggcctaccatcccttctgaccctggcttccagggacctatgtcttttaatactcactgtcacattgggcaaagttgcttctaatccttatttcccatgtgcacaagtctttttgtattccagcttcctgataacactgcttactgtggaatattcatttgacatctgtctcttttcatttcttttaactaccatgcccttgatatatcttttgcacctgctgaacttcatttctgtatcacctgacctctggatgccaaaacgtttattctgctttgtctgttgtagaattttagataaagctattaatggcaatatttttttgctaaacgtttttgttttttactgtcactagggcaataaaatttatactcaaccatataataacattttttaactacataaaggagtagtttttattttaaagtcttagcaatttctattacaacttttcttagacttaacacttatgataaatgactaacatagtaacagaatctttatgaaatatgaccttttctgaaaatacatacttttacatttctactttattgagacctattagatgtaagtgctagtagaatataagataaaagaggctgagaattaccatacaagggtattacaactgtaaaacaatttatctttgtttcattgttctgtcaataattgttaccaaagagataaaaataaaagcagaatgtatatcatcccatctgaaaaacactaattattgacatgtgcatctgtacaataaacttaaaatgattattaaataatcaaatatatctactacattgtttatattattgaataaagtatattttccaaatgt

SEQ ID NO: 11451 - protein, 270 aa, Homo sapiens
  ref <308>: DATABASE ACCESSION NUMBER: SWISS-Prot / BAA75892
  ref <309>: DATABASE ENTRY DATE: 1999-05-01
MKPKMKYSTNKISTAKWKNTASKALCFKLGKSQQKAKEVCPMYFMKLRSGLMIKKEACYFRRETTKRPSLKTGRKHKRHLVLAACQQQSTVECFAFGISGVQKYTRALHDSSITGISPITEYLASLSTYNDQSITFALEDESYEIYVEDLKKDEKKDKVLLSYYESQHPSNESGDGVDGKMLMVTLSPTKDFWLHANNKEHSVELHKCEKPLPDQAFFVLHNMHSNCVSFECKTDPGVFIGVKDNHLALIKVDSSENLCTENILFKLSET

SEQ ID NO: 11452 - DNA, 496 bp, Rattus norvegicus
  ref <308>: DATABASE ACCESSION NUMBER: EMBL / AA892993
  ref <309>: DATABASE ENTRY DATE: 2000-03-03
gaatgaaaactcacttgcttttattgacacatatttaaaagtccggattgagtgatgaaaggcgtggggtaaggggctgttggactaccccacccctaccccggcgctgcttggttagcgcctgcccagtgggtccagtggctgtatggtgagtggcctagggtcctgctcttcatcaggggtggcggtggggtatctgagtccggaggccatggttcctctgttcctgacccactgtactgtgaccctccctgtgaggcaggcaggtcttccgggctctgcaacctgggttggggttcgaggttaaagggatgcagttgagatttcatttgaggggggtctggagaccccaaggtgcagcttcttcctgagcgggtgtggaggggcgtctcccggtccaagaggcctgtcacaggtgctcgctgtgggacagagggggtgatgaagacctcgagctgagccatactctctcttcacccgttcctcccctcctgca

SEQ ID NO: 11453 - protein, 317 aa, Rattus norvegicus
  ref <308>: DATABASE ACCESSION NUMBER: SWISS-Prot / AAF66708
  ref <309>: DATABASE ENTRY DATE: 2003-02-01
MSHGPRQPGAATAPAGGKTPGQHGAFVVAVKQERSEGSRAGEKGPQEEEPVKKRGWPKGKKRKKILPNGPKAPVTGYVRFLNERREQIRTRHPDLPFPEITKMLGAEWSKLQPAEKQRYLDEAEKEKQQYLKELWAYQQSEAYKVCTEKIQENKIKKEDSSSGLMNTLLNGHKGVDCDGFSTFDVPIFTEEFLDQNKAREAELRRLRKMNVAFEEQNAVLQRHTQSMSSARERLEQELALEERRTLALQQQLQAVRQALTASFASLPVPGTGETPTLGTLDFYMARLHGAIERDPAQHERLIARVKEILARVASEHL

SEQ ID NO: 11454 - DNA, 465 bp, Rattus norvegicus; identical to SEQ ID NO: 6000
  misc_feature (1)..(465): n=a, c, g or t
  ref <308>: DATABASE ACCESSION NUMBER: EMBL / AA892999
  ref <309>: DATABASE ENTRY DATE: 2000-03-03

SEQ ID NO: 11455 - DNA, 414 bp, Rattus norvegicus
  ref <308>: DATABASE ACCESSION NUMBER: EMBL / AA893040
  ref <309>: DATABASE ENTRY DATE: 2000-03-03
ccagcgccagcacatgtgactggtttaattacatcatctgtcactaaacactgagtagaatacagtggataagcataggattctccaccatggagagagacttatgttgccacagtttctatccccacctgtgtgggaagacttggagtttcctgttgccaggggctgatgggacagggcatgcatgaggccctgcctcagcataagctctgagcaagaagttgcatgccggttagcacacatggggaaagccagccctagacagtacagagatacgcttgtaacaggtgcagtaaggctacacagattacaaacaaataggcacatggacatcatgggtgttcgtgggcacagccaatgggcagtcacttcctcagagtcttcatggtgccactcggccattgttgcttaagc

SEQ ID NO: 11456 - DNA, 493 bp, Rattus norvegicus
  misc_feature (1)..(493): n=a, c, g or t
  ref <308>: DATABASE ACCESSION NUMBER: EMBL / AA893160
  ref <309>: DATABASE ENTRY DATE: 2000-03-03
gaggactatcaaagttttatttaaaatttcggagcacttgaaagaatataatgtacttgtgtttttattgtgtaacttaaagaatgctttcaattacaattagccttcaagggtcaccacagaacactgcttggccaggcctactgttgtctaccttcaccctctggtggctggcggggaggtaggctgctgacatccctgtggcaggtggcttgctcctacttggagtggcaatttttcttcttcttgtggcccttgattgcctttctcagggcttcatccagaatgagatccaacactctcatgtctgtgtggctactgccaatttttgggcaacaggccttcttcctcctcttatgcttggattccatcatgcgaacaatggccacacattttatttttcactggattcttcatttgcaactcctgtaagttttggtcttcttgagtccaagagtttanaacatgtgctcacgagtcactcacaatgaaa

SEQ ID NO: 11457 - DNA, 491 bp, Rattus norvegicus; identical to SEQ ID NO: 6012
  ref <308>: DATABASE ACCESSION NUMBER: EMBL / AA893183
  ref <309>: DATABASE ENTRY DATE: 2000-03-03

SEQ ID NO: 11458 - protein, 345 aa, Homo sapiens; identical to SEQ ID NO: 6014
  ref <308>: DATABASE ACCESSION NUMBER: PIR / S57447
  ref <309>: DATABASE ENTRY DATE: 1999-09-24

SEQ ID NO: 11459 - DNA, 1314 bp, Homo sapiens
  ref <308>: DATABASE ACCESSION NUMBER: Refseq / NM_001122
  ref <309>: DATABASE ENTRY DATE: 2002-11-05
atggcatccgttgcagttgatccacaaccgagtgtggtgactcgggtggtcaacctgcccttggtgagctccacgtatgacctcatgtcctcagcctatctcagtacaaaggaccagtatccctacctgaagtctgtgtgtgagatggcagagaacggtgtgaagaccatcacctccgtggccatgaccagtgctctgcccatcatccagaagctagagccgcaaattgcagttgccaatacctatgcctgtaaggggctagacaggattgaggagagactgcctattctgaatcagccatcaactcagattgttgccaatgccaaaggcgctgtgactggggcaaaagatgctgtgacgactactgtgactggggccaaggattctgtggccagcacgatcacaggggtgatggacaagaccaaaggggcagtgactggcagtgtggagaagaccaagtctgtggtcagtggcagcattaacacagtcttggggagtcggatgatgcagctcgtgagcagtggcgtagaaaatgcactcaccaaatcagagctgttggtagaacagtacctccctctcactgaggaagaactagaaaaagaagcaaaaaaagttgaaggatttgatctggttcagaagccaagttattatgttagactgggatccctgtctaccaagcttcactcccgtgcctaccagcaggctctcagcagggttaaagaagctaagcaaaaaagccaacagaccatttctcagctccattctactgttcacctgattgaatttgccaggaagaatgtgtatagtgccaatcagaaaattcaggatgctcaggataagctctacctctcatgggtagagtggaaaaggagcattggatatgatgatactgatgagtcccactgtgctgagcaatttgagtcacgtactcttgcaattgcccgcaacctgactcagcagctccagaccacgtgccacaccctcctgtccaacatccaaggtgtaccacagaacatccaagatcaagccaagcacatgggggtgatggcaggcgacatctactcagtgttccgcaatgctgcctcctttaaagaagtgtctgacagcctcctcacttctagcaaggggcagctgcagaaaatgaaggaatctttagatgacgtgatggattatcttgttaacaacacgcccctcaactggctggtaggtcccttttatcctcagctgactgagtctcagaatgctcaggaccaaggtgcagagatggacaagagcagccaggagacccagcgatctgagcataaaactcattaa

SEQ ID NO: 11460 - protein, 437 aa, Homo sapiens
  ref <308>: DATABASE ACCESSION NUMBER: SWISS-Prot / Q99541
  ref <309>: DATABASE ENTRY DATE: 2002-06-15
MASVAVDPQPSVVTRVVNLPLVSSTYDLMSSAYLSTKDQYPYLKSVCEMAENGVKTITSVAMTSALPIIQKLEPQIAVANTYACKGLDRIEERLPILNQPSTQIVANAKGAVTGAKDAVTTTVTGAKDSVASTITGVMDKTKGAVTGSVEKTKSVVSGSINTVLGSRMMQLVSSGVENALTKSELLVEQYLPLTEEELEKEAKKVEGFDLVQKPSYYVRLGSLSTKLHSRAYQQALSRVKEAKQKSQQTISQLHSTVHLIEFARKNVYSANQKIQDAQDKLYLSWVEWKRSIGYDDTDESHCAEHIESRTLAIARNLTQQLQTTCHTLLSNIQGVPQNIQDQAKHMGVMAGDIYSVFRNAASFKEVSDSLLTSSKGQLQKMKESLDDVMDYLVNNTPLNWLVGPFYPQLTESQNAQDQGAEMDKSSQETQRSEHKTH

SEQ ID NO: 11461 - DNA, 370 bp, Rattus norvegicus; identical to SEQ ID NO: 6026
  ref <308>: DATABASE ACCESSION NUMBER: EMBL / AA893320
  ref <309>: DATABASE ENTRY DATE: 2000-03-03

SEQ ID NO: 11462 - DNA, 348 bp, Rattus norvegicus
  ref <308>: DATABASE ACCESSION NUMBER: EMBL / AA893353
  ref <309>: DATABASE ENTRY DATE: 2000-03-03
ggagtgaaaatctactttaataacccagcatcagctaaactgagatcctcccctctcaatcaaaggggtggaagacaagtcttggaaagaggcctcagtccaccaagaggttacggcttacagaagggaacagctcaaagaagcccttgaaaagggtgagggtctggagaactccagtggtacaggctgtctcccggatagagtgcatggccagttgggggctgcctaagtccagcacccgaagccccagtcgagaagccaagataggtccaatggtggtaccacatggagagtcattcctgaccatgaggtcctgcagagggactccaacttggccggccacctctc

SEQ ID NO: 11463 - DNA, 434 bp, Rattus norvegicus
  ref <308>: DATABASE ACCESSION NUMBER: EMBL / AA893357
  ref <309>: DATABASE ENTRY DATE: 2000-03-03
aatatgcgcgcccaggctgccaacggccacactgggtcacgtgtaaatctgaaaacatttaatgctctttcccctgggtttcacgtataacgcaaaacagaaatatttcaattacatgtgactaagagtaagaaaaatatacaactctatttaaaacacttaaattaacaagaaagggtttttccattctagcaaaatattgtacatttggttttaaacaagagttaatatccagacatacattttcaaaatacctgatgctagttgaaaaatcagtgaccatgaggccttccaagatatttctaactagcaaaactgtgcacacctgggaaggcctgaaggcttttcccccctagaacacagacatcaaacaggccaataccgcaaactgaccgatgcctctaaatccggttgcttcagcttccggaactacg

SEQ ID NO: 11464 - DNA, 946 bp, Homo sapiens
  misc_feature (1)..(946): n=a, c, g or t
  ref <308>: DATABASE ACCESSION NUMBER: EMBL / BF980403
  ref <309>: DATABASE ENTRY DATE: 2001-01-25
tacttttcatcgatgttaaaatatcatacattcagtttaaacaagagttaatatccagacacacgttttcaaaatacctgagtgctagttgaaaattagtgaccatgaggctttccaagatatttctaattagcaaactgtgtacaattttgaagaagtgtacacaccgtgctggaagacagacactgaacaggtcaaaatgcaaactcatgtatctttcatcaacctaaatcttgttgcttcacttttctaaatgatactttggctgtcagcgaatcttatagcttcttttcccttaaagacaataatatataacaacaccaccccacacaaataaccataaacttctttgtgtgaaataagccctatcaaaatgtgttcatgtatttctgtaccaactgatctatactgagactgtcatgaaaaaggtatcaaacaagtgtaacaggcctacacttaaacctctgcctcaaaggagaaatcagatacttgccacgttattgcaaagtcaaagctgctacacttaaaatatggtagatagtttagaaaaatcaaatcaaaaatgttttctcactggctttttcagataaagaagttggaccacaaaccaacacatctgtgtganaacagccaccaatttgagtccccccagcccctcaaaaggaacaatgccccagtccctcaccatgaccatacgtctcttggccgggactgcgatttctagcgcgtgtcttccattctatctctgggggagccgaccaacggttctacccaattccttcctttgtctcccccagccgacctagatcctctgatttgtccctccatcctgcaattcccgaagggggtaatactctcccagaaagaatgcttagcccatataaggccggcacagaagcgtccgtaacaggcttgggacaacggggaacgcccgaaattggtgcag

SEQ ID NO: 11465 - DNA, 2476 bp, Rattus norvegicus
  ref <308>: DATABASE ACCESSION NUMBER: EMBL / AF169033
  ref <309>: DATABASE ENTRY DATE: 1999-11-23
ggaagagaacacaattctctaggacctgcactggaacccggggtttccagggagaaatggtgaccccgggggaacagaggtctcccgtcccatcctaagaactgctagatcccgtgtgacatcaccagtcccctcactgctgccactgctagaagctctgagctctgtgctgggggcaccaggcactgacacttggctcttgttgggagaacagagagagtctctcttgtccacagcctgtgctcagctccaactgctgcatctcccagaggctctgccctgccccagctgcatagagcctacctgatcacagctccagaatggcctccagcccagttggagttcctagcccacagccctctagggccaatgggaacatcaacctggggccatcagccaacccaaatgcccggcccacagactttgatttcctcaaagtcattggcaaagggaactacgggaaggtcctactggccaagcgcaagtcggacggagccttctacgccgtgaaggtgctgcagaagaaatccattttaaagaacaaagagcagaaccacatcatggcagagcgcaacgtgctgttgaagaacgtgcggcatcctttcctcgtgggcctgcgctactccttccagaccccagagaaactctactttgtgcttgactatgtcaacgggggagagctcttcttccatctacagcgggaacgcaggttcctggagccccgggcccggttctacactgcagaggtggcgagcgccattggttaccttcactctctcaacatcatctacagagacctgaagccagaaaacattctcttggactgccagggtcacgtggtactgaccgatttcggcctttgcaaggaatgtgtagagcctgaggagaccacgtccaccttctgcggcacccctgagtacttggctccagaagtgcttcgtaaagagccttacgatcgagcagtggactggtggtgcttaggggcagtcctctacgagatgctacatggcctgccccccttcttcaacactgacgtggcccagatgtatgagaatattttacatcagccgctacagatccctggaggccggacagtggctgcctgtgacctcctgcaaggccttctccacaaggaccagaggcagcggctgggctccaaggaagactttctggacataaagaaccacatgttcttcagtcccataaactgggatgatctgtaccacaagaggctgactccacccttcaacccaaacgtggaaggacctgctgacttgaaacactttgacccagagttcacccaggaagctgtgtccaagtccattggctgcacccctgacaccgtggccagcagttctggggcttcaagtgcattccttggattttcctatgcacaggatgatgatgacattttggactcttgagagacgtgcgcttggaaagccaccaagcccagccggtacctgctggaactatcttctgctgcactaagacacaatgagtcccaaagaagtaagacacagtggctcggagaagaggggaaacacattttccatcatgtgaaggaacagttcaggctccccagtatccagccgtctgcagttctgacttgcccttcttgagaaatgacttctgtgcttggtttttcatttttgttttgtcttgtttgttgttgctgaggcagtgacaaaatatgcaagaaaagtaaagaacatctatttggactcacgattttagaaggtaaagcccacagttggctcatctattgctacggtcttcagccaaagctgagtcatctcactggaaggggtggcttaccttatgactaccaggaggcagaaacagaagtccgagctgggaataagataccttcaaataagatatcccaagtggcctactcccttccagcctggggtgggggaggccccacctcgatttatcacctctccatgctataaaattacacatctatgaacggactatattgctgaggaagcctgagcccctccctcattggatagtgatccaatcatttactgaaggctccatcagctggacacaggaaccttcagaaaagagactagaaccgtggtagctttggatgttgagttatgagatcacagagtggttactggccacttttgtgtgctaagcaagagaaaaggaggaacgggacagaggtgggctgcccagaaaccgtctggtggcttcctttagtgtgtcgtaaatctccacctctcctggaatgcagcctgggcacaagctacctctcgtagtaaaagggttcaaatgctgagagaaaggggaggatgtaggtgaccagcactctgggagagagcctcttggtatctgaatttatatttcagtgtatacattgatgaaatgtaataagcctgtcatgtgttgtctttggtttgaggttgctctatgtggacggtgtctttgtttcaggtaatattaaatgcactggatatta

SEQ ID NO: 11466 - protein, 367 aa, Rattus norvegicus
  ref <308>: DATABASE ACCESSION NUMBER: SWISS-Prot / AAF12756
  ref <309>: DATABASE ENTRY DATE: 2003-02-01
MASSPVGVPSPQPSRANGNINLGPSANPNARPTDFDFLKVIGKGNYGKVLLAKRKSDGAFYAVKVLQKKSILKNKEQNHIMAERNVLLKNVRHPFLVGLRYSFQTPEKLYFVLDYVNGGELFFHLQRERRFLEPRARFYTAEVASAIGYLHSLNIIYRDLKPENILLDCQGHVVLTDFGLCKECVEPEETTSTFCGTPEYLAPEVLRKEPYDRAVDWWCLGAVLYEMLHGLPPFFNTDVAQMYENILHQPLQIPGGRTVAACDLLQGLLHKDQRQRLGSKEDFLDIKNHMFFSPINWDDLYHKRLTPPFNPNVEGPADLKHFDPEFTQEAVSKSIGCTPDTVASSSGASSAFLGFSYAQDDDDILDS

SEQ ID NO: 11467 - DNA, 1850 bp, Homo sapiens
agtcaggattgtgcctccagtcagaaggaccatgaagagagagaagagggcagagccgtgcatggggctgctccccaggacctgagcaggaacctggagttttcagagctgcctgatcattgctacagaatgaactctagcccagctgggaccccaagtccacagccctccagggccaatgggaacatcaacctggggccttcagccaacccaaatgcccagcccacggacttcgacttcctcaaagtcatcggcaaagggaactacgggaaggtcctactggccaagcgcaagtctgatggggcgttctatgcagtgaaggtactacagaaaaagtccatcttaaagaagaaagagcagagccacatcatggcagagcgcagtgtgcttctgaagaacgtgcggcaccccttcctcgtgggcctgcgctactccttccagacacctgagaagctctacttcgtgctcgactatgtcaacgggggagagctcttcttccacctgcagcgggagcgccggttcctggagccccgggccaggttctacgctgctgaggtggccagcgccattggctacctgcactccctcaacatcatttacagggatctgaaaccagagaacattctcttggactgccagggacacgtggtgctgacggattttggcctctgcaaggaaggtgtagagcctgaagacaccacatccacattctgtggtacccctgagtacttggcacctgaagtgcttcggaaagagccttatgatcgagcagtggactggtggtgcttgggggcagtcctctacgagatgctccatggcctgccgcccttctacagccaagatgtatcccagatgtatgagaacattctgcaccagccgctacagatccccggaggccggacagtggccgcctgtgacctcctgcaaagccttctccacaaggaccagaggcagcggctgggctccaaagcagactttcttgagattaagaaccatgtattcttcagccccataaactgggatgacctgtaccacaagaggctaactccacccttcaacccaaatgtgacaggacctgctgacttgaagcattttgacccagagttcacccaggaagctgtgtccaagtccattggctgtacccctgacactgtggccagcagctctggggcctcaagtgcattcctgggattttcttatgcgccagaggatgatgacatcttggattgctagaagagaaggacctgtgaaactactgaggccagctggtattagtaaggaattaccttcagctgctaggaagagcgactcaaactaacaatggcttcaacgagaagcaggtttattttttccagcacataaaagaaaaataatgtttcggagtccaggactggcaggacaggtcatcagatactcagaggctgtatctctgccctgccaaccttgacaaatggcttccaatgttaggtttgctacaagatggttactggagctctagctgcctattttgtgtttagggaagggaaaatggaggaaaggggagaagagcaaagggcgcttttaaagagctttcccaaaagctccacccaatgacttctgcttccatctcactaaccacccacccctacctggaatggaggctgggagatgtggcttatttgctgggtacgtgactatccctaataacaaaggggttctgacactaagacattaggggagaatgttgggtaggcagccagcactcttttaccagagggcctcctggtgtttggattttgatctcaatgtgtaaaatgacagagatgtaacaagctcatagggtatcaatatctcttattgttctatgttga

SEQ ID NO: 11468 - protein, 367 aa, Homo sapiens
MNSSPAGTPSPQPSRANGNINLGPSANPNAQPTDFDFLKVIGKGNYGKVLLAKRKSDGAFYAVKVLQKKSILKKKEQSHIMAERSVLLKNVRHPFLVGLRYSFQTPEKLYFVLDYVNGGELFFHLQRERRFLEPRARFYAAEVASAIGYLHSLNIIYRDLKPENILLDCQGHVVLTDFGLCKEGVEPEDTTSTFCGTPEYLAPEVLRKEPYDRAVDWWCLGAVLYEMLHGLPPFYSQDVSQMYENILHQPLQIPGGRTVAACDLLQSLLHKDQRQRLGSKADFLEIKNHVFFSPINWDDLYHKRLTPPFNPNVTGPADLKHFDPEFTQEAVSKSIGCTPDTVASSSGASSAFLGFSYAPEDDDILDC

SEQ ID NO: 11469 - DNA, 508 bp, Rattus norvegicus; identical to SEQ ID NO: 6064
  ref <308>: DATABASE ACCESSION NUMBER: EMBL / AA893641
  ref <309>: DATABASE ENTRY DATE: 2000-03-03

SEQ ID NO: 11470 - protein, 379 aa, Rattus norvegicus; identical to SEQ ID NO: 6065
  ref <308>: DATABASE ACCESSION NUMBER: SWISS-Prot / Q9QXQ7
  ref <309>: DATABASE ENTRY DATE: 2002-06-15

SEQ ID NO: 11471 - DNA, 2457 bp, Homo sapiens; identical to SEQ ID NO: 6066
  ref <308>: DATABASE ACCESSION NUMBER: EMBL / AL390088
  ref <309>: DATABASE ENTRY DATE: 2000-07-19

SEQ ID NO: 11472 - protein, 365 aa, Homo sapiens; identical to SEQ ID NO: 6067
  ref <308>: DATABASE ACCESSION NUMBER: SWISS-Prot / P41221
  ref <309>: DATABASE ENTRY DATE: 2002-06-15

SEQ ID NO: 11473 - DNA, 457 bp, Rattus norvegicus; identical to SEQ ID NO: 6072
  misc_feature (1)..(457): n=a, c, g or t
  ref <308>: DATABASE ACCESSION NUMBER: EMBL / AA893662
  ref <309>: DATABASE ENTRY DATE: 2000-03-03

SEQ ID NO: 11474 - DNA, 475 bp, Rattus norvegicus
  ref <308>: DATABASE ACCESSION NUMBER: EMBL / AA893691
  ref <309>: DATABASE ENTRY DATE: 2000-03-03
agcaaatatttattaagagcatgctatgcagtatgacagagatgacacacgaaatatctatgtcatgggaacatgataacgatcatttgcaaatttttcttctggtagatgtcacacattttaattttccctttcctgcctaaaataccattttctatagttagcgtgtagcatttggatgacattcttaagcgatattttgaagtgaatcatattacagttttatagcagggaagttgaggcacggggaccgtcagttagaagtgctaggtagttcatcctgtcagtgcagacagagccgtttgattcgtgagcaataagatgggaggtcccgcctacacaacgggacgtgcagatgtctagcctattcctttacctacgtgaaattctaatagtttctttcccagcagaactctgcagtctgaaaagcacaatccacagagagtagaaccctgtttccttctgagacagatga

SEQ ID NO: 11475 - DNA, 444 bp, Rattus norvegicus; identical to SEQ ID NO: 6116
  ref <308>: DATABASE ACCESSION NUMBER: EMBL / AA893733
  ref <309>: DATABASE ENTRY DATE: 2000-03-03

SEQ ID NO: 11476 - DNA, 3333 bp, Homo sapiens; identical to SEQ ID NO: 6117
  ref <308>: DATABASE ACCESSION NUMBER: EMBL / M34480
  ref <309>: DATABASE ENTRY DATE: 1999-07-02

SEQ ID NO: 11477 - protein, 1039 aa, Homo sapiens; identical to SEQ ID NO: 6118
  ref <308>: DATABASE ACCESSION NUMBER: SWISS-Prot / P08514
  ref <309>: DATABASE ENTRY DATE: 2002-06-15

SEQ ID NO: 11478 - DNA, 520 bp, Rattus norvegicus; identical to SEQ ID NO: 6122
  ref <308>: DATABASE ACCESSION NUMBER: EMBL / AA893743
  ref <309>: DATABASE ENTRY DATE: 2000-03-03

SEQ ID NO: 11479 - DNA, 389 bp, Homo sapiens; identical to SEQ ID NO: 6123
  ref <308>: DATABASE ACCESSION NUMBER: EMBL / AI092788
  ref <309>: DATABASE ENTRY DATE: 2000-03-03

SEQ ID NO: 11480 - protein, 75 aa, Homo sapiens; identical to SEQ ID NO: 6124
  ref <308>: DATABASE ACCESSION NUMBER: SWISS-Prot / P04541
  ref <309>: DATABASE ENTRY DATE: 2002-06-15

SEQ ID NO: 11481 - DNA, 1375 bp, Rattus norvegicus
  ref <308>: DATABASE ACCESSION NUMBER: EMBL / AK018349
  ref <309>: DATABASE ENTRY DATE: 2002-09-02
gaagagggaaagagcgaactggggcgatccggaacctggtggccatactccttcaggtggatcaacaggcacacgacatgggaaagaagaccaagaggacagccgacagctcttcttcagaggatgaggaggaatatgtggtggaaaaggtgttggacaggcgcatggttaaggggcaagtggaatatctgttgaagtggaaaggcttttctgaggagcacaatacttgggaacctgagaagaacttggattgtcctgaactaatttctgagtttatgagaaagtataagaagatgaaggagggtgaaaacaataagcccagggagaaatcagaaggaaacaagaggaaatccagtttctccaacagcgctgatgatattaaatctaaaaaaaagagagagcaaagcaatgatatcgctcggggctttgagagaggactggaaccagaaaagatcatcggagcaacagattcctgcggtgacttaatgttcttaatgaaatggaaagacacagatgaagctgacctggttcttgcaaaagaagctaacgtgaagtgtccacagattgtgatagcattttatgaagagagactgacgtggcacgcatatccagaggatgcggaaaacaaagaaaaagaaagcgcgaagagctaaaggaggagcatgtctctgtcgtttctctttgtatataatacctttactttcctgcctcctctctctcctcccacccctttccatcctaaacgcatccataaaccactgcgctcatcactttgctccacgggggagatgctggtattggttctcctgtaatataactgatgatctgattcctaagtgtagctctgtgaacgtcaggcattacgtcattcacatgctgtgtggttcccatagtgttctctttcaccctgatcttttccttctgttcccctgtaactttttaatcaccttagagtcatgatctttggggttggttgctttgggagattttattatgacgatgacttcagtttcttgattgttattagattatattgatgaccagctggcctttgttttgacatactggcatagaaaggatattgtccatctatttagaaaactattaagggcaacctacctgttgtgtcttttccgatctcatttagctctgccaggagaatacagggtccctggtgtggtcttgggccgctcctgactatcctcacataccctcccataacaattcagttctcttagggcttgaaacttcacatttaaatctgtcaaggcgctctgtttagccctcacactttcttggccttgttactttcaatccctgattctgcttctgtaaagtggtatcaatttgttattaaatgacaagattaactgcg

SEQ ID NO: 11482 - protein, 191 aa, Rattus norvegicus
  ref <308>: DATABASE ACCESSION NUMBER: SWISS-Prot / Q61686
  ref <309>: DATABASE ENTRY DATE: 2002-06-15
MGKKTKRTADSSSSEDEEEYVVEKVLDRRMVKGQVEYLLKWKGFSEEHNTWEPEKNLDCPELISEFMKKYKKMKEGENNKPREKSEGNKRKSSFSNSADDIKSKKKREQSNDIARGFERGLEPEKIIGATDSCGDLMFLMKWKDTDEADLVLAKEANVKCPQIVIAFYEERLTWHAYPEDAENKEKESAKS

SEQ ID NO: 11483 - DNA, 839 bp, Homo sapiens
  ref <308>: DATABASE ACCESSION NUMBER: EMBL / L07515
  ref <309>: DATABASE ENTRY DATE: 1999-07-02
gcgcagaaggcggcggcggtggtggcttgtggtgcggcctcaccatacaggaacagggcagacgttagcgtgagtgatcactctcaatcccggggacctggtggccttagtctttcaggtggaacggtgtgcgacatgggaaagaaaaccaagcggacagctgacagttcttcttcagaggatgaggaggagtatgttgtggagaaggtgctagacaggcgcgtggttaagggacaagtggaatatctactgaagtggaaaggcttttctgaggagcacaatacttgggaacctgagaaaaacttggattgccctgagctaatttctgaatttatgaaaaagtataagaagatgaaggagggtgaaaataataaacccagggagaagtcagaaagtaacaagaggaaatccaatttctcaaacagtgccgatgacatcaaatctaaaaaaaagagagagcagagcaatgatatcgctcggggctttgagagaggactggaaccagaaaagatcattggggcaacagattcctgtggtgatttaatgttcctaatgaaatggaaagacacagatgaagctgacctggttcttgcaaaagaagctaatgtgaaatgtccacaaattgtgatagcattttatgaagagagactgacatggcatgcatatcctgaggatgcggaaaacaaagagaaagaaacagcaaagagctaaaggaggggatggtctctgtcatttctctttgtacataatacatttacctccctgcctcctctcctttctacccacccctttctatcctaaacacatccaaaaaaaatgtgcttatcactgtgctccac

SEQ ID NO: 11484 - protein, 191 aa, Homo sapiens
  ref <308>: DATABASE ACCESSION NUMBER: SWISS-Prot / P45973
  ref <309>: DATABASE ENTRY DATE: 2002-06-15
MGKKTKRTADSSSSEDEEEYVVEKVLDRRVVKGQVEYLLKWKGFSEEHNTWEPEKNLDCPELISEFMKKYKKMKEGENNKPREKSESNKRKSNFSNSADDIKSKKKREQSNDIARGFERGLEPEKIIGATDSCGDLMFLMKWKDTDEADLVLAKEANVKCPQIVIAFYEERLTWHAYPEDAENKEKETAKS

SEQ ID NO: 11485 - DNA, 2075 bp, Rattus norvegicus
  ref <308>: DATABASE ACCESSION NUMBER: EMBL / AK014449
  ref <309>: DATABASE ENTRY DATE: 2002-09-02
tggagtcggatcagagagctagaagctgagggcaagaagctcacaatggacatgaaagtgaaggaggagcagatcagggaactggaactgaaggttcaggagcttcggaagtacaaagaaaacgagaaggacaccgaggtattgatgtcagccctctccgccatgcaagacaaaacgcaacacctagagaacagtctcagcgcagagacgaggatcaagctggacctcttctctgcacttggtgatgcaaagcggcagctggagattgcccaggggcaaattcttcagaaagaccaggaaatcaaggacctaaaacagaaaatagctgaagtcatggctgtcatgcccagcataacatacagtgctgccaccagtcccctgagccccgtgtccccccactactcttccaagtttgtggagaccagcccctctggacttgaccctaatgcctctgtctaccagcccttgaagaagtgaaggccaactgtgtgctcgcccaacatttgcaaccaggaggcttcgaaaagcagcgtctctggcagtcaagataaaaaagttgatattgtgttttgtgggactgtatatgttgtcatttttaaaggggggaaataacatccaagtctgattagaaccgcccatcagttgttcttggaagtttttagaagacctcacggactttgcagtttatttttcttggccaacacattaaaaccattcttggatttcaagtagccaattttgcctttttatgtatttttacatagtttcctcttcaagaaaaaaaaagcagagttttttttgcttttcaactctattttgttcttaaataagcaagaaaattgcacgttgtattcactgacgacaacaaaagcttagtttctagcatgagaggctaaacagccccacacagctctgattccatagctgcattaaagatgattatttatattacagagaaaagagggatcggccctccaaggaccagacagattgagagagagtcacttaagctgagagagacttaagggtgagactggcgtgcaggcgtgtgacggtgtgtttggagtattgccattcccatcgctgttagctctagagcacatccagagcatacgtttacagaggaaacttgatcatttccaaccatcttcccctaccccaccctctcgcccctggcacctgtcttctatttgtcgagttcactgttgatcctgttgtaggtggttgggctgctggtcaccatgccaccacttgggttttttccatgggaagcagcctgctgggtgtgcaaggccgagtgatggctgatcaatcaaagccgtggtctaggaccagctcccacgtgccatttactgctttcttcaccctcctcatctggagtttgatggtttacagatgtctgacagttcctcagctcttgtgccaaggaggagtggttgttgttgttttgttttgaagacttaaactctgcacaaagatcctggttcagctgtgtactataggttggtaggaagtgtcgtgtcagcacagacctgggagagggtgttaagaatcagggagcgggagggcaggggagagagaggacgggcaaagcagagatctggtttgaaagctggggaaattgagaagccagatcgatttgactttgcttccatgctgtgtgttctgaaaggacatggctctaaaatttcctgttgattggcatgtgtatctcatttaaagcaaaattaggtagaacaaaccagtcagtaagattagaagtattacagaaaatcatccttttaatcacagatcttattttggagtaaaacaaacttctagctttagccaggtgtgcatgttgtcgccatttgcattttgagtcatcttgtgtaaatgtcaccatgaaagtgttactcagaattgtcatagtttttttccccccatctttgtgctaaaacatggaaaattgtcactgtgttgatgaggtttcccccattctgctgcctttgggacactgttttcgttaaacttggtcttggctgcattcttttttttccctcgtggggttcaaaagaataaacattttcttactg

SEQ ID NO: 11486 - protein, 143 aa, Rattus norvegicus
  ref <308>: DATABASE ACCESSION NUMBER: SWISS-Prot / BAB29359
  ref <309>: DATABASE ENTRY DATE: 2001-06-01
MDMKVKEEQIRELELKVQELRKYKENEKDTEVLMSALSAMQDKTQHLENSLSAETRIKLDLFSALGDAKRQLEIAQGQILQKDQEIKDLKQKIAEVMAVMPSITYSAATSPLSPVSPHYSSKFVETSPSGLDPNASVYQPLKK

SEQ ID NO: 11487 - DNA, 2242 bp, Homo sapiens
  ref <308>: DATABASE ACCESSION NUMBER: Refseq / NM_018202
  ref <309>: DATABASE ENTRY DATE: 2002-09-25
gtgctaccccctccccccgggtgctggctccatgtctgtgtgaccggcctcaggggtagagtccaggcccgacgcggggcgggccagcggcggcggcagctgaggtgagagacggcggcggcggcgcgggcacccggccccccagcgggaggatgaagcggcggaacgccgactgcagtaagctccgccgccccctaaagcggaaccggatcaccgagggcatttacggcagtacatttttatacctgaaattcctggtggtgtgggcacttgtcctcctagcagattttgtcctggagttcagatttgaatacctgtggccattctggcttttcatcagaagcgtctatgattccttcagataccagggactggccttctcagtattttttgtttgtgtagcattcacgtcaaatataatatgcctgctgttcatccccatacagtggcttttttttgctgctagcacatatgtatgggttcagtacgtatggcacacagaaaggggagtgtgtttgcctacagtgtctctctggatcctctttgtttatattgaagcagccattagatttaaagatctcaaaaactttcatgtagacctttgtcgtccatttgctgctcactgtattgggtaccctgtggtaactttggggtttggcttcaaaagttacgtaagctacaaaatgcggttaaggaagcaaaaagaagtacaaaaagagaacgagttttacatgcaacttcttcaacaagctctccctccagagcaacagatgctacagaagcaagaaaaagaggccgaggaagcagccaaaggattacctgatatggattcttcgatccttatacaccacaatggaggtatcccagccaacaaaaaactctccacaactttgccagagatagaataccgagaaaaagggaaagaaaaggacaaggatgccaaaaaacacaaccttggaataaataacaacaatattctacaacctgtagactctaaaatacaagagattgagtatatggaaaaccatatcaatagtaaaagattaaataatgatcttgtgggaagtacagaaaatctcttgaaagaggactcatgcactgcttcctcaaaaaattacaaaaatgccagtggagttgtgaactcttcacctcgaagtcatagcgccacaaatgggagcattccttcctcatctagtaaaaatgagaagaagcagaaatgcactagcaagagcccaagtacacacaaggacttaatggaaaactgtattcctaataaccagctaagcaaaccagacgcactggtcaggctggaacaagacattaaaaagttaaaggctgacctgcaagccagcagacaagtggaacaagagctccgcagtcagatcagctccctttcgagcaccgagcgagggatccgctcagaaatgggccagcttcggcaggagaacgagctgctgcagaacaagttacataatgctgtgcaaatgaagcaaaaagacaagcagaatatcagccagttggagaaaaagctaaaagctgagcaggaagcccgaagttttgtagagaaacagttaatggaagagaaaaagaggaagaagttagaagaagccactgctgcccgggctgttgcgtttgctgctgcatctaggggagaatgcaccgaaaccttacggaatcggatcagagaactagaagcagagggcaagaagctcacgatggacatgaaggtgaaagaagaccaaatcagagaactagaactaaaagtccaggagcttcggaaatataaggaaaatgagaaggacactgaggtgttaatgtcagccctctcagccatgcaagacaaaacacagcacctggagaacagcttaagtgcagagacgataatcaagctggacctgttctccgcactgggcgatgcaaagcggcagctcgagattgcccaaggacaaatccttcagaaagatcaggaaatcaaggacctaaaacagaagatagccgaagtcatggccgtcatgcccagcataacatacagtgccgccaccagccccctgagccctgtttccccccactactcttccaaatttgtggagaccagcccctctggacttgaccccaatgcctctgtttaccagcccctgaagaaatgaaggccagctgtgtgttgtgcccaaaaatttggttaccggaaggcattgcaaaggagcgtctctggcagtcaagataaaaaaacagtttctattgt

SEQ ID NO: 11488 - protein, 664 aa, Homo sapiens
  ref <308>: DATABASE ACCESSION NUMBER: Refseq / NP_060672
  ref <309>: DATABASE ENTRY DATE: 2002-09-25
MKRRNADCSKLRRPLKRNRITEGIYGSTFLYLKFLVVWALVLLADFVLEFRFEYLWPFWLFIRSVYDSFRYQGLAFSVFFVCVAFTSNIICLLFIPIQWLFFAASTYVWVQYVWHTERGVCLPTVSLWILFVYIEAAIRFKDLKNFHVDLCRPFAAHCIGYPVVTLGFGFKSYVSYKMRLRKQKEVQKENEFYMQLLQQALPPEQQMLQKQEKEAEEAAKGLPDMDSSILIHHNGGIPANKKLSTTLPEIEYREKGKEKDKDAKKHNLGINNNNILQPVDSKIQEIEYMENHINSKRLNNDLVGSTENLLKEDSCTASSKNYKNASGVVNSSPRSHSATNGSIPSSSSKNEKKQKCTSKSPSTHKDLMENCIPNNQLSKPDALVRLEQDIKKLKADLQASRQVEQELRSQISSLSSTERGIRSEMGQLRQENELLQNKLHNAVQMKQKDKQNISQLEKKLKAEQEARSFVEKQLMEEKKRKKLEEATAARAVAFAAASRGECTETLRNRIRELEAEGKKLTMDMKVKEDQIRELELKVQELRKYKENEKDTEVLMSALSAMQDKTQHLENSLSAETIIKLDLFSALGDAKRQLEIAQGQILQKDQEIKDLKQKIAEVMAVMPSITYSAATSPLSPVSPHYSSKFVETSPSGLDPNASVYQPLKK

SEQ ID NO: 11489 - DNA, 451 bp, Rattus norvegicus
  ref <308>: DATABASE ACCESSION NUMBER: EMBL / AA893869
  ref <309>: DATABASE ENTRY DATE: 2000-03-03
ggtagaggccccgcccacacaggcggctgcaatttggcctttattgtcaagagatacacaggatgcagacgcactgacagaagcagatgaccctgggctccgcacccagtgatgtcaccaaagattccaaccaaaggaagactctgggtgtccacttgtgtggaacccatactttgtggtccttgcctctgggtctctgctgagcacatggccggccacccacgagcccttccttggatatgtcttgaggacacagatggggctggtggctacagtggttgggttgggtatgagctcccgctgtggtacagggagaaagctgagggacactcggggtcgcagccctactttggtcctattggcttcagccccacaccaggaagtaagctgaggtcatggactgtggctgcccacttccttgttgctgggatacctttgtccctgtcaacag

SEQ ID NO: 11490 - DNA, 417 bp, Rattus norvegicus; identical to SEQ ID NO: 6132
  ref <308>: DATABASE ACCESSION NUMBER: EMBL / AA893870
  ref <309>: DATABASE ENTRY DATE: 2000-03-03

SEQ ID NO: 11491 - DNA, 5025 bp, Homo sapiens; identical to SEQ ID NO: 6133
  ref <308>: DATABASE ACCESSION NUMBER: EMBL / M11167
  ref <309>: DATABASE ENTRY DATE: 2000-03-04

SEQ ID NO: 11492 - DNA, 484 bp, Rattus norvegicus; identical to SEQ ID NO: 6151
  ref <308>: DATABASE ACCESSION NUMBER: EMBL / AA893980
  ref <309>: DATABASE ENTRY DATE: 2000-03-03

SEQ ID NO: 11493 - DNA, 3174 bp, Homo sapiens; identical to SEQ ID NO: 6152
  ref <308>: DATABASE ACCESSION NUMBER: EMBL / AL050155
  ref <309>: DATABASE ENTRY DATE: 2000-02-18

SEQ ID NO: 11494 - DNA, 443 bp, Rattus norvegicus; identical to SEQ ID NO: 6159
  ref <308>: DATABASE ACCESSION NUMBER: EMBL / AA893984
  ref <309>: DATABASE ENTRY DATE: 2000-03-03

SEQ ID NO: 11495 - DNA, 1634 bp, Homo sapiens; identical to SEQ ID NO: 6160
  ref <308>: DATABASE ACCESSION NUMBER: Refseq / NM_030778
  ref <309>: DATABASE ENTRY DATE: 2002-05-14

SEQ ID NO: 11496 - protein, 64 aa, Homo sapiens; identical to SEQ ID NO: 6161

SEQ ID NO: 11497 - DNA, 498 bp, Rattus norvegicus; identical to SEQ ID NO: 6162
  ref <308>: DATABASE ACCESSION NUMBER: EMBL / AA894029
  ref <309>: DATABASE ENTRY DATE: 2000-03-03

SEQ ID NO: 11498 - DNA, 447 bp, Rattus norvegicus; identical to SEQ ID NO: 6181
  ref <308>: DATABASE ACCESSION NUMBER: EMBL / AA894148
  ref <309>: DATABASE ENTRY DATE: 2000-03-03

SEQ ID NO: 11499 - DNA, 426 bp, Rattus norvegicus
  ref <308>: DATABASE ACCESSION NUMBER: EMBL / AA894168
  ref <309>: DATABASE ENTRY DATE: 2000-03-03
tttttaggtgagaaattcttttatcatatttagaatcaaaatatcccttaaaatatttacattttacagtaaaaaggatagcaaaacacaagatcatgtacaagcttaagtattcaagtttctgaagagcagaaaggaaagggatatggcctaccacaaactgcagtacagggtcagaaccgccttcagtgagcacagattaaagcaacaaatggactccctgggctcttgattcacagtcaaaagctgcccctaagtcaggatggtctgactgggaagtctcggctttcttgccgctcctctacattttctttaaaaacagtgcaattgaaaacaaatgtacagagcacaaattacttccaaattagtcattatataaaggacattcactagaggcaggaaatatatttcatagttaaccatatt

SEQ ID NO: 11500 - DNA, 6936 bp, Homo sapiens
  ref <308>: DATABASE ACCESSION NUMBER: EMBL / D87685
  ref <309>: DATABASE ENTRY DATE: 2002-05-12
cacacagaagtcttcatggatatagttgatacatttaatcatttaattcctactgaacacttagatgatgccctatttctaggatccaacctggagaatgaagtctgtgaggattttagtgcaagtcaaaatgtcttagaggactcgctgaagaacatgctcagcgataaggatcctatgctaggatctgcaagtaaccagttctgtttgcctgttttggatagcaatgatcccaatttccagatgccttgttcgacagttgttggtcttgacgatattatggatgaaggagttgttaaagaaagtggcaatgataccattgatgaagaagaactgattttacctaacaggaacttaagggacaaggtagaagaaaattcagtgagatctccaagaaaatcacctcgtttaatggcacaagaacaggtaagaagtttgcgacagagcactattgccaagcgttcaaatgcagcaccattaagtaacacaaaaaaagcatctgggaagactgtatctactgctaaagcaggagtgaaacaaccagaaaggagtcaggttaaagaagaagtatgtatgtcactgaaacctgagtaccataaggagaatagaaggtgcagccgaaatagcggacaaattgaagtggtacctgaagtatcagtgtcttcaagtcattcttcagtgtcatcttgtcttgaaatgaaggatgaagatggattagattctaagcataagtgtaataatccgggagaaatagatgtgccatctcatgaattaaattgttcacttctttcagagacttgtgttactattggagaaaagaaaaatgaagctttgatggaatgtaaagccaagcctgttggtagtccattgtttaagttttcagataaagaagaacatgaacaaaatgattccatttcaggtaaaacgggtgagactgttgttgaagaaatgatagcaacaagaaaagttgaacaagattcaaaggagacagtaaaattatcccatgaagatgaccatattcttgaggacgctggatcttctgatatttctagtgatgctgcttgtacaaatccaaataagacagaaaacagccttgtaggtttgcctagttgtgtagatgaagtgactgaatgtaatttggaattgaaggataccatgggtattgctgataaaactgagaacacccttgaaagaaataaaattgaaccgttgggttattgtgaagatgcggagtctaataggcagttggagagcactgagtttaataaatcaaacttagaggtggttgatactagtacttttggaccggaaagtaatatcttggaaaatgctatttgtgatgtgcctgaccaaaattcaaaacagttgaatgctatagaaagtactaaaatagagtcccatgaaacagcaaaccttcaggatgacagaaacagccagtcaagtagcgtttcttacttagagtcaaaaagtgtaaaatccaaacatacaaaacctgtaattcattctaagcaaaacatgaccacagatgctccgaagaaaattgttgcagcaaagtatgaagtaatacatagcaaaactaaagttaatgtcaaaagtgtgaaacgaaatactgatgtaccagaatctcagcaaaattttcataggccagtcaaagtcagaaaaaaacaaattgataaggagccaaagattcagagttgcaattctggggttaaatctgtgaaaaaccaagctcattctgtactgaaaaaaacattacaggatcaaactttagtacaaattttcaagcccttaactcattctttgagtgataagtcacacgctcatcctggttgcttgaaagaacctcatcatcctgcacaaactggacatgtatcacattctagccagaaacagtgtcataagcctcagcaacaggccccagcaatgaaaaccaatagtcacgtgaaggaagagcttgaacacccaggcgttgagcattttaaggaagaggataaactgaaactgaaaaaacctgagaagaacctacaaccccgccaaagaagaagcagcaaaagtttttctttagatgagccaccattgttcattccagataacatagctaccataagaagagaaggctctgatcatagctcctcatttgaaagcaaatatatgtggactcccagcaagcagtgtgggttttgcaaaaaaccacatggcaacaggtttatggttggctgtgggagatgtgatgactggtttcatggtgattgtgttgggttaagtctttctcaagcacagcagatgggcgaggaagacaaagaatatgtctgtgtaaaatgttgtgctgaagaagacaaaaagactgaaatactagatccagatactttggaaaaccaagctacagttgaattccatagtggagataaaacaatggagtgtgaaaagcttggattatcaaaacacacaacaaatgatagaaccaaatatatagatgatacagtgaagcacaaggtcaaaattttaaaacgggagtctggtgaaggcagaaattcatcagactgtagagataatgaaattaaaaaatggcagctagctcctcttcgtaagatgggacaaccagttttacctcggagatcctcagaagaaaaaagtgaaaaaataccgaaagagtctacaactgttacttgcacaggagaaaaagcttcaaaaccaggtactcatgagaagcaagagatgaaaaagaagaaagttgaaaaaggagtgcttaatgtacatcctgctgcttctgcttccaagccttctgcagatcagatcaggcaaagtgtcagacattctctcaaagacattcttatgaagagacttacagactcaaatttgaaggtaccagaggaaaaggcagcaaaagttgccacaaaaattgagaaagagcttttctctttttttcgggacacagatgctaaatataagaacaaatatagaagtttgatgtttaatttgaaagatcctaaaaacaatatattatttaaaaaagtactgaaaggagaagtaactcctgatcatcttatcagaatgagtccagaagaactagcttctaaagagttagctgcttggagacgaagagaaaacagacataccatagaaatgattgagaaagagcagagagaagtggaacgacggccaatcaccaaaataactcataaaggtgaaatagaaattgagagtgatgccccaatgaaagaacaggaagcagccatggagattcaggaaccagccgccaataagtcattggagaagccagaaggatctgaaaaacaaaaagaggaggttgactctatgtctaaagataccactagtcaacacagacagcatctttttgatctcaactgcaaaatctgcataggtcgaatggcaccacctgtagatgatctttctccaaaaaaagtaaaagttgttgtaggagtagctcgcaaacattcagacaatgaagcagaaagtatagcagatgcattatcttcaacctcaaatattttggcttctgaattctttgaggaggagaaacaggagtctccaaagtcaacgttctctcctgctccacgtccagagatgcctggaactgttgaagttgagtctacctttctggctcgattgaacttcatctggaaaggttttatcaacatgccttctgtggcaaaatttgttaccaaagcctatccagtatctggctccccagaatacctgacagaggacctaccagatagtattcaagtaggtggcaggatatcacctcagacagtttgggattatgtggaaaaaataaaagcatcaggaaccaaggaaatttgtgtggttcgcttcacaccagtaactgaagaagatcaaatttcttatactttgctctttgcatacttcagtagcagaaagcgctatggagtagctgctaacaacatgaagcaggttaaagatatgtaccttattcctttgggtgccacagataaaattccacaccctcttgtgccttttgatggacctgggcttgaactgcatagacctaatctattgttgggcttaattattcgtcagaaactgaagcgacagcacagtgcctgtgctagtactagtcatatagctgagactcctgaaagtgcaccaccaatagcattgccacctgataaaaaaagtaaaatagaagtttctacagaagaagcaccagaggaagaaaatgacttttttaattcttttacaactgtattacacaagcagagaaataaacctcagcagaatcttcaggaagaccttccaacagcagttgaacctttaatggaagtcaccaaacaggagccaccaaaacctttaagatttcttcctggcgtgttgattggctgggagaatcaacctactactctggaattagcaaataaacctcttcctgtggatgatatacttcaaagccttttgggcaccactggtcaagtatatgaccaggcccagtcagtgatggaacaaaacactgttaaagaaattccatttttaaatgagcagaccaactcaaaaatagagaaaacagataatgtggaagtaactgatggtgaaaacaaggagataaaagttaaagtagataatatttcagaatctacagataagtcagcagaaatagaaacatcagtagtagggtcctcttccatttctgcagggtctttgacgagtcttagtctcagaggtaagccaccagatgtttctacagaagcatttttaacaaatttatcaattcagtcaaaacaagaggaaactgtggagagtaaagagaaaacattaaaaagacagcttcaggaagatcaagagaataatttgcaagataaccagacttcaaatagttctccatgcagatctaatgtaggaaaaggaaacatagatggtaatgtgagctgtagtgaaaaccttgttgctaatacagcgaggtctccacagtttatcaacctgaaaagggatcctaggcaagcagcaggacgaagtcagcctgtaactacttcagaaagcaaagatggagatagttgccggaatggagaaaaacacatgctgcctggcctgtcacacaacaaggagcacttaacagaacaaatcaatgtagaggaaaagttgtgttctgcagagaaaaactcgtgtgttcagcagagtgacaatttaaaagttgcacaaaactcaccatcagtagaaaacatacagacttctcaagcagaacaagcaaaacccttacaggaggatattttaatgcaaaatattgaaactgtgcacccatttcgaagaggatcagcagtagcgacatctcattttgaagttggaaacacatgtccatcagaatttccttctaaaagcatcacctttacttccagaagcaccagccccagaacaagtacaaacttttcacccatgaggccacagcagcccaaccttcagcatctcaagtctagcccacctggatttccatttccagggcctcctaattttcccccacaaagcatgtttggatttccaccacatttgccacctccattacttccccctccaggctttggctttgctcaaaatcccatggttccctggccacctgttgttcatctcccaggtcagccacagcgtatgatgggtcctctctcacaagcatcaaggtatataggcccgcagaatttttaccaggttaaagacattcggaggccagaaaggcgccatagtgacccttggggtaggcaagaccaacagcaactggataggccatttaataggggtaaaggggaccgccagagattttatagtgattcacaccatttgaaaagagagcgacatgaaaaggaatgggagcaagaatctgaaaggcatagacgcagagacagaagccaagacaaggacagagacagaaaaagcagggaggaagggcacaaagataaagagagggcacggttatcacatggtgatcgaggaacagatggaaaagcaagcagagatagtaggaatgtagacaagaagccagataaacctaaaagtgaagactatgagaaggacaaagaacgagagaaaagtaaacacagagaaggagaaaaggacagggataggtaccacaaagatagggaccacactgacagaactaaaagcaaaaggtaaaatttgcaggctgcttcaggattacatttaaataactgttaaaatgttgtatcttgtaaacaaaagaaagattgcctgctaggattgtgccatctttaaaatttttactattggtcatttgcagaacagtaaattctgtgtgttggtacagagtgctctgtaccagtgctcatcatcccttcttcataccaacggtccctagttataggaatttaatatttttaaaagttttacattgctgtatattcaaagatttgttttattaatatgcaataaaggcttagaaattttagttttattccttaattggtaaatatggttaactatggaatatatttacttcctctagtgaatgtcctttatataatgactaatttgggagtaatgtgtgctctgtaagtttgttttaaattgcactgtttttaaagaaactgtagaggagcaacaaaaatccaagcaacttcataatcagattatgctaatcatttagttgagcagtttttgaccaagaatcagaagcccaaggggtacatttattgctttaatctgcactcattgaagtcatttattaccatatactacagctttgtggtaggccattattttcattttcatttttggctcttcagaaacttgaatacttaagcttgtacatgatcttgtgttttgctatcctttttactgtaaaatgtaaatattttaagggatattttgattctaaatatgataaaataatttctcacctattttgtgtgtgtgacttgaaattcagtagtaaaagaatttcttctttaaagcttt

SEQ ID NO: 11501 - protein, 2039 aa, Homo sapiens
  ref <308>: DATABASE ACCESSION NUMBER: SWISS-Prot / AAF21292
  ref <309>: DATABASE ENTRY DATE: 2003-02-01
MDIVDTFNHLIPTEHLDDALFLGSNLENEVCEDFSASQNVLEDSLKNMLSDKDPMLGSASNQFCLPVLDSNDPNFQMPCSTVVGLDDIMDEGVVKESGNDTIDEEELILPNRNLRDKVEENSVRSPRKSPRLMAQEQVRSLRQSTIAKRSNAAPLSNTKKASGKTVSTAKAGVKQPERSQVKEEVCMSLKPEYHKENRRCSRNSGQIEVVPEVSVSSSHSSVSSCLEMKDEDGLDSKHKCNNPGEIDVPSHELNCSLLSETCVTIGEKKNEALMECKAKPVGSPLFKFSDKEEHEQNDSISGKTGETVVEEMIATRKVEQDSKETVKLSHEDDHILEDAGSSDISSDAACTNPNKTENSLVGLPSCVDEVTECNLELKDTMGIADKTENTLERNKIEPLGYCEDAESNRQLESTEFNKSNLEVVDTSTFGPESNILENAICDVPDQNSKQLNAIESTKIESHETANLQDDRNSQSSSVSYLESKSVKSKHTKPVIHSKQNMTTDAPKKIVAAKYEVIHSKTKVNVKSVKRNTDVPESQQNFHRPVKVRKKQIDKEPKIQSCNSGVKSVKNQAHSVLKKTLQDQTLVQIFKPLTHSLSDKSHAHPGCLKEPHHPAQTGHVSHSSQKQCHKPQQQAPAMKTNSHVKEELEHPGVEHFKEEDKLKLKKPEKNLQPRQRRSSKSFSLDEPPLFIPDNIATIRREGSDHSSSFESKYMWTPSKQCGFCKKPHGNRFMVGCGRCDDWFHGDCVGLSLSQAQQMGEEDKEYVCVKCCAEEDKKTEILDPDTLENQATVEFHSGDKTMECEKLGLSKHTTNDRTKYIDDTVKHKVKILKRESGEGRNSSDCRDNEIKKWQLAPLRKMGQPVLPRRSSEEKSEKIPKESTTVTCTGEKASKPGTHEKQEMKKKKVEKGVLNVHPAASASKPSADQIRQSVRHSLKDILMKRLTDSNLKVPEEKAAKVATKIEKELFSFFRDTDAKYKNKYRSLMFNLKDPKNNILFKKVLKGEVTPDHLIRMSPEELASKELAAWRRRENRHTIEMIEKEQREVERRPITKITHKGEIEIESDAPMKEQEAAMEIQEPAANKSLEKPEGSEKQKEEVDSMSKDTTSQHRQHLFDLNCKICIGRMAPPVDDLSPKKVKVVVGVARKHSDNEAESIADALSSTSNILASEFFEEEKQESPKSTFSPAPRPEMPGTVEVESTFLARLNFIWKGFINMPSVAKFVTKAYPVSGSPEYLTEDLPDSIQVGGRISPQTVWDYVEKIKASGTKEICVVRFTPVTEEDQISYTLLFAYFSSRKRYGVAANNMKQVKDMYLIPLGATDKIPHPLVPFDGPGLELHRPNLLLGLIIRQKLKRQHSACASTSHIAETPESAPPIALPPDKKSKIEVSTEEAPEEENDFFNSFTTVLHKQRNKPQQNLQEDLPTAVEPLMEVTKQEPPKPLRFLPGVLIGWENQPTTLELANKPLPVDDILQSLLGTTGQVYDQAQSVMEQNTVKEIPFLNEQTNSKIEKTDNVEVTDGENKEIKVKVDNISESTDKSAEIETSVVGSSSISAGSLTSLSLRGKPPDVSTEAFLTNLSIQSKQEETVESKEKTLKRQLQEDQENNLQDNQTSNSSPCRSNVGKGNIDGNVSCSENLVANTARSPQFINLKRDPRQAAGRSQPVTTSESKDGDSCRNGEKHMLPGLSHNKEHLTEQINVEEKLCSAEKNSCVQQSDNLKVAQNSPSVENIQTSQAEQAKPLQEDILMQNIETVHPFRRGSAVATSHFEVGNTCPSEFPSKSITFTSRSTSPRTSTNFSPMRPQQPNLQHLKSSPPGFPFPGPPNFPPQSMFGFPPHLPPPLLPPPGFGFAQNPMVPWPPVVHLPGQPQRMMGPLSQASRYIGPQNFYQVKDIRRPERRHSDPWGRQDQQQLDRPFNRGKGDRQRFYSDSHHLKRERHEKEWEQESERHRRRDRSQDKDRDRKSREEGHKDKERARLSHGDRGTDGKASRDSRNVDKKPDKPKSEDYEKDKEREKSKHREGEKDRDRYHKDRDHTDRTKSKR

SEQ ID NO: 11502 - DNA, 555 bp, Rattus norvegicus; identical to SEQ ID NO: 6217
  ref <308>: DATABASE ACCESSION NUMBER: EMBL / AA894199
  ref <309>: DATABASE ENTRY DATE: 2000-03-03

SEQ ID NO: 11503 - DNA, 1857 bp, Rattus norvegicus
  ref <308>: DATABASE ACCESSION NUMBER: EMBL / AF202453
  ref <309>: DATABASE ENTRY DATE: 2000-08-17
atgtcccagctctcctccaccctgaagcgctatacagaatcgtcccgctacacagatgccccttatgccaaatcgggctatggcacctacaccccttcttcctatggggccaacctggccgcctccttcctggagaaggaaaaacttggtttcaagccggtctcccccaccagcttcctcccacggccccgcacctacggcccctcctccatcctggactgtgacaggggccgccccctgctgagatctgacatcactgggggtagtaagcggtctgagagccagacccgtggcaatgaaaggccctcaggcagtggactcaacggaggcagtggatttccttatggagtgaccagcaactccctcagctacctgcccatgaatgccagagaccagggcgtgaccctgggccagaagaaatcgaacagccaatcagacctggcccgggatttctccagcctccggacctcagatagctacaggacttcagatggctaccgggcctcagatggctctaggatagaccccggaaacctgggtcgcagccccatgctggcccgcacacgtaaggagctctgtgccctgcagggcctctaccaagcagccagccgttctgagtacctaacagactatctggagaactatggccgcaagggcagtgcaccacaggtgctcacacaggcccctccctcccgagtccccgaagtcctcagtcccacctaccgaccaagtggccgctacacactgtgggagaagaacaagggccaggcttctggggccagccgctccacttctccagggcgagacaccatgaattcaaagagtgcccagggtctggctggtcttcgaaaccttgggaacacgtgcttcatgaactcaattcttcagtgtctgagcaacacccgcgagttgagagattactgcctccagaggctgtacatgcgggacctcggccataccagcagtgcacacacagctctcatggaagagtttgcaaaactaatccagaccatatggacgtcatcccccaatgatgtggtgagcccatctgagttcaagacccagatccagagatatgcaccacgcttcgttggctataatcagcaggatgcccaggaattcctccgtttccttctggatggcctccacaacgaggtgaaccgggtggcagcaaggcctaagcccagccctgagagccttgatcatctccctgatgaagagaaagggcgacagatgtggaggaagtatctagaaagggaagacagtcggattggggatctcttcgtcgggcagctaaagagctccctgacgtgcaccgactgcggctactgctctacagtgttcgatcccttctgggacctctcgttgcccattgcaaagagaggctatcctgaagtgacgttaatggattgtatgaggctcttcaccaaagaggatgtgttggatggggatgagaaaccaacatgctgccgctgccgggccagaaaacgatgtataaagaagttctctgtccagaggttcccaaagatcttggtgctccacctgaagcggttctcagaatccaggatacgaaccagcaagctcacaacatttgtgaatttcccactaagagacctggacttgagagaatttgcttcagaaaacaccaaccatgctgtttacaacctgtatgctgtgtccaatcactccggaaccaccatgggaggtcactatacagcctactgccgaagtccggttacgggcgaatggcacactttcaatgactccagtgtcacacccatgtcctccagccaagtgcgcaccagcgacgcctatttgctcttctatgaactggccagtccaccctcccgtatgtag

SEQ ID NO: 11504 - protein, 618 aa, Rattus norvegicus; identical to SEQ ID NO: 6219
  ref <308>: DATABASE ACCESSION NUMBER: SWISS-Prot / AAF17574
  ref <309>: DATABASE ENTRY DATE: 2003-02-01

SEQ ID NO: 11505 - DNA, 1152 bp, Homo sapiens
  ref <308>: DATABASE ACCESSION NUMBER: EMBL / AF079564
  ref <309>: DATABASE ENTRY DATE: 2000-03-03
ggccgcgctcccctctctccccgtccctgctgctctccaccttcgtgggggctcatgctcaacaaagccaagaattctaagagtgcccagggtctggctggtcttcgaaaccttgggaacacgtgcttcatgaactcaattctgcagtgcctgagcaacactcgggagttgagagattactgcctccagaggctctacatgcgggacctgcaccacggcagcaatgcacacacagccctcgtggaagagtttgcaaaactaattcagaccatatggacttcatcccccaatgatgtggtgagcccatctgagttcaagacccagatccagagatacgcaccgcgctttgttggctataatcagcaggatgctcaggagtttcttcgctttcttctggatgggctccataacgaggtgaaccgagtgacactgagacctaagtccaaccctgagaacctcgatcatcttcctgatgacgagaaaggccgacagatgtggagaaaatatctagaacgggaagacagtaggatcggggatctctttgttgggcagctaaagagctcgctgacgtgtacagattgtggttactgttctacggtcttcgaccccttctgggacctctcactgcccattgctaagcgaggttatcctgaggtgacattaatggactgcatgaggctcttcaccaaagaggatgtgcttgatggagatgaaaagccaacatgctgtcgctgccgaggcagaaaacggtgtataaagaagttctccatccagaggttcccaaagatcttggtgctccatctgaagcggttctcagaatccaggattcgaaccagcaagctcacaacatttgtgaacttccccctaagagacctggacttaagagaatttgcctcagaaaacaccaaccatgctgtttacaacctgtacgctgtgtccaatcactccggaaccaccatgggtggccactatacagcctactgtcgcagtccagggacaggagaatggcacactttcaacgactccagcgtcactcccatgtcctccagccaagtgcgcaccagcgacgcctacctgcacttctacgaactggccagcccgacctccccaatttagcgccagggagccacgtcccttttttcctttccccgt

SEQ ID NO: 11506 - protein, 605 aa, Homo sapiens
  ref <308>: DATABASE ACCESSION NUMBER: SWISS-Prot / O75604
  ref <309>: DATABASE ENTRY DATE: 2002-06-15
MSQLSSTLKRYTESARYTDAHYAKSGYGAYTPSSYGANLAASLLEKEKLGFKPVPTSSFLTRPRTYGPSSLLDYDRGRPLLRPDITGGGKRAESQTRGTERPLGSGLSGGSGFPYGVTNNCLSYLPINAYDQGVTLTQKLDSQSDLARDFSSLRTSDSYRIDPRNLGRSPMLARTRKELCTLQGLYQTASCPEYLVDYLENYGRKGSASQVPSQAPPSRVPEIISPTYRPIGRYTLWETGKGQAPGPSRSSSPGRDGMNSKSAQGLAGLRNLGNTCFMNSILQCLSNTRELRDYCLQRLYMRDLHHGSNAHTALVEEFAKLIQTIWTSSPNDVVSPSEFKTQIQRYAPRFVGYNQQDAQEFLRFLLDGLHNEVNRVTLRPKSNPENLDHLPDDEKGRQMWRKYLEREDSRIGDLFVGQLKSSLTCTDCGYCSTVFDPFWDLSLPIAKRGYPEVTLMDCMRLFTKEDVLDGDEKPTCCRCRGRKRCIKKFSIQRFPKILVLHLKRFSESRIRTSKLTTFVNFPLRDLDLREFASENTNHAVYNLYAVSNHSGTTMGGHYTAYCRSPGTGEWHTFNDSSVTPMSSSQVRTSDAYLLFYELASPPSRM

SEQ ID NO: 11507 - DNA, 552 bp, Rattus norvegicus; identical to SEQ ID NO: 6248
  ref <308>: DATABASE ACCESSION NUMBER: EMBL / AA894282
  ref <309>: DATABASE ENTRY DATE: 2000-03-03

SEQ ID NO: 11508 - DNA, 599 bp, Rattus norvegicus
  ref <308>: DATABASE ACCESSION NUMBER: EMBL / AA894292
  ref <309>: DATABASE ENTRY DATE: 2000-03-03
aaatgttaccaatctataaatattaaacatacagaacaaaccatagttatttgcttgtacccacttagcattgacctgttatccatgaagtacacagtaataatcatttttgtcaggaagtgtttttaagtcagaagacttggggtattactgtctgtagtcagtgagggccgcctcagtggagatcctgaaacgaatccttgacccacagaagaattttttttttttaaagttcctatgataaaacaagacacctgtgaagaaattacttggaaagtaaaaaccaagtatgtgtgcataagtcccaagtgattttttttgtcagttacactcttatgacctgaacaataacttaaatactcctagcacagtgcttcagttgaaagtaaagaacagtgtgcgaatggtagccagttacttttaaactcaagctaggatttctgttgctggagggaaaagtgacttggctgttggaagagtagaaatgtgtcagccttggggaggctcattcctgctgtctgaactgcattgcggggcgtcaccaggaacttcacaaactccccagggatgccttgctgggaagccctgaccactactag

SEQ ID NO: 11509 - DNA, 1842 bp, Rattus norvegicus; identical to SEQ ID NO: 2876
  ref <308>: DATABASE ACCESSION NUMBER: Refseq / NM_017033
  ref <309>: DATABASE ENTRY DATE: 2002-11-05

SEQ ID NO: 11510 - protein, 561 aa, Rattus norvegicus; identical to SEQ ID NO: 2877
  ref <308>: DATABASE ACCESSION NUMBER: SWISS-Prot / P38652
  ref <309>: DATABASE ENTRY DATE: 2001-10-16

SEQ ID NO: 11511 - DNA, 2487 bp, Homo sapiens; identical to SEQ ID NO: 2878
  ref <308>: DATABASE ACCESSION NUMBER: EMBL / BC019920
  ref <309>: DATABASE ENTRY DATE: 2002-09-02

SEQ ID NO: 11512 - protein, 561 aa, Homo sapiens; identical to SEQ ID NO: 2879
  ref <308>: DATABASE ACCESSION NUMBER: SWISS-Prot / P36871
  ref <309>: DATABASE ENTRY DATE: 2002-06-15

SEQ ID NO: 11513 - DNA, 501 bp, Rattus norvegicus; identical to SEQ ID NO: 6257
  ref <308>: DATABASE ACCESSION NUMBER: EMBL / AA894330
  ref <309>: DATABASE ENTRY DATE: 2000-03-03

SEQ ID NO: 11514 - protein, 533 aa, Rattus norvegicus; identical to SEQ ID NO: 2905
  ref <308>: DATABASE ACCESSION NUMBER: SWISS-Prot / P15791
  ref <309>: DATABASE ENTRY DATE: 2002-06-15

SEQ ID NO: 11515 - DNA, 1500 bp, Homo sapiens; identical to SEQ ID NO: 2906
  ref <308>: DATABASE ACCESSION NUMBER: EMBL / AF071569
  ref <309>: DATABASE ENTRY DATE: 2000-01-19

SEQ ID NO: 11516 - protein, 499 aa, Homo sapiens [sequence omitted]

SEQ ID NO: 11517 - DNA, 427 bp, Rattus norvegicus
  ref <308>: DATABASE ACCESSION NUMBER: EMBL / AA899253
  ref <309>: DATABASE ENTRY DATE: 2000-03-03
tttttttttttttttttacattttattcacatttattttttgcttttagtgtgctcacagaaaattagaacaccttaagcaggagttgaatagcaatgtttgtaagcaacgttacattccagctctatgtcaaattggtcaaagatcctccagtatttacaaaacacgagagacgaggtgctacgcaaaaccactgcatctgaagatttgtttttcctttattctcaaagacaactggaaaagaaagcattgtctgctgtaatcaaaaaaaaaaaaaaaaaagaaaaaagaaaaaaaaaacataccacagtataaacagtaaccattccacgtatcacagcttggttgggtttaaaatttgtgtttaaaaggtccaagatgactgcagttttacaaaaagatgggcagggtggagacttgcaaactt

SEQ ID NO: 11518 - protein, 308 aa, Rattus norvegicus; identical to SEQ ID NO: 6328
  ref <308>: DATABASE ACCESSION NUMBER: SWISS-Prot / P30009
  ref <309>: DATABASE ENTRY DATE: 2002-06-15

SEQ ID NO: 11519 - DNA, 865 bp, Homo sapiens; identical to SEQ ID NO: 6329
  misc_feature (1)..(865): n=a, c, g or t
  ref <308>: DATABASE ACCESSION NUMBER: EMBL / AU141403
  ref <309>: DATABASE ENTRY DATE: 2002-08-06

SEQ ID NO: 11520 - protein, 406 aa, Homo sapiens; identical to SEQ ID NO: 6330
  ref <308>: DATABASE ACCESSION NUMBER: SWISS-Prot / P50458
  ref <309>: DATABASE ENTRY DATE: 2002-06-15

SEQ ID NO: 11521 - DNA, 1510 bp, Rattus norvegicus
  ref <308>: DATABASE ACCESSION NUMBER: EMBL / BC005796
  ref <309>: DATABASE ENTRY DATE: 2002-09-22
cggcaatcctagcgtgaaggctggtaggattttatccccgctgccatcatggttcgaccattgaactgcatcgtcgccgtgtcccaaaatatggggattggcaagaacggagacctaccctggcctccgctcaggaacgagttcaagtacttccaaagaatgaccacaacctcttcagtggaaggtaaacagaatctggtgattatgggtaggaaaacctggttctccattcctgagaagaatcgacctttaaaggacagaattaatatagttctcagtagagaactcaaagaaccaccacgaggagctcattttcttgccaaaagtttggatgatgccttaagacttattgaacaaccggaattggcaagtaaagtagacatggtttggatagtcggaggcagttctgtttaccaggaagccatgaatcaaccaggccacctcagactctttgtgacaaggatcatgcaggaatttgaaagtgacacgtttttcccagaaattgatttggggaaatataaacttctcccagaatacccaggcgtcctctctgaggtccaggaggaaaaaggcatcaagtataagtttgaagtctacgagaagaaagactaacaggaagatgctttcaagttctctgctcccctcctaaagctatgcatttttataagaccatgggacttttgctggctttagatctatgagtaattatttctttagggaggggtagttggaagaattgtttgttttgtgatcctggggatggaacctaagacccagtgcgtgctgagcaaatgctatactgctgagccaccccaaccctagcccctatataattctaaacaatatgttgtcatttcccagtaatctaacaaggttatagtaaaagtgccttaagaaatgtcacttgctataaaggtctcagtgcccctcccatgagacctcaagtggctccccagcatatgcacagggtactgtgtgtacaagagaccccagtgatgtagagcccctggagcatgagcagatgtgtgggctcataaaagtaggagctaggcaggtaagtccaaagggcagaaacaggttttaaacagcagagctggaactcagactataaagaaaattccatcaaagtagagactggattattgtatgcacatcacacttgcagcaaagctctgctcactcagacagaaaatcagtaaatggagaactccattgtgttccatggagacgagagcaggtggaagattatgtaagatctgaaacactgaaattgtctgcttctcatcttcagtgagattccaaaggatagtacagtgacagaacaagaataggcactctctacaaaaaaaagaaagaaaaaactaagtaatagcaagcataatagctactgttaagaactcagagataatgaattgagaatggatactgcttgaaatgaaaatttaataagttagaaactaaactttataaaaataaaaaaatgagcattaaaaaaaaaaaaaaaaaaaaa

SEQ ID NO: 11522 - protein, 186 aa, Rattus norvegicus
  ref <308>: DATABASE ACCESSION NUMBER: SWISS-Prot / P00375
  ref <309>: DATABASE ENTRY DATE: 1999-07-15
VRPLNCIVAVSQNMGIGKNGDLPWPPLRNEFKYFQRMTTTSSVEGKQNLVIMGRKTWFSIPEKNRPLKDRINIVLSRELKEPPRGAHFLAKSLDDALRLIEQPELASKVDMVWIVGGSSVYQEAMNQPGHLRLFVTRIMQEFESDTFFPEIDLGKYKLLPEYPGVLSEVQEEKGIKYKFEVYEKKD

SEQ ID NO: 11523 - DNA, 1275 bp, Homo sapiens
  ref <308>: DATABASE ACCESSION NUMBER: EMBL / X00855
  ref <309>: DATABASE ENTRY DATE: 1996-10-09
ctgcagcgccagggtccacctggtcggctgcacctgtggaggaggaggtggatttcaggcttcccgtagactggaagaatcggctcaaaaccgcttgcctcgcaggggctgagctggaggcagcgaggccgcccgacgcaggcttccggcgagacatggcagggcaaggatggcagcccggcggcagggcccggcgaggagcgcgaacccgcggccgcagttcccaggcgtctgcgggcgcgagcacgccgcgaccctgcgtgcgccggggcgggggggcggggcctcgcctgcacaaatagggacgagggggcggggcggccacaatttcgcgccaaacttgaccgcgcgttctgctgtaacgagcgggctcggaggtcctcccgctgctgtcatggttggttcgctaaactgcatcgtcgctgtgtcccagaacatgggcatcggcaagaacggggacctgccctggccaccgctcaggtatctgccgggccggggcgatgggacccaaacgggcgcaggctgcccacggtcggggtacctgggcgggacgcgccaggccgactcccggcgagaggatggggccagacttgcggtctgcgctggcaggaagggtgggcccgactggattccccttttctgctgcgcgggaggcccagttgctgatttctgcccggattctgctgcccggtgaggtctttgccctgcggcgccctcgcccagggcaaagtcccagccctggagaaaacacctcacccctacccacagcgctccgtttgtcaggtgccttagagctcgagcccaagggataatgtttcgagtaacgctgtttctctaacttgtaggaatgaattcagatatttccagagaatgaccacaacctcttcagtagaaggtaatgtgggattaagtagggtcttgcttgatgaagtttaccagtgcaaatgttagttaaatggaaagttttccgtgttaatctgggaccttttctcttattatggatctgtatgatctgtatgcagttcccaaggttcatttaccattattaaaaaatttttgtcttagaaattttatgtatgtcaacgcacgagcaaattatcaggcatggggcagaattggcaactgggtggaggcttcggtggaggttagcactccgaaaggaaaacagagtaggcctttggaacagctgctggaagagataaggcctgaacaagggcagtggagaagagagggtaaaaattttttaaggttacatgaccctggattttggagatc

SEQ ID NO: 11524 - DNA, 556 bp, Rattus norvegicus; identical to SEQ ID NO: 6299
  ref <308>: DATABASE ACCESSION NUMBER: EMBL / AA924909
  ref <309>: DATABASE ENTRY DATE: 2000-03-03

SEQ ID NO: 11525 - protein, 160 aa, Rattus norvegicus; identical to SEQ ID NO: 6300
  ref <308>: DATABASE ACCESSION NUMBER: SWISS-Prot / P25094
  ref <309>: DATABASE ENTRY DATE: 2001-10-16

SEQ ID NO: 11526 - DNA, 1661 bp, Homo sapiens; identical to SEQ ID NO: 6301
  ref <308>: DATABASE ACCESSION NUMBER: EMBL / M94048
  ref <309>: DATABASE ENTRY DATE: 1993-01-27

SEQ ID NO: 11527 - protein, 160 aa, Homo sapiens; identical to SEQ ID NO: 6302
  ref <308>: DATABASE ACCESSION NUMBER: SWISS-Prot / Q01453
  ref <309>: DATABASE ENTRY DATE: 2002-06-15

SEQ ID NO: 11528 - DNA, 1248 bp, Rattus norvegicus
  ref <308>: DATABASE ACCESSION NUMBER: Refseq / NM_031560
  ref <309>: DATABASE ENTRY DATE: 2002-11-05
cttgtctgaaaagagcatagacaacagattctcaacagcaggatgtgggtgttcaagtttttgctgctacccgtggtgagctttgctctatccccggaggaaacgctggacacgcagtgggagctgtggaagaagacccacgggaagcagtacaacagcaaggtggatgaaatctctcggcgtttaatttgggaaaaaaacctgaagaaaatttctgtccataatcttgaggcctctcttggtgcccatacgtatgagctggccatgaatcacctgggagacatgaccagcgaagaagtggttcagaagatgactggactcagagtgccaccttcgcgttccttcagtaatgacactctctataccccagagtgggaaggcagagtcccagactccatcgactatcgaaagaaaggctatgttactccagtcaaaaaccagggccagtgtggttcctgttgggctttcagctctgcgggtgccctggagggccaactcaagaagaaaactggcaaactcttagctctgagtccccagaatcttgtggactgtgtgtctgagaactatggctgtggaggcggctatatgaccactgccttccaatatgtgcagcagaatggaggcattgactctgaagacgcttacccgtatgtggggcaggatgaaagttgtatgtataacgccacggcaaaggcagctaagtgcagagggtacagagagatccctgtggggaacgagaaagccctgaagagagcagtggctcgggtaggacccgtctctgtgtccatcgatgcaagcttgacatctttccaattttacagcagaggtgtgtactatgacgaaaactgcgaccgtgataatgtgaaccatgccgtgttggtggtgggctatggcacccagaagggaaataagtactggataattaaaaacagctggggagaaagctggggaaacaaaggctatgttctcttggctcggaataagaacaatgcctgtggcattaccaacctggccagcttccccaagatgtgattcaagccagccagcccatctgttctcacattccttcctcaacagtgcaagcgaacggtggctttggagtgacacctctgcttcccttctctccacccaaggcccttttctttgtggacacaactgggcattttctgagagttgtggcctctgtgctgatagacgctggagtcctccagcaggctggaggactaaggtgaccttcccaagcccctg

SEQ ID NO: 11529 - protein, 329 aa, Rattus norvegicus; identical to SEQ ID NO: 6304
  ref <308>: DATABASE ACCESSION NUMBER: SWISS-Prot / O35186
  ref <309>: DATABASE ENTRY DATE: 2002-06-15

SEQ ID NO: 11530 - DNA, 1669 bp, Homo sapiens; identical to SEQ ID NO: 6305
  ref <308>: DATABASE ACCESSION NUMBER: EMBL / X82153
  ref <309>: DATABASE ENTRY DATE: 1995-04-18

SEQ ID NO: 11531 - protein, 329 aa, Homo sapiens; identical to SEQ ID NO: 6306
  ref <308>: DATABASE ACCESSION NUMBER: SWISS-Prot / P43235
  ref <309>: DATABASE ENTRY DATE: 2002-06-15

SEQ ID NO: 11532 - DNA, 432 bp, Rattus norvegicus; identical to SEQ ID NO: 6319
  ref <308>: DATABASE ACCESSION NUMBER: EMBL / AA925506
  ref <309>: DATABASE ENTRY DATE: 2000-03-03

SEQ ID NO: 11533 - protein, 69 aa, Rattus norvegicus; identical to SEQ ID NO: 3037
  ref <308>: DATABASE ACCESSION NUMBER: SWISS-Prot / P43425
  ref <309>: DATABASE ENTRY DATE: 2002-06-15

SEQ ID NO: 11534 - DNA, 992 bp, Homo sapiens; identical to SEQ ID NO: 3038
  ref <308>: DATABASE ACCESSION NUMBER: EMBL / BC014466
  ref <309>: DATABASE ENTRY DATE: 2002-09-02

SEQ ID NO: 11535 - protein, 68 aa, Homo sapiens; identical to SEQ ID NO: 3039
  ref <308>: DATABASE ACCESSION NUMBER: SWISS-Prot / O60262
  ref <309>: DATABASE ENTRY DATE: 2002-06-15

SEQ ID NO: 11536 - DNA, 424 bp, Rattus norvegicus
  ref <308>: DATABASE ACCESSION NUMBER: EMBL / AA925556
  ref <309>: DATABASE ENTRY DATE: 2000-03-03
tttttttttttttttttggattgaggtaaataaaaaagctttatcctgcaacatttggagataaagagtctgtgcccctcaaaatcccagcccagcccatccttcacatcagactcttccggtattgactgtgctgagaggtctgtctgaggtgggagtccggggtctgcaggtccatctgtctgtacaggtctctcagctccctgacttcctgcagcactctcttcgcctggctccagttagacgaagcctctcccagcagcctctctgtctccagcagcagctgctctgactgggagtcgggtggagaccgtggggggtccttggccttccatttgccatctcccagtccctgaacctctgccagcagctcctgagtcttctccagtttccttgctaccaagtcctggatccgggacagctg

SEQ ID NO: 11537 - DNA, 1633 bp, Homo sapiens
  ref <308>: DATABASE ACCESSION NUMBER: Refseq / NM_016274
  ref <309>: DATABASE ENTRY DATE: 2002-11-05
cacgagggggacccgggccgcgtgggcgccgggatggagggcgccaaggggcggggagcgggcgtgcgtgtgtgtgcgagtgcgaatgcgagggaggccggccttgagtgaaaccggagctacaaagaaggggagagtccgggagcgggagggcgcgagggaggagcggcggctccggggcagctccgacgccctcccgcggggaaggagcccccgcggtgccgccgaggccccgacgcggggccgcccctcggctcgccgccccgcgcccgcgcccgctgggaatgatgaagaagaacaattccgccaagcggggacctcaggatggaaaccagcagcctgcaccgcccgagaaggtcggctgggtccggaaattctgcgggaaagggattttcagggagatttggaaaaaccgctatgtggtgctgaaaggggaccagctctacatctctgagaaggaggtaaaagatgagaaaaatattcaagaggtatttgacctgagtgactatgagaagtgtgaagagctccggaagtccaagagcaggagcaagaaaaatcatagcaagtttactcttgcccactccaaacagcccggtaacacggcacccaacctgatcttcctggcagtgagtccagaagagaaggaatcgtggatcaatgccctcaactctgccatcacccgagccaagaaccgtatcttggatgaggtcaccgttgaggaggacagctatcttgcccatcccactcgagacagggcaaaaatccagcactcccgccgccccccaacaaggggacacctaatggctgtggcttccacctctacctcggatgggatgctgaccttggacttgatccaagaggaagacccttcccctgaggaaccaacctcttgtgctgagagctttcgggttgacctggacaagtctgtggcccagctggcagggagccggcggagagcggactcagaccgcatccagccctccgcagaccgggcaagcagtctctcccgaccttgggaaaaaacagacaaaggggccacctacaccccccaggcacccaagaagttgacgcccacagagaaaggccgctgcgcctccctggaggagatcctatctcagcgggatgctgcctctgcccgcaccctccagctgcgggctgaggaacccccaacccctgccctccccaacccggggcagctgtcccggatccaggacctggtagcaaggaaactggaggagactcaggagcttctggcagaggttcagggactgggagatgggaagcgaaaggccaaggacccccctcggtctccgccggattctgagtcagagcagctgctgctggagacggaacggctgctgggagaggcatcatcgaattggagccaggcaaagagggtgctgcaggaggtcagggagctgagagacctgtacagacagatggacctgcagaccccggactcccacctcagacagaccaccccgcacagtcagtaccggaagagcctgatgtgagggcagggtggggtctggaacttgtcgggttggacagactcttatctccgtgttgctggataaagcttttttatttacctcaatcaaaaaaagaaaacaaaaatgaaaaaaaaaaaaaa

SEQ ID NO: 11538 - DNA, 9811 bp, Rattus norvegicus
  ref <308>: DATABASE ACCESSION NUMBER: EMBL / X56600
  ref <309>: DATABASE ENTRY DATE: 1996-09-12
aagcttcgtctctgttgtaagtgcttataatccccatatcccccagaaactgatttggcaagtttcctcccaggccagggaggtaatgtggtccatctccaaggtggccccaccatacacatggtgacccactctcgcccctgacttttgtaagttggtagctgggctggacacctaggacattcctgacacagaccctcagagtatgcccttagaagtcccaaagagatttcacctgggggcaagttcaggtgcggaagtccaaaagcaaggtgccaactggggagactggggctttacgtttgccccctgagatgttcgagaccaggctaccatccggcattgtgggggcttagaaagtttatactgttctgcttggggatgtgagactaatttccacgctcctaggacccttaggtattctcttgttacttttgacatttggaccctgtatttttaataagttaatagcctttattagagaaagagttaatgcagtacagatattaatgctttgccaacaatatcgtgcctcagaagaccttaagagaaaaattgaagaaggccctgagttttaagattagaactagtcacaggcagaagtggggaatgaaagaataaagattttaaactatcccccactgatcgtgctgtgaggacaagtgcacctcacagcaaagaataacataacatgttttggggatgaagcctggcaataaccaccacaaaccatctggcctcgataaggcctgactcaacagtcctgagaaaaacgagaattagggtcagcttgccccagaagcagggtggcctagagtagaactgagcccaagttacaaaccaatgaaattgctttgtgtgactgttgccaactacctatgtaattttccctataaataccttcctctaattgggctcagggtcgactcctctgtctcctgtgtgagatacgtgtcttccccagagctctggttcctcaaatatacctcttgtttattacatcaagactggcttctcgtgagttcttggggggttgcgttgtctcgagatttgagtgggggtcttccccaccccagtggtctttcgagagatttcctggcattaaaggcatgtactaccttagcctgggcttttcatggccactatgcctcaagatctccatgccaagatctaggtcagaaacttgtatctcccagcctcaagctcaggatcacgggtgagccttctgaaaattctggattgtcattcattccagatatagtcaagttgacaaccaggaacagccactacagtatgctaacctaaacaattaaaagagaaaagaaaacccagaagaggacacagctgagatcattgtattcatgcagagattctgagttcaggtttgtggaactgactaggggatccctcctggtaacagtgttagaccacctcagggaggaataccgtcagagccacctttcctcagctaatatgccaacttctgttttcaaccatgctgacccaggtcattcataatacaactcgggtctgaggcctgtgggcaagtttctatcggaaagcatcctcttgaaattccccttaccaagcccagtcatccttagtaggcaaagggggtgggaaaaaccacccggaactactcagtcagccttttgtttccttagtgatttctaatcagggaaaacctaaaccctatatcagtggcagaggaaagctgccttaaattctatgtataattgctatgaaaacatttgatagccgcagcttattagaccgtaagtcaacaaagggaaacaatgtcgttttacatttatggtggttggttttgaagttactgaatacacaaaatattacagggtttagtcaggaaagatgaacctggccttctaatcccgactcttgctagttaattgcgaggctggcaagctgcacctggagtcagcaaccctaacctcaggggcaacaaagatgaacacactaaaacctgagatgtgatttaaattcagcagccctgtcactgggcagccagtggagatcaggtcgggggaaggtcactcagggcataaattaagtgagtcagaaggcccctgattacgccatggctctgaccagcagcagggccctggcttcccggaggaaagtctctggggctttccagaaccaggaatggaaaaggagtggagacattgtagctcacaggcagaggtggccaaggcggcccgagaagaggcggggcctagtctgagggtggagcatagccacaccgggggcggggacgagcgggccgaggccaaggccggtgatggaggcgtggccacactaggggcgtggccgtggcaagcccgcgggctctaccaactcggcgcgggggagacgcggccttccctttgtgccgctctgttacaagctgggccgtccgtgtcgcggtcctcccctccgttgatgggcgctgccggcagggtcagcgcctagctgtgtccttgcggacgccgggcggacgccgcagagcagacgcgcggctgctagcgaacggccgtgttctgaggagagcagcggtcgtgggcgcctcagcaatgttgtgtcgggcggcgtgcaggtaagtggcagggcccggggccgcggcgtccccctttggttggtctcggcggcggacgtggctggctcgcggtgtcggtggcatgacgcggcgtcctctctgtccctttcagcgcgggcagaagactgggccccgcggccagtaccgcgggctcccggcacaagcacagcctccctgacctgccttacgactatggcgcgctggagccgcacattaacgcgcagatcatgcagctgcaccacagcaagcaccacgcgacctacgtgaacaatctgaacgtcaccgaggagaagtaccacgaggcgctggccaagggtaggtgcgaggtccctgtactggaggctccccgtgtccagacggaagtctgtttcgatgcaggggaatatctcggttggtttgcataaacgtcgtttactatctcggaaaacactacctcacgaaagtacttgatgcacttttaccattgtgagtccctttttgccacccgtgttgctagctagcattggtggtaaatccagggccctttaaagacagctccgggacgtcgctcctttttgcataatgaatatttattttttgtcttgcatatggatatttaaaatctgcggctgttatataacgtggctttgggaaagttcgttttgctttttttttcaggtagtcttggcagcggtttgcaggagggctgagagtgcccaggctgggtcagccaggtgccttgagtggcaggatgcctggggctagaagtggctggggctttgctgagagcaagtgctattggtggcctggcagcaggtgcaggagagggtctgaagtggcatcaggagactgcagcccgagtttgattattgtcactgtttcagacaacattaggattagttcagtctaggacttggactccctggctcgatccatggatgtctctgcactgtggatatcctgtttcacaccttttacccttgtgggagaggaattagcacttagcggcccaacaagctagacttggtacttttggggtcaaagttcacaggaaaaataggtatttcgtgagaaactgagtgtcactgaatggaacagtagttaagcttatttatttacctatattttaaagagctcagccaacaaaatctatggtatgtgcacttctgtgtttgtaccccagatgatgtatatgggagtgctatagtattaaaaaagcccatctctgtgtggtgtgtgtgtgtgtgtgtacaggtgtgtgatgaaggttagaggataactttggggagttggttctctcctttcactgtggtattcagaaactgagctcagattgtcaattcaagtcagggtgtcaggttttcctggcaagagcttttttgtttttttacctgttgagccaaccacaacttctgggaataattgttttaatggctaaacaaaatagtatgctgtctttttaatctattagtttttacaaggagaataattgttagccgtgtctctgggttagctgtattgcttgagaaaaccagacagtaaaattcactttttcttaaatacactcttattgcctctcaggtctgggaaacgggttgagtaattggttcactgggggcatctagtggagaagtgtggtattttagcatagttgtgtaagtggcccaaccaagagaaggaaattaccacattctggaaattttacttgcaataagcaaatcacataatcgtgaatacgggaagagactctgatttaggaaatgacagatttgggaaggctgtggtaatagtgagtaggggaaaagcccagttgggaaatcgtttcctctaaggtgacatctgacaactttcctcttaatgttgtaaaaacatggtgatttcaacccttccgtggagacagagctgtatttgtttagtgaatgctgctgggaataagaaagccgtggttttattgacctggctgaggatggattttgaaaaggtgtttacgttttatatttcaggagatgttacaactcaggttgctcttcagcctgcactgaagttcaatggcgggggccatatcaatcacagcattttctggacaaacctgagccctaagggtggtggagaacccaaaggttggtatctgctggtacagctttatccttggtgtacagtaggaatgattgttgggttccccctcctttcttaactttttaattttctttaaaagagtaatgtgtggttcttgctggcctggaaatcgatatgtagacagtctttataaatttatttatttgtttattttttgaggcagtttgtttgtttaatacacaaacacacacacacaacacacacaccacacagacagacagacacacacacacacacacacacacacacacacacatatatatatgtgtgtgtgtgtctgtctgtgtgtgtggggatgattttcttctttttcttctagggactgagctcagcacacacaagtatgtgcccattggcttggcctccagaggactgttggttttcttattacctgagttctcctgagttaccatataggtgtatttcttacagtcaggatatgacaagttgttacgtttcaaagagaggagtagagaatgtgttcagggagctctgtcacccgctttctctttctctctctctctctctttctctctctcacacacagacacagacctgcataccctgcccactcctaggataagtgttagggaaaacctggacaaacctagtacttagagaagttgaccctgggaaagaagacacgtagccatctgaactgtatttgcttcatccatgggcgcagggtaattacgggcctgctttcagtgttgtatgtaaagtgctcagagtagtgcttttgattattattcgtaatatgaggaagtcacttgccccagtaaaacaaggtttccatgaaaatgaaaacaaaacaaaaacctttgtgcaatgaagggtgtgtacaatttacttgtctttaaacaaaagcaaatcctcagattggagagatgactcagcagttatgagtgctgactgttcttccacaggtcctgagttcagctcgatgcccttctctggtgtgtctgaagacagtgacagtgtactcatatacatagaataaatgagaagaataatcctaaaaaagcaaaaaaaccaaacaaacaaaacaaaaaacccacccaaagtaacatcaataccaacaacaacaaaaacccaagtcctctactcctcagcccctctgtacaccctatacctcctgtaagactcatccagatggctgccatggctcctctgacttcctgtgtggcttatggaagctcgggtgacttcagttatcttctgattagggaagtgaggactatcatatagatctcctccctagatttttcttcctcttgcatgtgccctaagtatctggttttgttggttcttctccagtccctatctctgtggtggtgatgctgggattgaaccctggtcctcatgtgctaggtcagcctgctgctgagctacattcccagtgtagtgttgcttgtgcggtttttttaccgttgctgtaaaagcagcctgactcactagtaataagcacttccatcatgacttgtgagacttcggctatgaccaggatataaagtgtgctcctccccctcctcccccctcctcccccctcctcctccccctcctcctccccctccccctccccctcctcttcttcctcatgttgatatttctgttacatagtttgtatcacgtgaagcatcagccatatttgtaaaagataattacattttaggcaatagaatgagagaagtgagatgttggacccatctgattcagtttgatacgtttcatgcagaatcagttccatattgctacagagtaaaaagattctaggggtggggtagtatatgcctgtaatcccagcacttgggaagtagagacaggaggatcagaagtctgagtccaggggtgtgtgtgtgtgtgtgtgtgtgtgtgtgtgtgtgtgtgtgtgtgtgtttgtatgtgtatgtatgtgtgtgtgtgtgtgtgtgagagtcttttccctcactgccccccctctttcctttcctttgttggggtaaactctaggacttcatgcatatcaggtctgttctttgagctctgctccagccctcttaagtgtaccattcatttgctcaataacaaaagcgggaagccttcatttaaagaacagtatgatgaagatgggagagctaggcttggagaaggggttgaataacagcaataactttcagtttccaaatggggccataggataggggtaaaagtatgaaaggggaaaaatggaaaggaagcctgtgagaaggctcttcccttcctggttctcctcactagcacagggagcagagagaccctggctgcactcactaattgacctcagcccagtgtctgacgcctgcaggagggaggctggccttgcgagggttgcaggcatcttctcaagggcgtggtcctttgacaagactattttagtgttgtgaacctaacattctgctgtagtttttgaagtcttttctgtctttgctttttccttcaggagagttgctggaggctatcaagcgtgactttgggtcttttgagaagtttaaggagaaactgacagctgtgtctgtgggagtccaaggttcaggctggggctggcttggcttcaataaggagcaaggtcgcttacagattgccgcctgctctaatcaggacccactgcaaggaaccacaggtgagggagcctccatgtgttggggacacagacctgtgctactgtacccgacttgaggacttaaatagttttttttaaaaaaaatatagaactaaattcttcatttatgccacttaatttctgaaagtagtgttcatttttctttggtcctgtttaacttcttgttaacttactctttttagtgactcattgatgttttttccagaaaactaaaattacccttggagagtagtactggtttctcagcctcctcctctccaatgctctggaaaggaagctcagggccttagccatcccctctcacttgtggctcctgactgagactggcaagaaggctgggcttcaacactggtgcttctgttgccattttagcagcagggattaaggttctgtagtttaacttgatctttcagaggttttttcatattatttattacatttctttatttaaacaatttaaatatttttgcaggggtatgcaaattttctattacataagaagcaagcgaatgatgccgtattaaagaatattttttctctctttctgataggccttattccactgctggggattgatgtgtgggagcacgcttactatcttcagtataaaaacgtcagacctgactatctgaaagccatttggaatgtaatcaactgggagaatgttagccaaagatacatagtttgcaagaagtgaagcccttccgccagctgtgtgtcaggcccgtggtgggtgttttgtagtagtgtagagcattgcagcactgtggctgagctgttgtaatcttcattgatgcctatccacatatgtgtaagcatacagttatgataatttcttaattaaatgtattgttaggcactgtttgagaacagtacatacttggtgtgagctgctcttgattgaacattttcattagaggcttgaattgcttggacgctgtcactgtcatcataaggccatcaaagatattccatctctgtgttggggcctgtggggaggctgtaatcctgttctactgcagttaggaaaaaaatgagttaccccccccccccagaattgttgaataataaaatagagaactgaatagttctcttttgtgttaaaaattgctatttttcataagtaatcctttgtttagcggatatcacctagtggtctttatttatggccacagtttcacagaaacatcattttttcacttgaaacgtgtaactaggctaaggatggatggagtggtagacctttgcctgtcttatgtgaggccctgggctctacctcactactgaacaaatcaacagacccaagctaggctcctgactgacaactgttaattcggagaggagtgacattgtgcctctgggtttttttataggctgagatgcaaaaactgttaccttgtctattaaaaccgactgtgtattgtatgaaagtgctcaagatggacaaagtatgcagggcctgtcccatgatgtcaacatggggactaggccacagggcattcagggaagccattcagcaccattaattgtgtatctcaggagaactggaccctgggtgaggtggcacctttttcagtagaggcaaacgggtttctgagtgaggtcagtagggtgtcttgagaacatcagttttcagagacatgtattttcattttttctgcagtctcaagaacttatactcacaagagggcctttgtattgttattcaatagaaggacaccctttccctgacgaggcacacagtgtttctgattgtattcctgtgcagcatttgggtgtagagctgtgcactgttgaaatgcctttgtgaatttgccttttcacatttcgtctcaccatcttccttgttttctttactgactatgtaatgttttatcagttggatattactgaatagtttgtttgtgtttaattgccttttattaccaaaaaggctgtggtcagcaaccccaggcatgcacattacttcttaatggagtattttttaaaggtttattttaattttaattatgtgtgtctgtgtatgttctgttcattgtccccatggaagacagaagaaattgttgggtctgggtccctcggagctggagtggtacccatgagctgggacttgacggggatcatcctcgagagcaataagcacttaaccactgagccccctggaatttttttttctaaatattgagttttttcttaaacctattttgtaatttgtcccaagttattttcaaatcctcgcctcaagtatatttttctttttctttttaatggaaaaatggagtgacttagcagtttcaatattgaagactaaagttaaaaaaaaaaacaacaaactttaaattcaaagcactttttggcactcggtgtagaagctagtcagatgttgtaagtgtctgctgatgaggtgacctgtaggagtgagtagagccattgtacagaacagcgactcaactgagcaaaca

SEQ ID NO: 11539 - protein, 222 aa, Rattus norvegicus
  ref <308>: DATABASE ACCESSION NUMBER: SWISS-Prot / CAA39937
  ref <309>: DATABASE ENTRY DATE: 2002-06-15
MLCRAACSAGRRLGPAASTAGSRHKHSLPDLPYDYGALEPHINAQIMQLHHSKHHATYVNNLNVTEEKYHEALAKGDVTTQVALQPALKFNGGGHINHSIFWTNLSPKGGGEPKGELLEAIKRDFGSFEKFKEKLTAVSVGVQGSGWGWLGFNKEQGRLQIAACSNQDPLQGTTGLIPLLGIDVWEHAYYLQYKNVRPDYLKAIWNVINWENVSQRYIVCKK

SEQ ID NO: 11540 - DNA, 407 bp, Rattus norvegicus; identical to SEQ ID NO: 6340
  ref <308>: DATABASE ACCESSION NUMBER: EMBL / AA926242
  ref <309>: DATABASE ENTRY DATE: 2000-03-03

SEQ ID NO: 11541 - protein, 357 aa, Rattus norvegicus; identical to SEQ ID NO: 6341
  ref <308>: DATABASE ACCESSION NUMBER: SWISS-Prot / P19814
  ref <309>: DATABASE ENTRY DATE: 2001-10-16

SEQ ID NO: 11542 - DNA, 1494 bp, Homo sapiens; identical to SEQ ID NO: 6342
  ref <308>: DATABASE ACCESSION NUMBER: EMBL / BC008461
  ref <309>: DATABASE ENTRY DATE: 2001-07-13

SEQ ID NO: 11543 - protein, 480 aa, Homo sapiens; identical to SEQ ID NO: 6343
  ref <308>: DATABASE ACCESSION NUMBER: SWISS-Prot / O43493
  ref <309>: DATABASE ENTRY DATE: 2002-06-15

SEQ ID NO: 11544 - DNA, 520 bp, Rattus norvegicus; identical to SEQ ID NO: 6350
  ref <308>: DATABASE ACCESSION NUMBER: EMBL / AA943677
  ref <309>: DATABASE ENTRY DATE: 2000-03-03

SEQ ID NO: 11545 - DNA, 2088 bp, Homo sapiens; identical to SEQ ID NO: 6351
  ref <308>: DATABASE ACCESSION NUMBER: EMBL / AK054981
  ref <309>: DATABASE ENTRY DATE: 2002-08-06

SEQ ID NO: 11546 - protein, 136 aa, Homo sapiens; identical to SEQ ID NO: 6352
  misc_feature (1)..(136): Xaa=Unknown amino acid

SEQ ID NO: 11547 - DNA, 995 bp, Rattus norvegicus
  ref <308>: DATABASE ACCESSION NUMBER: Refseq / NM_024152
  ref <309>: DATABASE ENTRY DATE: 2002-11-05
agcaggcacgttcgcgcaagccgggccgcagggcgtcctcgcggcggggcggctacttttcgggctcgcagcggcggcggcgttgtaggctgaggggacccgggacacctgaatgcccccggccccggctcttccgacgcgatggggaaggtgctatccaagatcttcgggaacaaggaaatgcggatcctcatgctgggcctggacgcagccggcaagacaacgatcctgtacaagttgaagctgggccagtctgtgaccaccattcccacggtgggtttcaacgtggagacggtgacttacaaaaacgtcaagttcaacgtgtgggatgtgggcggccaggacaagatccggccgctctggcggcattactacaccgggacccagggtctgatcttcgtggtagactgcgccgaccgggaccgcatcgatgaggcccgccaggagctgcaccgcattatcaatgaccgggagatgagggacgccataatcctcatcttcgccaacaagcaggacctgcctgatgccatgaaaccccatgagatccaggagaaactgggcctgacccggattcgggacaggaactggtatgtgcagccctcctgtgccacctccggggacggactctatgaggggctcacatggttaacctctaactacaaatcctaatgagcgccctccacccagcccccggaaggagagaaatcaaaaacccattcataggattatcgccaccatcatcacctctttcaattgccactctcttttttgaaactgaactcgagttactgttctaccgtttagtggggttgggggttttctttgttccccttaccccccctcttctatttcctttcggctttgcgttaggatgctctgatctgacatttgacacgaatacagtgctatatgctcttgtgacttccagcaaacggggtaatagcaactcttggtaaagtcctttataataatggttgattttttttttttatttc

SEQ ID NO: 11548 - protein, 174 aa, Rattus norvegicus; identical to SEQ ID NO: 6358
  ref <308>: DATABASE ACCESSION NUMBER: SWISS-Prot / P26438
  ref <309>: DATABASE ENTRY DATE: 2002-06-15

SEQ ID NO: 11549 - DNA, 1194 bp, Homo sapiens; identical to SEQ ID NO: 6359
  ref <308>: DATABASE ACCESSION NUMBER: EMBL / M57763
  ref <309>: DATABASE ENTRY DATE: 1999-07-02

SEQ ID NO: 11550 - protein, 174 aa, Homo sapiens; identical to SEQ ID NO: 6358

SEQ ID NO: 11551 - DNA, 2573 bp, Rattus norvegicus; identical to SEQ ID NO: 9493
  ref <308>: DATABASE ACCESSION NUMBER: EMBL / X17163
  ref <309>: DATABASE ENTRY DATE: 1993-09-12

SEQ ID NO: 11552 - protein, 334 aa, Rattus norvegicus; identical to SEQ ID NO: 9494
  ref <308>: DATABASE ACCESSION NUMBER: SWISS-Prot / CAA35041
  ref <309>: DATABASE ENTRY DATE: 2002-06-15

SEQ ID NO: 11553 - DNA, 3321 bp, Homo sapiens; identical to SEQ ID NO: 9499

SEQ ID NO: 11554 - protein, 331 aa, Homo sapiens; identical to SEQ ID NO: 9496

SEQ ID NO: 11555 - DNA, 583 bp, Rattus norvegicus
  ref <308>: DATABASE ACCESSION NUMBER: EMBL / AA946384
  ref <309>: DATABASE ENTRY DATE: 2000-03-03
gctgatctaagcatttattgcacaagatgcttcagacttgggaggtggagacgaggagcccccaaagctttccacagccgagactcagtttgctggaggctgaagcacaagcaataaggacctcacttgaaagggagaaaaggtgagcttcaggcggttgtcctgaagggacaggtgaccggtagggtctcgctgctccaggaggtcacaaagggtggcctcctgaacaggcaatgatgtgtgtagccagcagtccacatggctgccatgagcctcatacagccttagaaccagtgtgcggtgctgatggctcttctcggcctgcttgatggtctccaacacgactgctggtgaagacacggaaaaggcgctccaggtggtatcaggggctgggcctggagctggcagtgccaagaggggaaagttgaggttgtaggcagcctggataacaccagcttcttggaaagaacccttgtgtggcatcaaggcataagtgaattcatggcgccccatgtcagcagtaacatctggagccttgggtgcacgcagcagtgagaggctgaggacgttgcctcgtactgac

SEQ ID NO: 11556 - protein, 1040 aa, Rattus norvegicus
  ref <308>: DATABASE ACCESSION NUMBER: SWISS-Prot / P21139
  ref <309>: DATABASE ENTRY DATE: 2000-05-30
MAAAPFLKHWRTTFERVEKFVSPIYFTDCNLRGRLFGDSCPVTLSSFLTPERLPYEKAVQQNFSPAQVGDSFGPTWWTCWFRVELVIPEVWVGKEVHLCWESDGESLVWRDGEPVQGLTKEGEKTSYVLSERLHAADPRSLTLYVEVACNGLLGAGKGSMIAAPDPEKMFQLSQAKLAVFHRDVHNLLVDLELLLGVAKGLGEDNQRSFQALYTANQMVNICDPAQPETYPAAEALASKFFGQRGGESQHTIHATGHCHIDTAWLWPFKETVRKCARSWSTAVKLMERNTEFTFACSQAQQLEWVKNQYPGLYAQLQEFACRGQFVPVGGTWVEMDGNLPSGEAMVRQFLQGQNFFLQEFGKMCSEFWLPDTFGYSAQLPQIMQGCGIKRFLTQKLSWNLVNSFPHHTFFWEGLDGSQVLVHFPPGDSYGMQGSVEEVLKTVTNNRDKGRTNHSGFLFGFGDGGGGPTQTMLDRLKRLGNTDGQPRVQLSSPGQLFTALERDSGQLCTWVGELFLELHNGTYTTHAQLKKGNRECEQILHDVELLSSLALARSAQFLYPAVQLQRLWRLLLLNQFHDVVTGSCIQLVAEDAMNYYEDIRSHGNTLLSAAAAALCAGEPGPKGLRHYQHTALEAHRSVGTTQGLVGLTRLALVTVPSIGYAPAPTPTSLQPLLPQQPVFVMQETDGSVTLDNGIIRVRLDPTGCLTSLVLVASGREAIAEGALGNQFVLFDDVPLYWDAWDVMDYHLETRKPVRGQAGTLAVGAEGGLRGSAWFLLQISPNSRLSQEVVLDVGCPYVRFHTEVHWHETHKFLKVEFPARVRSPQATYEIQFGHLQEADPQQHSWDWARYEVWAHRWIDLSECDFGLALLNNCKYGTSVRGNVLSLSLLRAPKAPDVTADMGRHEFTYALMPHKGSFQEAGVIQAAYNLNFPLLALPAPGPAPDTTWSAFSVSSPAVVLETIKQAEKSHQHRTLVLRLYEAHGSHVDCWLHTSLPVQEATLCDLLEQRDPTGHLSLQDNRLKLTFSPFQVRSLLLVLQPPAN

SEQ ID NO: 11557 - DNA, 1449 bp, Homo sapiens
  ref <308>: DATABASE ACCESSION NUMBER: EMBL / BC010081
  ref <309>: DATABASE ENTRY DATE: 2001-07-13
ggcacgaggggaagctggagagcacagccacagggcagctggccccaaaaagcctgcgtgggacgggccggtgggcacatgctggaggccgccccgtttccgcctgggggccagctggccggtggggccgcactttccctggatcctccgccaagagggctgcctggccgctccgcggcacagtccattccctaccccctcctccccggcccctgccctgcccgcggcgggcactttgtcccgcggcccgggtggctgcagcttaggtttctccccggaaggaaagcttgaggcgcacggttgcggtcggccggctgcgggggaccaggggccacacctgccgcggaggttacagtcggtaaagtagagcggcgacacgaacttctccacccgctccagcgtggtgcgccagtgcttcaaggccggcgcagccgccatcgccgggctctcgctcctctttccggaaggcccctggcgctaccgttccgctccacggcaggaaaccaaaggttccggcgtccagagggcgcctcccagtcccgggcagcttttcttggaacaccggcggctctcggaagcccagctgctgtctgaactttgagccgagttggaagctagaaactgtttttgaggctctcctatgttgtccgaaatagtgggccgcagggaaaatctcaaaataaaatgggaaatttgacgattagaactctcgaaagtctcaagacagagacttaggccattcggcaagacaggcgggagcctcagctgctgcagacccagcctcagaagcagcaaccgggagacctctggctctagctgtcggtgaacacggaaagtggtgtttgcttaacgtggagccagactacccggaataggtgttttcataccggacggagatcagggtgttagtgagcagggtggtagagctttacgcccaagttactacgacttactcgattacacgctttactgaatgtatattgctaactcttgcacatcaccagaaactctggagtttgaggtggcagaacagtcatggcattgacgatcccaatggaaaaatgtatttcaccatacaggactgtagagtcccgggaagccataataccagaaacagacctccagtttcattctcatccctagtactccactgacagctttattttttttctcctggggttgccaagagtctttgtctataaaatcattaggaacaaaaaaaaatacacaagattagccctgatattttaatggaaatactgaccaagtttacaacatttcaaatgcagatcacacggaaaggtgactaagtacagaataacaaatgtgatttaaaacaaagataacctgctgctgcatataatacaggttgggtttagagcttggagctcagatgtcagacagcaggaggaataaaaatgctacttgtgaaaaaaaaaaaaaaaaaaa

SEQ ID NO: 11558 - protein, 36 aa, Homo sapiens
  misc_feature (1)..(36): Xaa=Unknown amino acid
MALTIPMEKCISPYRTVESREAIIPETDLQFHSHPX

SEQ ID NO: 11559 - DNA, 616 bp, Rattus norvegicus; identical to SEQ ID NO: 6393
  ref <308>: DATABASE ACCESSION NUMBER: EMBL / AA946439
  ref <309>: DATABASE ENTRY DATE: 2000-03-03

SEQ ID NO: 11560 - protein, 102 aa, Rattus norvegicus; identical to SEQ ID NO: 6394
  ref <308>: DATABASE ACCESSION NUMBER: SWISS-Prot / P02304
  ref <309>: DATABASE ENTRY DATE: 2002-06-15

SEQ ID NO: 11561 - DNA, 367 bp, Homo sapiens; identical to SEQ ID NO: 6395
  ref <308>: DATABASE ACCESSION NUMBER: Refseq / NM_003539
  ref <309>: DATABASE ENTRY DATE: 2002-05-22

SEQ ID NO: 11562 - protein, 102 aa, Homo sapiens; identical to SEQ ID NO: 6394

SEQ ID NO: 11563 - DNA, 2462 bp, Rattus norvegicus; identical to SEQ ID NO: 4149
  ref <308>: DATABASE ACCESSION NUMBER: Refseq / NM_021767
  ref <309>: DATABASE ENTRY DATE: 2000-11-08

SEQ ID NO: 11564 - protein, 468 aa, Rattus norvegicus; identical to SEQ ID NO: 4150
  ref <308>: DATABASE ACCESSION NUMBER: SWISS-Prot / Q63373
  ref <309>: DATABASE ENTRY DATE: 2002-06-15

SEQ ID NO: 11565 - DNA, 3069 bp, Homo sapiens; identical to SEQ ID NO: 4151
  misc_feature (1)..(3069): n=a, c, g or t
  ref <308>: DATABASE ACCESSION NUMBER: EMBL / AF064842
  ref <309>: DATABASE ENTRY DATE: 2000-03-03

SEQ ID NO: 11566 - protein, 442 aa, Homo sapiens; identical to SEQ ID NO: 4152
  misc_feature (1)..(442): Xaa=Unknown amino acid
  ref <308>: DATABASE ACCESSION NUMBER: SWISS-Prot / P58400
  ref <309>: DATABASE ENTRY DATE: 2002-06-15

SEQ ID NO: 11567 - DNA, 505 bp, Rattus norvegicus
  ref <308>: DATABASE ACCESSION NUMBER: EMBL / AA956941
  ref <309>: DATABASE ENTRY DATE: 2000-03-03
tttttttttttttgtaatataagacaagtctgagtagttatgaatcgcagacgcaagaggtttcagcattcccaattatcaaaaaacagaaaaacaaacacaaaaaaaatgaatgaaagaaagaaagaaagagaaaatgcaacttgagggacgacttctttaacatatcactctgaatgtgcgaagcggtatgtacaggctgagacgcagcccagagactgaatggcaatccttccacactgtggagcaatgcatttgtgcctaaacttcttttggaaaaaaaaatataattaatttgtaagtctgaaaaaaaatatttaatttaaaaaaaattgtaaacttgcaataatgaaaaagtgtacttctgaagaaaaacgacatgaacgtttttgttggtattcaagtcagctagtgtttctaattaccggatattgaatagaggaagcccggctaccctcataacaaaaccagcaaccgtcctgatggcaaccgaaatgatgacatt

SEQ ID NO: 11568 - protein, 428 aa, Rattus norvegicus; identical to SEQ ID NO: 8034
  ref <308>: DATABASE ACCESSION NUMBER: SWISS-Prot / Q62655
  ref <309>: DATABASE ENTRY DATE: 2002-06-15

SEQ ID NO: 11569 - DNA, 1958 bp, Homo sapiens; identical to SEQ ID NO: 8035
  ref <308>: DATABASE ACCESSION NUMBER: EMBL / AK026674
  ref <309>: DATABASE ENTRY DATE: 2000-09-29

SEQ ID NO: 11570 - protein, 667 aa, Homo sapiens; identical to SEQ ID NO: 8036
  ref <308>: DATABASE ACCESSION NUMBER: SWISS-Prot / P15884
  ref <309>: DATABASE ENTRY DATE: 2000-05-30

SEQ ID NO: 11571 - DNA, 407 bp, Rattus norvegicus; identical to SEQ ID NO: 6448
  ref <308>: DATABASE ACCESSION NUMBER: EMBL / AA963857
  ref <309>: DATABASE ENTRY DATE: 2000-03-03

SEQ ID NO: 11572 - protein, 597 aa, Rattus norvegicus; identical to SEQ ID NO: 3443
  ref <308>: DATABASE ACCESSION NUMBER: SWISS-Prot / P13265
  ref <309>: DATABASE ENTRY DATE: 1996-10-01

SEQ ID NO: 11573 - DNA, 2130 bp, Homo sapiens; identical to SEQ ID NO: 3444
  ref <308>: DATABASE ACCESSION NUMBER: EMBL / L47125
  ref <309>: DATABASE ENTRY DATE: 1999-07-02

SEQ ID NO: 11574 - protein, 580 aa, Homo sapiens; identical to SEQ ID NO: 3445
  ref <308>: DATABASE ACCESSION NUMBER: SWISS-Prot / P51654
  ref <309>: DATABASE ENTRY DATE: 2002-06-15

SEQ ID NO: 11575 - DNA, 531 bp, Rattus norvegicus; identical to SEQ ID NO: 6500
  ref <308>: DATABASE ACCESSION NUMBER: EMBL / AI008852
  ref <309>: DATABASE ENTRY DATE: 2000-03-03

SEQ ID NO: 11576 - protein, 462 aa, Rattus norvegicus; identical to SEQ ID NO: 6501
  ref <308>: DATABASE ACCESSION NUMBER: SWISS-Prot / P20001
  ref <309>: DATABASE ENTRY DATE: 2001-10-16

SEQ ID NO: 11577 - DNA, 436 bp, Homo sapiens; identical to SEQ ID NO: 6502
  misc_feature (1)..(436): n=a, c, g or t
  ref <308>: DATABASE ACCESSION NUMBER: EMBL / AA076035
  ref <309>: DATABASE ENTRY DATE: 2000-03-03

SEQ ID NO: 11578 - protein, 462 aa, Homo sapiens; identical to SEQ ID NO: 6503
  ref <308>: DATABASE ACCESSION NUMBER: SWISS-Prot / P04720
  ref <309>: DATABASE ENTRY DATE: 2002-06-15

SEQ ID NO: 11579 - DNA, 440 bp, Rattus norvegicus; identical to SEQ ID NO: 6504
  ref <308>: DATABASE ACCESSION NUMBER: EMBL / AI008888
  ref <309>: DATABASE ENTRY DATE: 2000-03-03

SEQ ID NO: 11580 - protein, 98 aa, Rattus norvegicus; identical to SEQ ID NO: 6505
  ref <308>: DATABASE ACCESSION NUMBER: SWISS-Prot / P01041
  ref <309>: DATABASE ENTRY DATE: 2002-06-15

SEQ ID NO: 11581 - DNA, 338 bp, Homo sapiens; identical to SEQ ID NO: 6506
  ref <308>: DATABASE ACCESSION NUMBER: EMBL / AW451145
  ref <309>: DATABASE ENTRY DATE: 2000-02-21

SEQ ID NO: 11582 - protein, 98 aa, Homo sapiens; identical to SEQ ID NO: 6507
  ref <308>: DATABASE ACCESSION NUMBER: SWISS-Prot / P04080
  ref <309>: DATABASE ENTRY DATE: 2002-06-15

SEQ ID NO: 11583 - DNA, 351 bp, Rattus norvegicus; identical to SEQ ID NO: 6514
  ref <308>: DATABASE ACCESSION NUMBER: EMBL / AI009147
  ref <309>: DATABASE ENTRY DATE: 2000-03-03

SEQ ID NO: 11584 - DNA, 1663 bp, Homo sapiens; identical to SEQ ID NO: 6515
  ref <308>: DATABASE ACCESSION NUMBER: EMBL / AJ249980
  ref <309>: DATABASE ENTRY DATE: 2000-07-14

SEQ ID NO: 11585 - protein, 304 aa, Homo sapiens; identical to SEQ ID NO: 6516
  ref <308>: DATABASE ACCESSION NUMBER: SWISS-Prot / CAB96537
  ref <309>: DATABASE ENTRY DATE: 2002-10-01

SEQ ID NO: 11586 - DNA, 458 bp, Rattus norvegicus
  ref <308>: DATABASE ACCESSION NUMBER: EMBL / AI009191
  ref <309>: DATABASE ENTRY DATE: 2000-03-03
agttgaatcgggtgaagacagagttaaaatcacagaggatttgcttttttttcttttttaaaaaaggaaagcacgaggatggttggcacaggagcagctatttacactgaacaggtttggcctttgacagaacagcgatacaatgcatttccaagtctgtctcggatgattcacagaggaggttcggactgggggacaagtgtcattaaggagggccgtggaagttcgtcagcctcagagtcacatgcaatctgatcctggacggttctcgctgctcggaggcagctggctatggaatcggaagctaatggggaggggtggggcggcctctgggacgaggcccctgaagcgcaggctctcacaggttttcaccgggctgatactggggctctgtggcggtaaagtagtcctccaggaagccctgcaagtactcgaaagtggggcgctcctccggattc

SEQ ID NO: 11587 - DNA, 2647 bp, Homo sapiens
  ref <308>: DATABASE ACCESSION NUMBER: EMBL / M14333
  ref <309>: DATABASE ENTRY DATE: 1998-03-30
gccgcgctggtggcggcggcgcgtcgttgcagttgcgccatctgtcaggagcggagccggcgaggagggggctgccgcgggcgaggaggaggggtcgccgcgagccgaaggccttcgagacccgcccgccgcccggcggcgagagtagaggcgaggttgttgtgcgagcggcgcgtcctctcccgcccgggcgcgccgcgcttctcccagcgcaccgaggaccgcccgggcgcacacaaagccgccgcccgcgccgcaccgcccggcggccgccgcccgcgccagggagggattcggccgccgggccggggacaccccggcgccgccccctcggtgctctcggaaggcccaccggctcccgggcccgccggggaccccccggagccgcctcggccgcgccggaggagggcggggagaggaccatgtgagtgggctccggagcctcagcgccgcgcagtttttttgaagaagcaggatgctgatctaaacgtggaaaaagaccagtcctgcctctgttgtagaagacatgtggtgtatataaagtttgtgatcgttggcggaaattttggaatttagataatgggctgtgtgcaatgtaaggataaagaagcaacaaaactgacggaggagagggacggcagcctgaaccagagctctgggtaccgctatggcacagaccccacccctcagcactaccccagcttcggtgtgacctccatccccaactacaacaacttccacgcagccgggggccaaggactcaccgtctttggaggtgtgaactcttcgtctcatacggggaccttgcgtacgagaggaggaacaggagtgacactctttgtggccctttatgactatgaagcacggacagaagatgacctgagttttcacaaaggagaaaaatttcaaatattgaacagctcggaaggagattggtgggaagcccgctccttgacaactggagagacaggttacattcccagcaattatgtggctccagttgactctatccaggcagaagagtggtactttggaaaacttggccgaaaagatgctgagcgacagctattgtcctttggaaacccaagaggtacctttcttatccgcgagagtgaaaccaccaaaggtgcctattcactttctatccgtgattgggatgatatgaaaggagaccatgtcaaacattataaaattcgcaaacttgacaatggtggatactacattaccacccgggcccagtttgaaacacttcagcagcttgtacaacattactcagagagagctgcaggtctctgctgccgcctagtagttccctgtcacaaagggatgccaaggcttaccgatctgtctgtcaaaaccaaagatgtctgggaaatccctcgagaatccctgcagttgatcaagagactgggaaatgggcagtttggggaagtatggatgggtacctggaatggaaacacaaaagtagccataaagactcttaaaccaggcacaatgtcccccgaatcattccttgaggaagcgcagatcatgaagaagctgaagcacgacaagctggtccagctctatgcagtggtgtctgaggagcccatctacatcgtcaccgagtatatgaacaaaggaagtttactggatttcttaaaagatggagaaggaagagctctgaaattaccaaatcttgtggacatggcagcacaggtggctgcaggaatggcttacatcgagcgcatgaattatatccatagagatctgcgatcagcaaacattctagtggggaatggactcatatgcaagattgctgacttcggattggcccgattgatagaagacaatgagtacacagcaagacaaggtgcaaagttccccatcaagtggacggcccccgaggcagccctgtacgggaggttcacaatcaagtctgacgtgtggtcttttggaatcttactcacagagctggtcaccaaaggaagagtgccatacccaggcatgaacaaccgggaggtgctggagcaggtggagcgaggctacaggatgccctgcccgcaggactgccccatctctctgcatgagctcatgatccactgctggaaaaaggaccctgaagaacgccccacttttgagtacttgcagagcttcctggaagactactttaccgcgacagagccccagtaccaacctggtgaaaacctgtaaggcccgggtctgcggagagaggccttgtcccagaggctgccccacccctccccattagctttcaattccgtagccagctgctccccagcagcggaaccgcccaggatcagattgcatgtgactctgaagctgacgaacttccatggccctcattaatgacacttgtccccaaatccgaacctcctctgtgaagcattcgagacagaaccttgttatttctcagactttggaaaatgcattgtatcgatgttatgtaaaaggccaaacctctgttcagtgtaaatagttactccagtgccaacaatcctagtgctttccttttttaaaaatgcaaatcctatgtgattttaactctgtcttcacctgattcaactaaaaaaaaaaagtattattttccaaaagtggcctctttgtctaaaacaataaaattttttttcatgttttaacaaaaacc

SEQ ID NO: 11588 - protein, 536 aa, Homo sapiens
  ref <308>: DATABASE ACCESSION NUMBER: SWISS-Prot / P06241
  ref <309>: DATABASE ENTRY DATE: 2002-06-15
GCVQCKDKEATKLTEERDGSLNQSSGYRYGTDPTPQHYPSFGVTSIPNYNNFHAAGGQGLTVFGGVNSSSHTGTLRTRGGTGVTLFVALYDYEARTEDDLSFHKGEKFQILNSSEGDWWEARSLTTGETGYIPSNYVAPVDSIQAEEWYFGKLGRKDAERQLLSFGNPRGTFLIRESETTKGAYSLSIRDWDDMKGDHVKHYKIRKLDNGGYYITTRAQFETLQQLVQHYSERAAGLCCRLVVPCHKGMPRLTDLSVKTKDVWEIPRESLQLIKRLGNGQFGEVWMGTWNGNTKVAIKTLKPGTMSPESFLEEAQIMKKLKHDKLVQLYAVVSEEPIYIVTEYMNKGSLLDFLKDGEGRALKLPNLVDMAAQVAAGMAYIERMNYIHRDLRSANILVGNGLICKIADFGLARLIEDNEYTARQGAKFPIKWTAPEAALYGRFTIKSDVWSFGILLTELVTKGRVPYPGMNNREVLEQVERGYRMPCPQDCPISLHELMIHCWKKDPEERPTFEYLQSFLEDYFTATEPQYQPGENL

SEQ ID NO: 11589 - DNA, 1380 bp, Rattus norvegicus
  ref <308>: DATABASE ACCESSION NUMBER: Refseq / NM_022519
  ref <309>: DATABASE ENTRY DATE: 2002-11-14
gggctctttctcctcagccttggtcaccaccccagctctgggacaacaagttgaaaatggcaccctccatctcacgggggctcctgcttctggcaggcctgtgttgcctggcccccagcttcctggctgaggatgcccaggaaaccgatacctcccagcaggaccagagtccaacctaccgtaagatttcttcaaacctggcagactttgccttcagcctataccgggagctggtccatcaatccaatacatccaacatcttcttctcccctatgagcatcaccacagccttcgccatgctctccgtggggagcaagggtgacactcgcaaacagattctagagggcctggagttcaacctcacacagatacctgaggctgacatccacaaggccttccatcacctcctccaaactctcaacaggccagacagtgagctgcagctgaacacaggcaatggcctctttgtcaacaagaatctgaagctggtggagaagtttctggaagaggtcaagaacaattaccactcagaagccttctctgtcaactttgccgactcagaagaggctaagaaagtaattaatgattatgtagagaagggaacccaaggaaagatagttgatttgatgaaacagctggacgaagacacggtttttgccctggtgaattacattttctttaaaggcaagtggaagaggccattcaatcctgagcacactagggatgctgactttcacgtagacaagtccaccacagtgaaggtgcccatgatgaaccgcctgggcatgtttgacatgtactattgcagcacactgtccagctgggtgctgatgatggattacctgggcaacgccactgccatcttcctcctgcccgatgatggcaagatgcagcatctggagcaaactctcaccaaggatctcatttcccggttcctgctaaacaggcaaacaaggtcagccattctctacttccccaaactgtccatctctggaacctataacttgaacacactcctgagctcactgggcatcacccgggtcttcaacaatgatgctgatctctctggaatcacagaggatgcccccctgaagcttagccaggctgtgcataaggctgtgctgaccttagatgagaggggaacagaggctgcaggagccactgtggtggaggccgtccccatgtctctgccccctcaagtgaagttcgaccaccctttcattttcatgatagttgaatcagaaactcagagccccctctttgtgggaaaagtgatagatcccacacgttaatcactgtcctcagaagtcacatcccttctggatcgggtccccttcctaataatattaaactcaggctggcctggcctgatgcttctgc

SEQ ID NO: 11590 - protein, 411 aa, Rattus norvegicus; identical to SEQ ID NO: 6540
  ref <308>: DATABASE ACCESSION NUMBER: SWISS-Prot / P17475
  ref <309>: DATABASE ENTRY DATE: 1994-06-01

SEQ ID NO: 11591 - DNA, 1337 bp, Homo sapiens; identical to SEQ ID NO: 6541

SEQ ID NO: 11592 - protein, 418 aa, Homo sapiens; identical to SEQ ID NO: 6542

SEQ ID NO: 11593 - DNA, 31737 bp, Rattus norvegicus
  ref <308>: DATABASE ACCESSION NUMBER: EMBL / L34078
  ref <309>: DATABASE ENTRY DATE: 2001-08-01
gatcatagttcaacaatacagtctattgtgaaaaatcataacagcatgaaagtgagacattgcaaccacatttgggaagctgagaaatctttgtttcaccccaggaccacagcgctatggaatagtgtttcaaacagtaggtttcctcgcctcatttaacatagtctaggcactcctccacagccatgtccagggtgaacgtaaattctgtcagttaatattaaccatcacagcaggcatctaagaacttgctctgttacatgtgcacatgtgtggctaagcatgcacacactggcatgtgaatgtgctcacacacatacccagctcccaggtactgcagccccctctgagaagcttgacactcaaatgctactcctctactgcctgggccccacttcccttggtctggctacagtaacagccaaactcggtctcctattaagtgtcctgagctctctaaaccctccatgtcttttctggtattttgacatagcttaggcttgccttcacctcggcatgtagctggtgatggccttgaaatcctgatcctcctgcctgcatctctccagtgccagggtcaggcacgtggcatgatgccctgctctcactgtggcttgctttggtgccacctggcatccccgtcctgtgctttgctgctctcccttcttgaggcaggaggcccatgctagatgcatcgaaggagcatattgtagccattgtgtgtgtcctggtcagctccataaacttgtacagggcacttttgtgttttgtgattccttgcccatttttgttctgttacttgagatagaggatccaggctgtctcaaacacttggcgccaggtgcttctccggtcctagcctctccttgtcctgggttacaggtagaggtggctgccttttaaactatgatctcccacccccacccctgagatagggccttactctacagctctgggcgtctaaagagctgggattacaggtgtaaatgactacatatgttgcccatacaatcttttgttaggattttcaggcttttccagaatgtaagcaaagcagatagccaggcccctggaagcctccaaataggaaaggttcagtctccctcgtcacaggccacctgctgccagcagggtgctcccatgaggcacctcgggtctgaaagagcctgggcgcaggaactctgggaaatgtcagtcctccatgctggaattgcagctacacaatcttggcattgcccttgaaagacgagcaggtttcaaacgttggtgaatggatgaggtgccctcctcaacatggagagagtctcacacttctggctcatgaaggagctgtctgttggaatgtgggggacaaatctgtctggtaatcctgtggtgtgttttggaaaaaagaataaaagggtaggaatgctattatgtgtgtcttctatttaatttattaattttaattgtgtgggtgtgtgctgtgaaagatgcagttttcacctgctgagcatcttccctgccgggcaaggtggtgattttcaaatgcttttaagtttgtgatggccaagcagctgaactcttgagccagcgtgacccactgtcccccagtccagcctctccgtagacaagcacatggatgccctctctcagtctggctctggattttagccacagggacgacagcaaatgtgatgcaatcagaggcttcaagagtgcgcatgaattgaacttcctctctgctatccttgggctccctgctgtcactgccacactgaaaagcctacaaagctaagggttgggaatgtattcccttagaacctcccagtgaggggctgggggtgtggctcagtggtagagctcctgcctagaatcccccagtgaggggatgggggcgtggctcagtggtagagcccctgcctagaattccccagtgaggggctgggggcgtggctctgtggtagagcccctgcctagaatcccccagtgaggggctgggggcgtggcccagtggtagagcacctgcctagcatattcaaggctctaggtctatccccactactgacacaaaattgacggaagctttcggtatgtagtctgggattcatcctcctccggcctcagcctcccaagcactgggtttgcaggtgtactctaccacattctgctacaatcttaaactctgagccaagcgatggtagtgtactcaggaggcagaggcgggtggatctctcgtctacagagtgagttccaggacagccatagctacacagagaacccatgcctcaaaaaacaaacaaacaaaaataaaaaaccaccaccaacaacaaaacaaccccccgttacatttgagctgtgcaatcttcaaattgatacatgcccccccaagccccagcctttgcctcaagactcatctcaagaacataaatgctactgagtgcctgtcgccaccatcgagcagacaaaatgagaggcagcctctcacaggccaaggtgctcacacttgctgtttctgaaattgcccagctctctgccttccgactgggagagaaacctactcctggttaggtatggctatgtgactagctctgtccctggagctgagagtgttgagtcacttctgggtcacacagtggttaatcacacaggtgaggcatttctaggcacttccctttggcaaaggcattggctgatccatacctggaatgagcagaaacccgctttggattatgctgaacttgtagagcaaaggcaagcaccagccttttatgaatgggtgctcattcagcaaacacacccgctctcccggtgaaactcccatgctgatgttggctttggcctggtgactcaccttagtcaatggaatgttaccagctctaaccccatcaacaacaataacaaaaaccctaaatgcacttgactttcctgcagtgccagggatctgctggaaggaggatatgtggaagtccagcggggagctagttgtggatcaaaccagctaggagagctatggtaggcaagctacaggcccttagaaacaagattgcgggctggtgagatggctcagtgggtaagagcaccgactgctcttccgaaggtccagagttcaaatcccagcaaccacatggtggctcacaaccatccacaacaagatcctcttctggagtgtctgaaaacagctacagtgtacttacacatattaataaataaatctttaaaaaaaaaagaaacaagattgcttgttgtcttaaatctcagtgtggggattgtttgttacatggcattattgttgcaagagctgactcatacaaagttgttactgtagcataatgtagccagctcagattggtgtcaacattagcacctgcccgctaatggcccttctgtaagtggcagctgtcacgatgattaattagtatttactgagacagactctctgaagaaccatcattttttttttttaaggtagcacccactgctctcatatctgctttcaaaggaggtttttcatcacacagttctgaagttctcactgttaatagccacatgttaccaacatggacatggagatgaggcaggagatgtgaccagaactcacatcaggattctcaccatcctagctgtttgacttaaggcctcagtttgtccacttgtaacgtggaataatatcaatttcatctgggcggggctgttcacagccataatcccaaccttccagatggtgaggcagagagctcacctcgagtttgaggctggactggactacactacataatgaggccatctcaaaggacgacagcagagcagcaaatcaatttcatggagctgtgatcaggaaatgactagaaagtataaaacacttagcagggtgcctcttactataaagcgggggctacttgattttctttttccctttgctttataaaagggcaggagtcaggatgacagccctgcctctgtccctccatttctctctctctcttctgcactgagtctcactgtgtgactctggctggccttgaactaacaaagatccacctgcccctgcctcccgagtgctgggattaaaaacatacaccatcacacctgatgcatactgggatgaaggcaagagctattatatcgggtttttttttcttttttctttttcttttctttttttcttttggttggctgttctggaactcactctgcagaccagattggcctcgaactcagaaatctgcctgcctctgcctcccaagtgcttggattaaaggcgtgcgccaccacccggccttcctgtttgtttttgagacagggtctgcctatgcagcctcagttcaggccagtcctgtgctcatgatcctcctacctcagcctcagtccatgctgccacatagggaccctctcctctttgaatcaggaaaagggctccgaaaagaacactgagacctgtactgtttacaacccaccttcccaagatgcatctgtcacaaggaatgaggtttgtactgtcgatctgttttaatttacaggcagctggaaagctgcagggctcctcaagttacatacttctcggttcttcactctcccctgccaggagggtaaggggctggaaggcagtctgcccggcgcaggaagtagagatagaaggctgaagggacctcagcccctgccttggtgtggcaggcgctctctgtagcacagcccctcgtggcaaatttcgtgtggataatacctgtgacgacatttcagaatggagtcgacttctgtgtgacccaggagtctaacacacacatacatcccattaacacacacacacaccaccaccaccaccaccaccaccaccaccaccaccaccaccatcatccagtactacggaacttcctcatcacctgtaatggggaaagtgtggatctctatttctgagacaccccctcccccaatcaaagcaccactcaccagcctgcacattgccagcaaaatagatgcagtgtgtttcccggcccacgcagcgagctgcctgggttcctggacaggtctcctggaagggcgcaatgcaggagggacacatcaggccattctctgtccgattgttcaagggagctgtgaagaaagacgttgcataaagcaggctggaaggcttgctaccccaacaccctctgaaccctgggaaacagaagttagttggtagagtttgcaggtaaggaaacggaggcctggaagtagtcaagggtggtgtgccagatgtcacaggacaggcacactgttcttgaatggtacttacggggcacagagccactgttgcaaccgtcactttgacagcagtgggcgttggacaccatgtagtcactgggagtcatggtggttgatacgaagcctgagtagcagtctttgtacttcatgcaggccttgaaggtgttcactgactttcggccctctgcagagtagggggcaggagtggagggatggaagtgctgtcaatcacttcttcctcacccctccccatccctctccagatcaccatggcatctgcactcatatgtgcatacaaacacatatgcatattcacgtatacatacattaaaataaacctttgagacagggtctcactatgtagctctgacctacaactcactgtagaccaggctggccttgaactcacagagatcctcctgcctctgcctccagggtgttggcattaaaggtgtgtgctaccacacttggctaaaataagtaaaaaaaaaaattttttttttttttttttttttttttttggtttttcgagacagggtttctctgtggtgtgtggtgtgtggtggcgcacgctttgatcccaacacttgggaggcagaggcaggtggatttctgagttcgaggccagcctggtctacagagtgagttccaggacagccaaggctagacagagaaaccctgtctcaaaaaaacaaaaacaaaaacaaaaacaaaaacagaagagcattgggtgagagaaacgactcgccaggatgtcattaaagaagttggaaaaatcatttacgtggtacacctcgaagctgaggataaagcccttgagcaagagctcagcttgctgaatgggttaaaggacatcatggggcggggtggggggtgcgggagagaaggttcagtggttaagagcactggctgttcttcctagacgaccagatttaacaactgtctgtatgtaactccagttacaggggatctgacaccaatgtacataaaattattaaaaaagagaggtgaccttcaggactgcacacacacacacatacacacacacgtttaatgttaaaaaggccatgacagaagccacggccttcctttgttacagccttccgcccgtccgtctctcagctggaatcactgtcctataactaaggctctctcttaccattgaaaatgaacatccaacccaatcgtccttatttccccatcatctctgaggtctggggtgctctctttgatttaggctagcctctcccaatgtacttctgggcctccccatttccatcctctccctccttcctcctcttaccccacccctccacacctctcccttgccttctttgctctctctcatcccccttcctctcccttcccctccctcaccctccctttccctttcttccttcagccttccttcttcctccctccacctctccctctccagatctttccccttcctctctcccccttcttccccttcctcctcctcctcctcctcctcctcctcctcctcctcctcctcctcctcctctgccatctgtacctcccactttcttctgtgcttgtttttaagtcagggtcttgctgtacagctcaggctggtttcagacctgtgactatcctcttgctcatcaccctatcccggcacctctactttctctagatttatttgctccattcctcagggtctttctctcatcaggcagctcctttctgttctctcctgaccctaacaccatctcctcttcctttgcgcccaacagatttgcttaagagcacaaactgctggaggctggagaggtggctcagtggttaagagcactggctgctcttctagaggtcctgagttcaattcccagcaaccatatggtggctcacagacatctgtaacaggatctgatgccctcttctggtgtgtctgatgacagctacagtgtattcatataaatgaataaaccttaaaaaatcaaatattaaaaaaaaaaaaaaaagcaccaactgcacttgcagaagatccaaactcagctcgtctcaccggtgtctcgaaactgcctgaaacgtttgctccaagggatctttctcctccaggcccccataaacactgtgctttcttgcatagcccccccccccacacacacaaataattaattacaaatagaatttttcttaaaaacaaaaagaaaaaccagtttccctcctgctactttcttgtgtcctctcatagttacctcaccaagctcctcatattttatgtgcatgagtatatatatgtaagtgctttacaagtgtgcaataccagtggtaaccagaagagggcataaaatcccccgagattttagttacagaccattgtgagccaccatgttggtactgggaattgaactctggtccagtgaaattgactggcgctttatctcttccttcttccatttcaaccctcccctgattttcttcctacatttcactgtgactatcccccacctacagttagaggtccctcccaatcccttccgctgaagccacaccctcctacttgtgctggactcgctcactaggaccacgcatgcgtctttgccgtcttcacaggtcttcatcttcccgctgcatgtgtgccccgagcctttgcacacctcacaagttagagggcaccctgcagcaaggagagtggagaacagggtatatggtcatggttaaagaaggtcttcagaccgtgacttgggctttggagaggtgacttttggggagggaccgggctctttctagttttccatgggtgggacattgagaactgtccagggaactggctatagagtcaaggaagccgtggcgatgccagtgaagtggcgtccagggcaggaaatgactctaccacagagcctgttttacttaataattacaaggcttggggactttggatgccagggtcccctgagcaagctcagacgcagggatagtggcagaggtgctatggagcttttgcaaaatttcaggtccagctggttcttggggtgtggaacttccctcccttaggaaggtaccacggaagtctggcagctcaggcagaggtacctgactctgaggtctgggtcctacatttgaaagggagactgaggcccagaggtatcgctggcatcagttccttggtcctgacagaggaggaacctagccatttgggtcacagggacagtgaagctggcttggagtactgtgtctaagtaaaagagtaagatgaggtcctgaatccctctaggtccagagagaaaggccatctctctccttattactaattttaaagtttgcctttgatggccaagctctctcatctgctttcctagaattcagatgtcatgttctgaggcccttcctagaggacagaccatgcagggcccatcaagccttctcagaccccaggttttcacctctttattctcctaaatctcatttctcaggctatccctctcttgaggacattgcccaatgccctctgaggtactggggaagaggaccaggtccctttgtcacttaccgagacccaggagggtacagagcagtgtgaaggccagcaggaaggtcctgtgtcttctaaacagaatcatggtgtgtgaacctgtagtcccaggtcctcagcccttataagaagctggggaagggcgggtctggtcccaccttcaccctggggtgagaaatagctgagctcagaacccatgggagtcttccacagcctccgggtcagagccacggaaccagcatccacaagaaaactgaaccacttggacccagcccttttctgcacctgggcccaaatttcttccacctggacccagaagctcagttatgtatccaagcacctttttttaattgttgttgttcacaaatcttaaggtaggagtgggtcatctgattccctgagggtgcagagcaactttggagactggcatccatcctcttctcctttcccaaggaggcgcccagcgtaggttgggtcctaaccggggagcgcccagcatgtctagacccgtcctgcgggggccgggcgccttgtggcctttcctttctctttcgtgtgcctgcctcaccttcatgcttctgtattcgagctgtgtccagctccaaccccacccagggatgtgcccctgggtcttgaggggactgaacaaaagaggtcctgtcagcagacagagacgggcaaagttggagacaaatgcttacaaggcattggggaaccaaggtatttgtggacgcacgcaagtatattgtgcacaatttgtattaagatctttctccctctcttttggtgttaggtcatgagctaagagaggtctgagatctttgtcggccatctgtctgtcgatgttcgtctctgtgtgtccatccgtccgtccgtctgtttgtctgcatttggagagagaaggggaacagagcgtgtccgcaacaacaggtgccagagatcttatttcaaacaggattcaggcttcaggaaactctcagcttcagcgtttctgagcaaggctctggtttggttggtgacctcacggtccaatgaccagggcaaattacacgtaggacccaatcactgaggccgctcttgttgctaggttcccaggaagccgagtctccacgttatcaggcggctaggccggagagtggtggaacctgagagaggcggggccggagggggaatgcctgttgctaagggaacccggcgcctcgctcgcggagaggcccaaccgagcatgcgcagtgttgacgtgtgcgccggcgcgccgcggtttgaaaggcccgagccttgcgcgcttgcgcactgagtcccgtgcagggcgcgcgcgctcccccaaccttctccgggggccccccggagctgcaacccttcttcttcattccctggacggtcgggcgtccacgggcgtggacatgccggagatcagcctccgccacgtcgtgtcctgcagcagccaggactcggtgaggggctgacgtgggagcagcggggagacaggggcttcctgagggatgctgaggactttggaagcgcaaaggggggggggatcttggcgggattctgagcggggctccgggtggggtttccagaggctggacgtgcattccgagagagacgggcagttagggaagtttggggccactgtggagagtaaggaaaaagaggggcctgggaagttctaactgtgaagaaaaactcggtgaaaggaaaactcgaggcaggggtgtgtgtatgcgtgtgtgtgtgtgtgtgtgtgtgtgtgtgtggtgggactggcgtgaagtcaagtgtggagagtcggctagctcttgggagtttaaacattcaaaaataatcttatttttaaaagtcagctttatttaaagaacttccacctttccacccttgcctgcagacccattgtgccgaaaatcttctcaaggcggacacttaccggaagtggcgggcagccaaggcaggagagaagaccatctctgtggtcctacaggtgatgctgccatctcccacctcctcattcccggggcagtgagacccccgctcacattccactgccagctggctggaggttgagtcgtttcctttctgtagtagagagcttgctcggctaacttgcctggaaaatgggcttagaaatccctgtgcctccaggaatccttgggtaaccctgagtaggttgactctacttctgggcctcagtttcatcagctgggacagtgtcagccattactgttaactgtgtcccccggggccagaaggtggccaagaagagtatctccataaatcagtttcattgtaaagacgaccgacatggaagggtggatggctcaggcctgtaatcctggttgcttgggaagttgagataggataacaagttcaaggccagcctgcacaacttagaacctgtctggaaatgagaaataactaccctcacgaggactattaacataggattaggcagatagctcggctgttcagggcttgcctggagcatgtcagacccttccttggttccatccctagtacctcagagagtaaaggaatgaaacgtgtagggaagggaagttttgtttgattggttttattgttttgtttgtgagatagagtctctctacggagccctggttgtcctggaactcactctatagaccatgctggcctccaacttacagagatcctcctgcctctgctttcagagtgctgggattaaaagcatgtaccaccccaccctattctccttttaaaatttttcttaaattgaagctagtcttgaactcctgatccttgtctgtctatctggggcagaggagttccaagtgtataccatcatgcctagcatctgtcagtttgcctttccttcatttagcttacaacacacacacacacacacactcagtactgtgcaggctaggcaagaggttactaattgagccatgtccctatctttctgactttgactacttttaaatttattttaagctgggcagtggtcatggcacacctttaatcccagcagttgggaggcagaagcaggtggatctctgagtttgaggccaacctggtctacagagtgagttccgggacagccagagctacatagagaagctcccatggggagttagggagttgtttctgacaggtacagaaacttgaggaaggggctagagagatggctcagtgggtaagagtgccaaccggtctcccagaggactgagttcagttcttagcacctgtgtctgatggcatacagcaacagcctgtaagcctagccccagaggctctcatacctctggtctctggggcttcatccccctttcatacacatattaaaaacaataaaaatgtatctcagggctggagagatggctcagcggttaagagcactggctgctcttccagaggtcctgagttcaattcccagcaaccacatggtggctcacaaccatctgtaatggaatccgatgtcctcttctcgtgtgtctgaagacagctacagtgtactaatatacataaaataaatgaataaattaaaaaaatgtatcttaaagaaaaatcagtgggagaaggaaattagatgcttttaagcacctgcccactgccagttgggtgttgaccccgtgattctctgagtgtcctactgtaaggggcttggttaccactcacaaacggcagtgccaagactcagtccacactaagagtgtgggtgctttggacagcttcgtcagcctgttgtattcatatgcaccactgagctgcaatccccagccgccaccgccaccattatctcttcctcctccccggagtgcttcggtccccagtatgggtcactgcccagctcacacactgactttccttgatgttagccacatccctcagttctgagtggagaaggactttagtggggacaaagttgacctgactattcctatacttaacacactcttggcctttttcttgctgagtagttttgggttacaggatgttttgaggattatagagatgttttcagaaaagaaccataacattttctggccaatctgaggtatttatgcctttttaaatccctaatcagagactggtaatgaaaactaacattgttccccattgtaacctgccagtcagcaaccatcatgcctcacatggcttgattcattccctccttgtaaagtcctgtgacccacagactgtcattatccccattttacagataaggaaaccgaggcccagagaaattatgaaacccagcacctgtcttttaaactgtgtgagaaccagattgcttagcatttagtttggggatctggattcaaatcctagctcttactcactctgacctcaggcaaatgtttttaatttctctaaacatacccattgaaaatatagacacccaaggctggggtggtggttaaaacctggtgacataatgtctgcagaagtactctgtctacatgtgggggctgggataaagggaggggttggtgatttcattatgggatgttgattcttcaggccttcatcaggtgaccccccccgcttcccccctcccccgatacccctacatatactgtgggaaataatgttcagctctataagagtggtgagaacagaatgcagcatccagggtcctgaggaggctcagcggggagggtcctcgtggccaagcctgacagcttgagttccctcgttggactccattttaagagaattgccccacagagcttgtcctctgcttccacatgcacgctcatccccacctgtgtacatcagaataaatgtccggctggagagatgctgtgggtaagagcactggctgctccttcagagaacctgggtttgattcccagcatccacatggtggtttgtaaccttttgtaactacaaatccaagggatcaggtgtcctttctagcctctgagaggcaaaatacccatatgcataagaataaaaattttaagtcgttaagaaaacatgggagacaactagaggtcatatgcaagctacagacagtggtgtagaaggtggtacttggaggggttcacatgtcacgttttagctttgtggcaaaggtcaagagtcttagtagcatcatttgttccctcattcatttattccacaagtgtgctctaagctcttgctctacgtggacactctgtgctcccgggtctgtacagctgtgtgcagtcggtgatgaacatgctcacacctggaggatgggggtgttgctggactagaggaggcttgcctagcataccccaggccctgggtttgaaccccaacacccccaaaattggaagcagtagtgacttcggtctgcaattctggtactcaggagcagcaggatcagaaactcaaggtcatctgctacatagcaagcttgaggtcagctggggttgcatgagaccccagcatggaaagctgacaggcttggtgaagtgaccctgtattggatgatgagccatgagtgctgtggaggaagtggggcagggtgagtgagtggtgcatccagccggagatggtgttgtcaggtttttatttaaatatgaggactaatctctcttttgaaaactattcttagttgagtatggtggtgcatgcctttaatttcagcacgggggaggcagaggcaggtggatatctgtgaattcaagaccagcctagtccacagagtaaagccttaacagccaggactacatagtgagactctgtctcaaaccatgccctgtccccattataaagaagatttattttatgcatgtatatcatgacgtgcatgcctggtgctttcgaggtcagacaagggcattggatcccctgaaagtggagttaggaatgttggcatgagccatgtagatgctgggagccaaaccccagtcctctacaagagcaagcagtaagtgcccactggtgactttttaaagctctgtttgtttgtttgtttggtggtggtggtttttgagacagtctctctgcagagccctcggtggaacttgcaatgaagaccaggctggtctcgaactcaaagagatccacttgcctgcttctgagtgctagggttaaagttgtgaaactttttttaaactacatttagcatttagagtgtgtgtgtgtgtgtgtgtgtgtgtgtgtgtgtctttagaggtcagagggcactcgcaggagtcactctgcctccactctgagtttctaggccagcatctttgctcctcgagccgtctctgcagcctggagtctggtgacagaagtctggtgacagagtctggtgacagaagtctggtgaccctgaacagaagagaagttcattcccagggaagggacagaggtcagctgtgtccgtctggcacgtgagaggtcggtcaaggaggccagagagcaaggtagggccagggcttcgccagggcttctgcataggaaagataggacccttcttgttcccgttgagaataaacagagcccatcctgtcagacccctgggacaatccgattgcacttgacactggctaatttatgggcaactgagttcgaccagggttagctttggtttcttttcagtgacaacaagggagagatttctggacaccaagacagtagactcttgtgtgctcacctatttccctgtgtgctctctaaacactgttacacaacattggtattgccaaacagggctcagccctctgcttgtgtcagctccacacacctctttgtcagccgtggctactctgtgcccagctggtcacctgcttccagacagggagttaaatctttgccagcccctcctggcctggaggggatgctgggataggtccaactggaacactgctgtatcacctgagtgtcagccgtacaatggaacacatcatacctgctttgttattgctgtttgagacagggtctcattgtatgatacagcccaggctggctccaactctgatcccctgcatatcacatgtgttgggatgtcaggtatgagccactgtagttggtgtgatttttttttccatgttttttcttatttttaaagatttatgtatgcacatctgcacaccaaaagagggcactggatgccatggagctacgtttacagacagttgtgagctaccatgtgggtgctgggaattgaacttgggacctctggaagaagtctgcactggaagctagtactcttaaccattgagccatctctctgccccccccctcccctcccctgttttgagtcacggtcctactttgtaactatggccagtttagaactcactgtgtagaccaggctggtcttggatgcacacagattttcctgcctctgttttctgaatgctaggattaaaggcgtacaccaccagacctggcagatatttgttttatgtgtatgagtgtttgtctgcatgtatgtttgtacatatgcctagtcgctgaagaggccagaggagggcatcaaatcccctggaactggagttacagatggttgtgaggtgctatgtgggtgctgggcatcaagcctgggtcctctggaagaccttgtgctttcacctgctgagctatatcccagccccctcactgggggattcgaggcaggggctctaccactgagccacgcccccagccctcactgggggattctaggcaggggctctaccactgagccacgcccccagcacctcactgagggattctaggcaggggctctatcactgagccacgcccccagccctcactgggggattctaggcagaggctctaccactgagccatgtccccagcccctcactgggggattctaggcaggggctctaccactgagccacaccccagcccctcactgggggattctaggcaggagctctttcactgggccacgcccccagaccttcagtgttttgagagagacattcactgtgtgtgtagctcagactggccttgccttgtgatcctccagcttcctctgtagtgctgaggttgctggtgtgtgctgctgttctgctctttgttactagtatcattttgagacagggtcttactctgtacctcaggttggcctggaattccttgtgacctcctgcccctgcctcctacattccagtccatcactctccttacggagccttttttccagcccctctctctcttttttaagtcttgcatacaggacagctttcaactagccgactctcagagctttgcctagtttctgtgtctgatcagtatcatgtaccatgtgtgcatagaaaaattaaaaaaatacaaacaaatgtgcaagtatagaataccaggttggggctgtttgtgctgcccacttggtatgttgcctgcctagcgtacatagtattccgagtttgatccctggcattgcattaacctgggaagagaaggagacaggatccaaagtcgggacattgttggctatatagaaagtttgaggctagcctgggttacatgagacctagtggtgggggagaaatatatatatatatttatatacaagtcgaagccacaggaatggctcagtagtagtggagagagataaatcaggctaaggaatagagggaccccttgtgggagatggcagatgctactttgtttggtctgaggcattgctgtctaaatctaggtcggaaggaaggcttgagcagtgccgaggtctgaggcatgttcccgattctggggtggcagctgcgaaggccctgagcaggaggcctcagcctttactggatataagataggtgatgggagcacacaggacgttgtctgggctcagtatccagaagggtctgtgctgaagcactgtaagctatggctggctctgttctcctgggctttgcctacacagctgtggtgtaaccacctcctgcctgaggctgctcatctaatcgcagcacctgcacttacaccctgctagaagagcagatcttacatctcttccacagttagagatgagagcactcagttttgctttgttttcttttgtggtgctgaatattgaaccaggatcctgtgcaggccagacaagtgctctaccattgtcccacatcccagacccctctctctgagacagtcttgctgagttaactcctgctcttgaacttgccctgtggctcatgcagaccttgacctctgaattctcctgcttttacctaccaagtcgctggggttgcaggctcaactggctgcccttgtgactttgcggcatcttagcttcctgtggagtgaagccactgggactccccttggaaacattaactgtagtttagaaatgtcagggctggatttgaacacagaccactttgttcaagtcaaggttcctttctgccacggtgctgtagtgccctgactggtctgagagggcagaagggaacagcagatggtcccagagcagaggagggccatgggtggaagtacataggcagttaaaaatttgtttttgcagctgggcagtggtgccgaacgcctttaatcccagcacttgagaggcagaggcaggcagatttctgagttcgaggccagcctggtctgcagagtgagttccaggacagccagggctatacagagaaaccctttctgggaaaaaaaaaattgtttttgctacaaaaaaaaaaaaaaaaaaagatttatttttaagtatctgtatgaggggtaggtgtgtgttagtgcagaaaccagaagcattggttttctcaggacctagagttacaggatgttatgaacctcttctgagtatgaagagctctaacaactgagccatctctgcagctctgaccttgaacttctgatcctcttgctgttatagctaggctgttctcacttaaggaaaaactatgatgtttttattgaaccccccagactgactacatgtgtaaagaggtgggcctctagctgagagtaagcagggagcttataaagggaaccaccacacgtttggtaggtcccattggtgtagctgggatggctgttaccaagcatgacaggtatgaacttttcgtaagaataaggcacagctgtgccaccatggtatcactcaggcagaacaactggggagctgtggtctctgggaagtgctgtgcatacccgagtgtcaggctgacctcagttttagccagattgagccaggtcaggcttgagcgcacgtgtttttctcatttcactgcgtccacaccaagtgctgaaattacaggtgtgcttcattcagtatgctgattatgcgtgactgggcatcgaactcagggtttcctgcctcctggctccagctgagccagccacatctgaagccaggacatcttcgaaggctgtgatagcgcctcatccgaggaccctgttaaagagccccagactggacgcttagcattgcctgtcctcactgccccacacccacacacctttcagtgtcttcagcctcaggctggagccacaggtgagtggagtcttcataaatagctctttctttcgatgaataatgagcctgtatcagctaatggttcctgttcctgcataatagattcagtaagaagcctggagcttttctaggccagagactgacaaaacaactcctgtcaaagggagacagggacaggcaaagagtctcctgcctgcaattctaaccccctggaaggtgaagccagcaggatccccttaagttcaaggtgtgcctggttattaagtgacacctgacaaaagaaaactccaactaggcatgtgaaaatggagctgagtgtggcggctcatgcttgtaatcccagctgttagattgtgtgtagcagtggccttgtgggtcacaactgtttacagtggccaagtctcaaaaaacgaaatggggtgggggaggctggagagttggctcagcagttataagcacttgttcttatagaggaccagggtttgattcccagcacccacaccgcagctcacaactatcttaactctagttccagaggttctgacactctccccttggcctctgtggggccaggaagcagatgggacggacgtaggcatacgtccaggcaaaatgttcatatgcaaggaataaataaacttaagaaagaaaaggaactacagcctcacgtttggactggatggcagtttcaagctgtctcagagaaatgactccagccctacccggccctcctgtgatgtacaggagagtcactgctgccgcctccaattacagcagcctctgggttctatatagtgtttgtttcttatttaaatggatgctaaaattggtttcactctttttgttcacttatttttagttctaaaatctttagctgaacaacaacaaaaaaatccttaaaactttttttttttcaaatttttattagatattttcttcatttacatttcaaatgctatccggaaagtcccctatacccttcccccttaaaacttctttttttttttttaaagatttatttattattatatgtaagtacactgtagctgtcttcagacacaccagaagagggagtcagatcttgttacggatggttgtgagccaccatgtggttgctgggatttgaactctggaccttcggaagagcagtcgggtgctcttacccactatgtgtatgaatgtgtcttcatgcatgccacatgtgtgcctatgcccagggaggctagaagagcgtgccggatccccgagaaccagagttactggtggttgtgagcagcctgacgtaggtgctggaacggaattcagtccctgtgtaagagcagcctgtgcgcgtgtaacttcgagggtccgtgtctcaggtccctttagtacatttgagtgtgtcttgtgaacaaaaattcctgaaaagaagttgtgtctgcagagactggtagactgattagaatttcagtgttgtggcaagagtggaatcttgtcgcttcagaggccgattactttctcttgggctggttttagcttcaggcagcctttccttgccttactccatctgaactgactcctcgtaataagtaaaaccctctcggaagcttttaatgtagcagaacactagcctccaccaggagagctaagaatatcatcagagagcatcttgggcctataaaaagccccctggtgtacccacatctctggtatacccgtcagtgtattttttaagttgctctaatttgggggcttagtggttaagagcactggctgctctgagttcaattcccagcaaccacatggtggctcacaaccatctgtaatgggatcctttctgtctgatgccctcttctaacatgcaggcatacatgcaaatagagcagtcatatgcataaataaatcttgggaaaagaagcctcaatttatgtctttctttgttctgcgaaactataatacacttaatgaaactgcttccacattggaacatggagtttgtggtaacctaaatctgcgatcctaggccttggtcactcagaatggttcctgaataaactagttccttaaactctttaagatgagtcgggtgtggtggcacgcttttaatcccagcactcgggaggcagaggcaggtggatttctgagttcgaggccagcctggtctacagagtgagttccaggacagccagggctatagagaaaccctgtctcgaaaaaacaaaaacaaacaaacaaaaaaaaaccctctttaagatgagagctgtggttttcacatcgactctgtgtgtgggcacatgtgggcctcctcccaccgtatagatcttggtgcttgaatttaggtagtcaggcttggtggcaggttcctgtaactgctgggtcattgtacaggaccaggaataaaggaatctcaagcctagacatcaacccttgccgcagttagaaatatggcatttctgaatctcagcctggctcagggggcagcgaatgagtaccagagctgggatccccagcacccacaggaaagttgggtgggcatggtagcctgcctgcctgagatcccagtgctcctgaggcagagatggaatccctgaaaataaagtggagagccatcggggaagatgcctgacatcaacctctggcctccacatgcactcagacacagacacgtgaatacacaaacatgcgcactacacataagctctctcgcttgtgcgcacacaccccacttctgtattgttagctatcccttaaagctatcacctgttttgatttcttttttatatttgagacaaggtctcatgtggtcctgactagcctacaatttgctgtgtagctaagggtgacctgaaacttgtgattcttctgccttcacctcccaaatgctgggttatacggtgtcaccaagccccagctttgcctttcttcatctttttcagtgagactaatttagtcacaggagtcaccaacattaaaacaacgcttgctgacagctgctaagtacctactgtgtgccctgaccttcagccatgttgattatgcggtgatccttgatctaatgagggcgcacagctagtgtgtggcagagctgggttcaaatgcagggctccgtggtatgcaaaccagacacccctggcaggcagtagttagttagtccaggaacttctgtagttatgtgtcctctgtatgacaacttgcacataactgtgtctgtgactattggcacccaggagagctccgtgacaagcagtagtagactgatcagtgtgggagtgtggggtgtgtgctggggaagcaggtgtgtagtgagcatccattcagtgaattcttagtgccatgtctgggctgcctgctagaaacagatcactctactcactacttagttccggtccccactgacacaccggtgacatctctttctgccccctgttccaaagcaagcccagggcagaaccaagcactcagcatcctttctctgccccacagttggagaaggaggagcagatccacagtgtggacattggcaatgatggctcggcctttgtggaggtgctagtgggcagctcggctggaggggccacagctggtgaacaggactatgaggtaagcagggttggagaggccgacaccccgtgtctctatcactaacacccccccacctcaccacccccatctccatcacaacacccccccacacctcacccctatgtctccatcactagcccccccaacacacacaccagccgccacatgtgattacattagtgtggagagccacccaccctgcctgtctccggagggtcctgggtatgccgaggagacagagcaggcatgggggaaagctgggctgcctggattgtggtcaaataaggaacaagaggccctcacttgtaaaattcaattgcagcttaggtagtggcctgggaactggggttccacagtgtcatgactctggtaacctacaaaatacaggccctttatgattgatacttaattttttccttgagatgggtctttccttttgcccaggctggcattgactcctagactcaagcagttctgcctcagcctcccaggaagctgggactactatagtgtgctctgtcaagcctgcctcataggactggcagaggccactgtagctcagagtattagcctactgtttttccagtaaagtgatggcggtgaaaactgcactcaccatgaggcagttgacaagtctgagcctaagccagtgaagaacgaagggtgtgtgcgcgcgtgcgtgcgtgcgtgcgtgcgtgcgtgcgtgcgtgcgtgcgtgcatgtatgtgcgtgtatgtgtatgtgagagagagggcagagccaggtccagccttctgatgttagactaccccagcgttggtctttgttgcacagctgtgcctgttgaaaataaagatgttttgaatgttttgccgcctccccctcccttttgttttttttaaagatagggtctcactgagccctgattggttttgaactcacatgtagccgaagctggtcttaaatccccgatcctcccaccccatctaatctgactaagtgctgccattacagctgtgagcggccttctttcccctctgtcctgccgactggcacctcagggtactgtcaggttcaaggggtgaatgcaggccccttgtcatcttcctggccatagagagaacgttgtgtctttcgctgttaaatatgacgatgactgtagggtgggttcttagctggtgggttgccccaagaccccaagaccatcagaaaacacagatacttacattacaattcaagacaatagtaaaattacagttatgaagtacaatgaaaataattgtatggttgaggtcaccacaacatgaggggccttgggaaggctgagggccactgctgtaggtttttgttttgtttttttaagctgaggaacttcttgtttgttcctagttaatggagttgtttgtttgcttgcttgcttgcttgcttgcttgcttgctttttaaagatagggtcttgctatatagctctggctgtctgggaattccccttgtagaacaggcttgtctcgcactcacagagatcttgctgagtgctggggttgggagctcttttcctgagtgctgtcttggtctgttaggctgggttgccctcctcactcggcccttcctcatccctgcggccctggatggcagcctgtgccacatgccctcctctctgggttgagctgcttctttcctcacactggaaatgggttgcagggccttctacatgttagagaagactaccacggaggcccgtccccacctgggctccataagatctgtttttgcagaatgaggttgcttgcaccaaaaccacttttattctcaaaattatatgccaagtcagcagattttggtattactccaaaacagttctttgcccagttctgctcactcttaagtgacctgagtcacttgttagcccaggggtcagacagctcacagtcagctgcagccccagcttcaagggatcccacacttctgggttccacagccctgcaggcacctacacgcaaatgcacatgtctgcacatcgacacacatgcacataaatacagtcaaactagagacagctggaagagcaaagaaaggacaaataagcagatcagggggttggccagggttgcctcctcctccaggtcactgcttctgcgaatcagcatgcttcttcccctccatgcagatcacgcaaaggaagactggcttggaggtaattcgagctactctggaagagggagaaggggtttgcaagtcaaggccagtttagggtgctacatagagcacttgaggccagcatgagcaagttggccaaaattttaaaattaaaacaggaagaaaaatggggtgcaagttgaggctggagctccatggtggagtagtgtttgcttagaagtcttcattgtgagccaagggtgtgcctgagcagctctttacatttctgtgtgcatgagcctaaaactcctttgcattcctccttatatacatgctgcctgttcctcatgttccgtgtaaaggagggcacagatactggattggaaataacttgtagactgggaatgtggtctcagaggccacttccttggaaaagctggttggcttttctcctgccactactgcattcccttcttcctctctcttagtcccccattctctctgagtcctacccagcccatcctcagccattggctactgccatctttactgatagattaaattccagctgggagcaaggaccttcagtgtcaatagacacagattcccgatcagagcatcagaaccaccctctacagccctgcctagaatccccctgggaggggctggggatgtggctcagtggtagagctcctgcctagaatccccctgggaggggctgggggcgtggctcagtggtagagcccctgcctagaatccccctgggaggggctgggggcgttggctcagtggtagagcccctgcctagcatttgtgaaaatctagctttcatctccaatacaaaaaattgtataagagagattcactagagttgaaggtagcccagactagagtaaaggttgtctttggaaggaagcagaaaagcaatgtcacaaccagagtggtttttttctttacagtgaataaggcgagacatttggggttccctgccacttagtgacttagtgttggtaacagctcccagctgttggttgtacacacacacacacacacacacacacacacacacgctcaccatgcaaaatccagcccagtagttcacttgagattctggccctttgtaacaagtgcagaagaagccagcgagtggcttctgttctgtatgtttttgttgttgtttctttttcacaaccccagctgagcaccaagaggcatagtgttatattttttaaccatagtaaaaggcttttattttctaattttataaatttttcagtatgtcagttggaaaaagaggtgaaataaatagaataagcctaactgaacattgcttacagcatcagggaacacctgttctgtcctcaggagggaaggctagccccaggcagactcagcactgctctgacagtttgggctgggggaggtagcttgattggtagctttctttcggatttggcccagtggtcagaagtgactgcggttgctctatctcatcagtggcttcggaagcagcaagtacagcaggtggcttgagaaacaccgtggccttggtttgcctccccctcccgtcattcctatttcctcctccatttccctgcatcctctgccccaccctgggatgttttttgaggaaaggtcttatgtagaccaaacttacctgaccttgcatgcttaacctcctgccagcacccccaagtgccagtgacaggcttgcaggatcgggcctcacactggctccccaatcccctgcttcactgacctggaacctagttcttcagttaagggtggccgtgccttctgaccctccgacctccacctcctaaggaattggatttcaagtgtttggcaccatgttccagttatgcttgctgtacagggattgggctccagcttcctgtgtgctaggcaaacgccaactgagccacatcctttccccccactcccttactgtgtagctcagactggccttgaactagtgatcttgcctctgcctcctgagtattagaactataggcccgccccccacccgacccctcttctttgtgttctgattggccagagctgtatcttggtccaactgctggcagaggggtggggcttgcttgcactggtcatgattccattggtttgggcacacagctttttcatggtccagaactatgtggtcagttctgattgtcatctgttccttcatctgcgtcagtatctccatttgttttcttgagctgatcttaagcaggccaattgtgtgtttgagggtgtgagtatatgctgccttcctgagtcagagtgtgtggtttgtgggttctgggacccctatgggccacccactcgttcttacttctgtgatgggcctgccatcacctgcagccagagaatgtgcacattattttgtggactgaatttttttatgtaagaatgtagttaccagctgggcatggtggcgcagccctttaatcccagcactcgggaggcagaggcaggcgaatttctgagttcgaggccagcctggtctacagagtgagttccagagaaaccctgtctcgaaaaaccaaaaaaaaaaaaaaaaagaatgaaagaatgtagttaccaactgttactgtaagcctgggttctgatgaagagaagacagagctgttgtccccactggggtgaggaacagaaagcaggttggaatgatagaaacatctgtcacagtgcggaagggtcacgggggctgagcaggtgtgcccttccctttctactgctggtggccccaagagaggggttagtatggggtgctgaaaactgggttcatccttgcatcaggaggagctggggtgatgctcctgtagatgggcaaggttgcagcgtgcagcctctctagctcctcctgctgacggagcctggtaaggcacagctggccaccagagctgtctccacagagctgccccagcctgagggtgtgggccggaagcatcacttaattcttgatgctgctgtgctccatctttggatttgatcttatttctgacatcctgtaactcctggcctttgagctaactcaaccacgcatgtccatagggcacttgagtactgtacctctcaccaagatgcctctgtgggacagtcccttagggcatgtggtcctctgtactgcctgattttacatgaaaatttgtctggactgcatatggcctggtgacctcactatggagaactgaaatcagcatgtctggggacaaccccacatcatgcaaacagccctgttaaactcagcaaaccttaaccaagacacaaaatcaggagagcttgttgggaagaagaaggggtccccagggagttggagagggtcaaggaagggtgggtgaatatgatcaaaacaaattgcatacatgcatggatagtgtccaagaacaatgcaaaaattgaaaaaaaaaaatctgtcacggcagcagttgttaccgaagttggaggagtaaggcggagagcagtggagaagacacccagcagtcctcccctgcctccacatggtacatgtgcccacacacccatgcccatgcacccagctcctagaggtgtcatcttacactgtcttctacctaggtccttctggtcacctcctctttcatgtccccctctgagagccgaagtggctcaaatcccaaccgtgttcgcatttttggacctgacaagttagtccgggcagcagcggagaagcgctgggaccgtgttaaaattgtgtgcagccagccatacagcaaggtacatggtgtaaaagctgaggcatgcccagggcaaggggaggtctgcggaggcccatcctgagctcgggactgctcaggtcaggtcctcctgggacaggcagcttggttctctggagggggtgagctgaggcccgtcaggctctgtttggtatcactgttactgtcatactggggcccggaactcaggctcctcctacttctgcttctgcatccagacagcggaggagcaaagagcccggggtagttttgcattccagaagtggctccagacagagattgggcacacagaagtggactcgctacctgccattggcagtgagggtcaaagagcggtgcaggttgaggggtgagccctgactttggtccacagttaggggtcagtgaggtttaatgtcagcatcaccaccattgctccctgggcaccagcttcaactgagccataaagggcttccctaagtgaaggggcatgagagcctagctttgtcctattcagacaccctcacacccagccctctgttccaggactcgccatacggcctgagttttgtgaagtttcacagccctcctgacaaagatgaggcagaggctacatctcaggtaagttgtacctggtaccccccagagcctctccctgcctctccacccctgcctgccagcattcttctcacagcactgaccttgtgggaccttagaaggtgacagtgaccaagctcggccagtttcgtgtgaaagaggaggatgacagtgccaactccctgaagccaggggctctcttcttcagtcgtatcaacaagacgtcatcaggtgcctgtgggactcggggtgctagggatggcgttggtggagtgcttacttagcatagagcccaatcctgaaatctccgctcaggggagacaaggcaggagggccagctgtgtaaggtctcctctgctaagtaggaagtcttgagttcagcctaggatgtatgatgcctgagagctgagggcatggccaggtctctaggtctggggaggagggctggggcctggactactgagtcaggggtacaatctaaacttctgggtcacctctggatgtgagagtgacttgatacctgatagatgggagctaaggtgactgtggccctgccctctcaccctcagtccacttgtccttccatagcctctacgagtgacccagcaggacccagctatgcagcagctacactgcaggcctctagtgcagcctcctcagcctctccagtccccaaggttgtgggcagctcttccaaggtgaggtcatcagacgctggggcagtggagaatgaggagagccggaagccaacccatctctacctcctcagcctcaggagcctcccaaagggaagagaaaactggacttgagtctagaagacaggaaacctcccagcaaaccctcggcagggccatccaccctcaagagacccaaatgtaagcaaactggattccttgattctgtagtgaccctggcttgtgtgtcatgagggaagggctgtggtcttgaacctgccatcctaagaagggaggcggaaagcctgacttcctgtaagagctggggctcgatggggcaccaacctaatttctgttcttttctccccagtgtctgtccctagtcgtactccagctgcagctccagcctctaccccagcacagagagccgtcccagggaagccccggggagaaggcacagagcctaggggggctcgcactggaccccaagagcttggcaagatcctgcaaggggtggtggtggtgctcagtggcttccagaaccccttccgctcagagctccgggacaaggccctggaactgggggccaagtatcggccagactggaccccagacagcacacatctcatgtaggcctctgacctgccacacggttccctgccctgccctgccctaccctgcatgcccccgctagcttcatctgtccctgttctgctatcctccctccctgcttctttgtgccctccagcccccacttctttacccccttagttctcagctttctgcgtccctccctaagctccatctctgttctgtctcagctgtccatcagatcatgtctgacattcctgttttgcatctcccagctgtgcctttgccaacactcccaaatacagccaggtcctgggccttggaggccggattgtgcgtaaagagtgggtgctggactgtcaccacatgcggcgccggctgccctcccggaggtgaggccccacgacctgcctcttaggcagcgcacacacctgcctcttagcccagagcaggcaatgaagaccctggggcctgctgggtagctcaggcgatctcaaaccaacataagccgttttcaaagacgggctgggcctgcagatgggaagtcactagcctgggtgggccactggattttgtaatgacggctgctttgtgcacattgtgggttgtggctgtgcagaggtggaagggagcctcagggctgtatgccattcctcagaactgatcctttggcatcctttgggtgccaggcagagctgtgactgaagtgaggacgctggggttgagccctgtgctcacttcagcgagtgggtcagaagtgttagagcccagctttgaggagctcaggaggggcacagtgatcgcgggatgagaagcatgggtagcagccaggcagagggcatgcagggctgcagagcaagcagggatgggcagcatgagcatccatctcctgacgcagtgggcgggagaagaaccactggctgccaacagcaggagctgtggagctggagagaagccgactccgatcccagtgaggtcgtggcttgagtctgtttaataagcagggctaaccctggcacattcatgtcggggactgtgaggggaggtgggtgggttggtcagttgatctggaagtggtggggactccacatcctgcttggattccacagatccctgggagctagttatctagcttcagtattgtgatcatcctgaacagatgtgcggagggtgtctgtgggcgcctttattctctgaggtgtgtaaggatagttagctagtgtgccacagtagggacttgaatctaggacacacacacacacagtaccaagaatcaaaaatcttaggatggttgaaaatgaagagatggctcagtggttaagagcattggttgttcttttagaagaccttgactcagtttccagcactcacatagcaactctcaacc

SEQ ID NO: 11594 - DNA, 647 bp, Rattus norvegicus; identical to SEQ ID NO: 6578
  misc_feature (1)..(647): n=a, c, g or t
  ref <308>: DATABASE ACCESSION NUMBER: EMBL / AI012275
  ref <309>: DATABASE ENTRY DATE: 2000-03-03

SEQ ID NO: 11595 - DNA, 1309 bp, Homo sapiens; identical to SEQ ID NO: 6579
  ref <308>: DATABASE ACCESSION NUMBER: EMBL / AK026295
  ref <309>: DATABASE ENTRY DATE: 2000-09-29

SEQ ID NO: 11596 - DNA, 613 bp, Rattus norvegicus
  ref <308>: DATABASE ACCESSION NUMBER: EMBL / AI012595
  ref <309>: DATABASE ENTRY DATE: 2000-03-03
gaggttacacagtggccttgatctttatttttctttacctggaattctacaaattctgaaattgatcaatagatttatcttgtttaataaacagcaccagtcgtgcccactgatacaattcaaacctgactttctcagttctcaagtttattatgaaaacactgcggtgacttgtgcagtacatcatcttacaggagggagacagttctgttcaaaacaactcaccaggttttctgacagtaacaaagaacaacgcggggccgagatttgagaagggagaaactgagtgcagagaaatcatacaattaaattaatagtatccctgaaagaacacaacaagaggggaggccttggtactcatttaaaaatgttcattaagctccaatgattgtttgctatcctcatctacagtcatgctgagtaagctacagctaagtggaagtcaactggactcacaggtgttaatgttacatcctagatctgcagtctctcaagaaagcaaaagtaactacaaatagcgctatgccagaaactggattcttgaccaacaatgtcgcgtcagcatgcaatgaactggttcattctaaagtggtcacggctgttgatgacaaga

SEQ ID NO: 11597 - protein, 309 aa, Rattus norvegicus; identical to SEQ ID NO: 9447
  ref <308>: DATABASE ACCESSION NUMBER: SWISS-Prot / P13353
  ref <309>: DATABASE ENTRY DATE: 2001-10-16

SEQ ID NO: 11598 - DNA, 1787 bp, Homo sapiens
  ref <308>: DATABASE ACCESSION NUMBER: EMBL / J03804
  ref <309>: DATABASE ENTRY DATE: 2000-03-04
gagagctcggctctcggaggaggaggcgcacggccagcggcagtactgcggtgagagccagcggccagcgccacgctcaacagccgccagaagtacacgaggaaccggcggcggcgtgtgcgtgtaagccggcggcggcgcgggaggagccggagcggcagccggctggggcgggtggcatcatggacgagaaggtgttcaccaaggagctggaccagtggatcgagcagctgaacgagtgcaagcagctgtccgagtcccaggtcaagagcctctgcgagaaggctaaagaaatcctgacaaaagaatccaacgtgcaagaggttcgatgtccagttactgtctgtggagatgtgcatgggcaatttcatgatctcatggaactgtttagaattggtggcaaatcaccagatacaaattacttgtttatgggagattatgttgacagaggatattattcagttgaaacagttacactgcttgtagctcttaaggttcgttaccgtgaacgcatcaccattcttcgagggaatcatgagagcagacagatcacacaagtttatggtttctatgatgaatgtttaagaaaatatggaaatgcaaatgtttggaaatattttacagatctttttgactatcttcctctcactgccttggtggatgggcagatcttctgtctacatggtggtctctcgccatctatagatacactggatcatatcagagcacttgatcgcctacaagaagttccccatgagggtccaatgtgtgacttgctgtggtcagatccagatgaccgtggtggttggggtatatctcctcgaggagctggttacacctttgggcaagatatttctgagacatttaatcatgccaatggcctcacgttggtgtctagagctcaccagctagtgatggagggatataactggtgccatgaccggaatgtagtaacgattttcagtgctccaaactattgttatcgttgtggtaaccaagctgcaatcatggaacttgacgatactctaaaatactctttcttgcagtttgacccagcacctcgtagaggcgagccacatgttactcgtcgtaccccagactacttcctgtaatgaaattttaaacttgtacagtattgccatgaaccatatatcgacctaatggaaatgggaagagcaacagtaactccaaagtgtcagaaaatagttaacattcaaaaaacttgttttcacatggaccaaaagatgtgccatataaaaatacaaagcctcttgtcatcaacagccgtgaccactttagaatgaaccagttcattgcatgctgaagcgacattgttggtcaagaaaccagtttctggcatagcgctatttgtagttacttttgtttctctgagagactgcagataataagatgtaaacattaacacctcgtgaatacaatttaacttccatttagctatagctttactcagcatgactgtagataaggatagcagcaaacaatcattggagcttaatgaacatttttaaaaataattaccaaggcctcccttctacttgtgagttttgaaattgttctttttattttcagggataccgtttaatttaattatatgatttgtctgcactcagtttattccctactcaaatctcagccccatgttgttctttgttattgtcagaacctggtgagttgttttgaacagaactgttttttccccttcctgtaagacgatgtgactgcacaagagcactgcagtgtttttcataataaacttgtgaactaac

SEQ ID NO: 11599 - protein, 309 aa, Homo sapiens; identical to SEQ ID NO: 9449
  ref <308>: DATABASE ACCESSION NUMBER: SWISS-Prot / P05323
  ref <309>: DATABASE ENTRY DATE: 2000-05-30

SEQ ID NO: 11600 - DNA, 1155 bp, Rattus norvegicus
  ref <308>: DATABASE ACCESSION NUMBER: EMBL / AF361476
  ref <309>: DATABASE ENTRY DATE: 2001-04-09
cacgagggttggcagctgcctggcggtcctgaggagcggctagggcagcggagggaaagaaaagggaacggctcggaatttgctccagcggctgctgcaagacctcggcgccaacctcgcaccagcgagcgccccacagcccttcggctgcccctctatgtgctgctgagccggtcctggacccgacgagcccgccttcggtgttccgagccgaaatcgcaaagacggaaggactggaaatggcagaccatatgatggccatgaaccacggtcgcttccccgacggcaccaacgggctgcaccaccaccctgcccaccgcatgggcatggggcagttcccgagcccgcatcaccaccagcagcagcagccccagcacgccttcaacgccctcatgggcgagcacatacactacggcgcgggcaacatgaatgccacgagcggcatcaggcacgccatggggccggggactgtgaacggggggcaccccccgagcgctctggccccggccgccaggtttaacaactcccagttcatgggtccccctgtggccagccagggaggctccctgccggccagcatgcagctgcagaagctcaacaaccagtatttcaaccatcacccctacccccacaaccactacatgccggatttgcaccccgctgcaggccaccagatgaacgggacaaaccagcacttccgagattgcaaccccaagcacagtggaggcagcagcacccctggcggcgcgggtggcagcggcacccccggcggctccggcggcacctcgggcggcgcgggtggcagcagcgcgggcggcagtggcggtggcagcaccatgcccgcctcggtggctcacgtccccgcggcaatgctgccgcccaatgtcatagacactgatttcatcgacgaggaagtgcttatgtccttagtgatagagatgggtttggaccgcatcaaggagctgccagaactctggctgggccaaaatgagtttgattttatgacggacttcgtgtgcaaacagcagcccagcagagtcagctgttgactcggttaacctcgcggctgaaagaaatcaccctccctgcccccacccccaacttcttcggtgtgaattaaaaaaaatcaaaaacaaacaaaaaaaaaacaaaaaa

SEQ ID NO: 11601 - protein, 269 aa, Rattus norvegicus; identical to SEQ ID NO: 6276
  ref <308>: DATABASE ACCESSION NUMBER: SWISS-Prot / AAK30621
  ref <309>: DATABASE ENTRY DATE: 2002-10-01

SEQ ID NO: 11602 - DNA, 899 bp, Homo sapiens; identical to SEQ ID NO: 6277
  ref <308>: DATABASE ACCESSION NUMBER: EMBL / U65093
  ref <309>: DATABASE ENTRY DATE: 2000-03-04

SEQ ID NO: 11603 - protein, 270 aa, Homo sapiens; identical to SEQ ID NO: 6278
  ref <308>: DATABASE ACCESSION NUMBER: SWISS-Prot / Q99967
  ref <309>: DATABASE ENTRY DATE: 2002-06-15

SEQ ID NO: 11604 - DNA, 1953 bp, Rattus norvegicus
  ref <308>: DATABASE ACCESSION NUMBER: EMBL / BC003217
  ref <309>: DATABASE ENTRY DATE: 2002-09-22
gcgagggtatctggggtcctgcttagaatttggaccgcttgacctgtgagtccctgtggctcttcggccattctgatgtgaacatgtcaggggctgagcagaaagtagcatattctcttgtctcttcaggttccctgatgtcagtgaaccctggcatggcccgatggatcaaagagctcttttgtcacaatgagcgtgtagtcctaactggagactggaaacatgggttcttatcgttgacagcagtgggagccaccaatgtgggctctatccgtatccactttaactgagtgagcaaagcccacaggctaaacctcttgggtccaaccacttcatttgctgtacagccttacctttgggcttataaattttgtagtgcaggagggatgatctagctctgccaaggctctgcagacacccataccagctcagcctccctctccctgttgcccaatctgtggccattcacctgcctgaaccaatcccacatcctaacacacggcttctgccaggagccctgatcagaggcaaggatggagcctgcaggagggtagagttggcttgggtgagaaaatctggtacccactctgcctttttaggtgttaatggctgctgctggtgctagcctttcagcatttatgtctgacccccacccctccttgtcaaagtcacagcaagtactgggagttgattacttaggcctttgccctgagaggcttgtctctgccacctgggctgggcagggttgaggacaggctcaaccttcttgttcctaggacttgcacacaaacagccccaggtacagcaaggtactacaatgacctgagctttgtaacaaggagggcattcccatgcacaagggtgagcccctgggcgagttcaacctgagctccacatcgtgctcatcttcgaggcacccaaggacttcaacttgaggctgaaggcagaacagaagatctgctttgcaggagcactgggctccctctagtcctctcggttgtggctgccaaaggatctttccacacaggagcatgagggtctttagcggagccccaggatgtctggatgtctaggtgagggacactgcagggctgaccttataagacctgaatgatgtgttcctgcctgtccatgggtgcagaggagaggttctgggtctctcaggacctaggccccttttcagagtatgggtgggtgtgatttgaccccaaagtcactttcaggggtgttttaaatttttgtacaagccagagcctcccacccctaactcctggctgtgtactaccacaccctctagctgcgccccccacccgtcacagggctctctcactgtgcacagggtgaggtgcctgctgggcagagactgtggatccactgtcttcctagagcaggccacatggccttcataactgctttctgctcccaaatttcacccgtctgcatgctgaaaaagtaaaatcatttatataatgctggatgtgttgtcctgggctctgtcagtgtcttctgaggacaatgactaatgatgtatgtagacctttgtaggctctaagaagctggctgaatccttttgctggtaggcaagaccaattaattactggcttgtctggtagagtctggagtgaaagggcaggttgaggccttgccctgcagaagtaggggacatgctgctattggtctagggactgtgttggaagcagagggtatggaggtcagtacctagaaaacaggtatgcaggccatggggaacccagtggtagggacaagaccagagttcatgtcgatcttgggaatgccatgaatttcccctgcaggagaaatcatttaacttttcaaccctatcagtagtaccgtattttgtatgaaaagtaggagacttctgaacagtaattcatttaattgcaagacattttgaaattaaaaaacaaaacaaaacaaaaactaaaaaaaaaa

SEQ ID NO: 11605 - protein, 68 aa, Rattus norvegicus
  ref <308>: DATABASE ACCESSION NUMBER: SWISS-Prot / AAH03217
  ref <309>: DATABASE ENTRY DATE: 2002-06-01
MSGAEQKVAYSLVSSGSLMSVNPGMARWIKELFCHNERVVLTGDWKHGFLSLTAVGATNVGSIRIHFN

SEQ ID NO: 11606 - DNA, 502 bp, Rattus norvegicus
  misc_feature (1)..(502): n=a, c, g or t
  ref <308>: DATABASE ACCESSION NUMBER: EMBL / AI070026
  ref <309>: DATABASE ENTRY DATE: 2000-03-03
cggccgccccaagtcgagccccgcgggcagtcgcggcagcccggtgcccgcccgcgccctgcagccgcctgagtacccctggatgaaggagaagaaggcggccaagaaaaccgcgctgccgcccgccgccgcctccacgggccctgcctgcctcggccacaaagaatccctggaaatagccgatggcagcggtgggggatccaggcgtctgagaactgcttacaccaacactcagcttttggaactggaaaaggaatttcatttcaacaagtacctctgcagaccccggagggtggaaatcgccgcgctgctggatttgaccgagagacaagtgaaagtgtggtttcagaaccggaggatgaagcataagaggcaaacccagtgcaaggagaaccaaaacagcgaagtgaaatttaaaaacctgnaggattcggacaaagtggaggaagacgaggaagagaagtcactctttgagcaagccctcagtgtctccggggccctt

SEQ ID NO: 11607 - protein, 372 aa, Rattus norvegicus; identical to SEQ ID NO: 4088
  ref <308>: DATABASE ACCESSION NUMBER: SWISS-Prot / P31246
  ref <309>: DATABASE ENTRY DATE: 2002-06-15

SEQ ID NO: 11608 - DNA, 1131 bp, Homo sapiens; identical to SEQ ID NO: 4089
  ref <308>: DATABASE ACCESSION NUMBER: Refseq / NM_006735
  ref <309>: DATABASE ENTRY DATE: 2002-11-03

SEQ ID NO: 11609 - protein, 376 aa, Homo sapiens; identical to SEQ ID NO: 4090
  ref <308>: DATABASE ACCESSION NUMBER: SWISS-Prot / O43364
  ref <309>: DATABASE ENTRY DATE: 2002-06-15

SEQ ID NO: 11610 - DNA, 448 bp, Rattus norvegicus; identical to SEQ ID NO: 6715
  ref <308>: DATABASE ACCESSION NUMBER: EMBL / AI070967
  ref <309>: DATABASE ENTRY DATE: 2000-03-03

SEQ ID NO: 11611 - protein, 247 aa, Rattus norvegicus; identical to SEQ ID NO: 6716
  ref <308>: DATABASE ACCESSION NUMBER: SWISS-Prot / P49911
  ref <309>: DATABASE ENTRY DATE: 2002-06-15

SEQ ID NO: 11612 - DNA, 916 bp, Homo sapiens; identical to SEQ ID NO: 6717
  ref <308>: DATABASE ACCESSION NUMBER: EMBL / X75090
  ref <309>: DATABASE ENTRY DATE: 1994-07-19

SEQ ID NO: 11613 - protein, 249 aa, Homo sapiens; identical to SEQ ID NO: 6718
  ref <308>: DATABASE ACCESSION NUMBER: SWISS-Prot / P39687
  ref <309>: DATABASE ENTRY DATE: 2002-06-15

SEQ ID NO: 11614 - DNA, 465 bp, Rattus norvegicus; identical to SEQ ID NO: 6723
  ref <308>: DATABASE ACCESSION NUMBER: EMBL / AI071299
  ref <309>: DATABASE ENTRY DATE: 2000-03-03

SEQ ID NO: 11615 - protein, 480 aa, Rattus norvegicus; identical to SEQ ID NO: 6724
  ref <308>: DATABASE ACCESSION NUMBER: SWISS-Prot / O08876
  ref <309>: DATABASE ENTRY DATE: 2002-06-15

SEQ ID NO: 11616 - DNA, 3228 bp, Homo sapiens; identical to SEQ ID NO: 6725
  ref <308>: DATABASE ACCESSION NUMBER: EMBL / S81439
  ref <309>: DATABASE ENTRY DATE: 2000-06-10

SEQ ID NO: 11617 - protein, 480 aa, Homo sapiens; identical to SEQ ID NO: 6726
  ref <308>: DATABASE ACCESSION NUMBER: SWISS-Prot / Q13118
  ref <309>: DATABASE ENTRY DATE: 2002-06-15

SEQ ID NO: 11618 - DNA, 356 bp, Rattus norvegicus; identical to SEQ ID NO: 6736
  ref <308>: DATABASE ACCESSION NUMBER: EMBL / AI073204
  ref <309>: DATABASE ENTRY DATE: 2000-03-03

SEQ ID NO: 11619 - protein, 255 aa, Rattus norvegicus; identical to SEQ ID NO: 1950
  ref <308>: DATABASE ACCESSION NUMBER: SWISS-Prot / P42655
  ref <309>: DATABASE ENTRY DATE: 2002-06-15

SEQ ID NO: 11620 - DNA, 1723 bp, Homo sapiens; identical to SEQ ID NO: 6454
  ref <308>: DATABASE ACCESSION NUMBER: EMBL / BC000179
  ref <309>: DATABASE ENTRY DATE: 2001-07-13

SEQ ID NO: 11621 - protein, 255 aa, Homo sapiens; identical to SEQ ID NO: 1950

SEQ ID NO: 11622 - DNA, 583 bp, Rattus norvegicus; identical to SEQ ID NO: 6752
  ref <308>: DATABASE ACCESSION NUMBER: EMBL / AI102031
  ref <309>: DATABASE ENTRY DATE: 2000-03-03

SEQ ID NO: 11623 - protein, 588 aa, Rattus norvegicus; identical to SEQ ID NO: 6753
  ref <308>: DATABASE ACCESSION NUMBER: SWISS-Prot / O08839
  ref <309>: DATABASE ENTRY DATE: 2001-10-16

SEQ ID NO: 11624 - DNA, 1921 bp, Homo sapiens; identical to SEQ ID NO: 6754
  ref <308>: DATABASE ACCESSION NUMBER: EMBL / U68485
  ref <309>: DATABASE ENTRY DATE: 2000-03-04

SEQ ID NO: 11625 - protein, 593 aa, Homo sapiens; identical to SEQ ID NO: 6755
  ref <308>: DATABASE ACCESSION NUMBER: SWISS-Prot / Q99688
  ref <309>: DATABASE ENTRY DATE: 2001-10-16

SEQ ID NO: 11626 - DNA, 405 bp, Rattus norvegicus; identical to SEQ ID NO: 6779
  ref <308>: DATABASE ACCESSION NUMBER: EMBL / AI102562
  ref <309>: DATABASE ENTRY DATE: 2000-03-03

SEQ ID NO: 11627 - protein, 61 aa, Rattus norvegicus; identical to SEQ ID NO: 6780
  ref <308>: DATABASE ACCESSION NUMBER: SWISS-Prot / P02803
  ref <309>: DATABASE ENTRY DATE: 2002-06-15

SEQ ID NO: 11628 - DNA, 625 bp, Homo sapiens; identical to SEQ ID NO: 6781
  ref <308>: DATABASE ACCESSION NUMBER: EMBL / BG260238
  ref <309>: DATABASE ENTRY DATE: 2001-03-09

SEQ ID NO: 11629 - DNA, 476 bp, Rattus norvegicus
  ref <308>: DATABASE ACCESSION NUMBER: EMBL / AI104544
  ref <309>: DATABASE ENTRY DATE: 2000-03-03
aaaatatggcataatggattaaacagctccacgtggtgttttgaaattcatcccaaccgtaggctgagtgacctggaggttggagagactgccaaagtccaaaagcttcagcatttccttggtgtcaggatctacctcaatgatctcctgatctagggctgagacctcaggaacataattatctctcctctccctttcttcttcctgcaacttgatggaaatgccttttacaggacctctctgaatccgcttcatcagatgcgtgacatagccggctatcttgttccgaaggtttttgctggggatgatggcgatctccttgcacacgcgcttgttggtgtgaaagtcattacccaggcgcgtgtagtacttctcgatgatgacccgggccgccttcttcacagtcttggtgcaaacgcggccctgaaggtggagagggcaaagtgacttggggagcccggaccttccatggagga

SEQ ID NO: 11630 - protein, 134 aa, Rattus norvegicus
  ref <308>: DATABASE ACCESSION NUMBER: SWISS-Prot / P04644
  ref <309>: DATABASE ENTRY DATE: 1994-06-01
GRVRTKTVKKAARVIIEKYYTRLGNDFHTNKRVCKEIAIIPSKNLRNKIAGYVTHLMKRIQRGPVRGISIKLQEEERERRDNYVPEVSALDQEIIEVDPDTKEMLKLLDFGSLSNLQVTQPTVGMNFKTPRGAV

SEQ ID NO: 11631 - DNA, 692 bp, Homo sapiens
  ref <308>: DATABASE ACCESSION NUMBER: EMBL / BG498827
  ref <309>: DATABASE ENTRY DATE: 2001-03-30
gtcctcttttaccaaggacccgccaacatgggccgcgttcgcaccaaaaccgtgaagaaggcggcccgggtcatcatagaaaagtactacacgcgcctgggcaacgacttccacacgaacaagcgcgtgtgcgaggagatcgccattatccccagcaaaaagctccgcaacaagatagcaggttatgtcacgcatctgatgaagcgaattcagagaggcccagtaagaggtatctccatcaagctgcaggaggaggagagagaaaggagagacaattatgttcctgaggtctcagccttggatcaggagattattgaagtagatcctgacactaaggaaatgctgaagcttttggacttcggcagtctgtccaaccttcaggtcactcagcctacagttgggatgaatttcaaaaacgcctcggggacctgtttgaattttttccctgtagtggctgtattattcttccattaaactctggggaccacgcacaaacgaggacgaccaacaacgcagcaaacacttgttgggagcggcattgtggagccctgagaaaagctttttaggaaccctctcgtgtaggggcgcgggggcccacgcaagtgatagtagaaacagtggcaataagcgtggtcacacagagaatcatcgtggataacaaagtgcgtgggagtattcccccaataattatg

SEQ ID NO: 11632 - protein, 134 aa, Homo sapiens
  ref <308>: DATABASE ACCESSION NUMBER: SWISS-Prot / R4HU17
  ref <309>: DATABASE ENTRY DATE: 2002-06-15
GRVRTKTVKKAARVIIEKYYTRLGNDFHTNKRVCEEIAIIPSKKLRNKIAGYVTHLMKRIQRGPVRGISIKLQEEERERRDNYVPEVSALDQEIIEVDPDTKEMLKLLDFGSLSNLQVTQPTVGMNFKTPRGPV

SEQ ID NO: 11633 - DNA, 449 bp, Rattus norvegicus; identical to SEQ ID NO: 6868
  ref <308>: DATABASE ACCESSION NUMBER: EMBL / AI136891
  ref <309>: DATABASE ENTRY DATE: 2000-03-03

SEQ ID NO: 11634 - protein, 338 aa, Rattus norvegicus; identical to SEQ ID NO: 6869
  ref <308>: DATABASE ACCESSION NUMBER: SWISS-Prot / P17431
  ref <309>: DATABASE ENTRY DATE: 2002-06-15

SEQ ID NO: 11635 - DNA, 290 bp, Homo sapiens; identical to SEQ ID NO: 6870
  ref <308>: DATABASE ACCESSION NUMBER: EMBL / AI902540
  ref <309>: DATABASE ENTRY DATE: 2001-08-31

SEQ ID NO: 11636 - protein, 1230 aa, Homo sapiens [sequence omitted]

SEQ ID NO: 11637 - DNA, 2441 bp, Rattus norvegicus
  ref <308>: DATABASE ACCESSION NUMBER: Refseq / NM_031576
  ref <309>: DATABASE ENTRY DATE: 2002-11-05
gatctggtcggtaccggagagcgcaggttgtatcaccaacatgggggactctcacgaagacaccagtgccaccatgcctgaggccgtggctgaagaagtgtctctattcagcacgacggacatggttctgttttctctcatcgtgggggtcctgacctactggttcatctttagaaagaagaaagaagagataccggagttcagcaagatccaaacaacggccccacccgtcaaagagagcagcttcgtggaaaagatgaagaaaacgggaaggaacattatcgtattctatggctcccagacgggaaccgctgaggagtttgccaaccggctgtccaaggatgcccaccgctacgggatgcggggcatgtccgcagaccctgaagagtatgacttggccgacctgagcagcctgcctgagatcgacaagtccctggtagtcttctgcatggccacatacggagagggcgaccccacggacaatgcgcaggacttctatgactggctgcaggagactgacgtggacctcactggggtcaagtttgctgtatttggtcttgggaacaagacctatgagcacttcaatgccatgggcaagtatgtggaccagcggctggagcagcttggcgcccagcgcatctttgagttgggccttggtgatgatgacgggaacttggaagaggatttcatcacgtggagggagcagttctggccagctgtgtgcgagttctttggggtagaagccactggggaggagtcgagcattcgccagtatgagctcgtggtccacgaagacatggacgtagccaaggtgtacacgggtgagatgggccgtctgaagagctacgagaaccagaaaccccccttcgatgctaagaatccattcctggctgctgtcaccgccaaccggaagctgaaccaaggcactgagcggcatctaatgcacctggagttggacatctcagactccaagatcaggtatgaatctggagatcacgtggctgtgtacccagccaatgactcagccctggtcaaccagattggggagatcctgggagctgacctggatgtcatcatgtctctaaacaatctcgatgaggagtcaaacaagaagcatccgttcccctgccccaccacctaccgcacggccctcacctactacctggacatcactaacccgccacgcaccaatgtgctctacgaactggcacagtacgcctcagagccctcggagcaggagcacctgcacaagatggcgtcatcctcaggcgagggcaaggagctgtacctgagctgggtggtggaagcccggaggcacatcctagccatcctccaagactacccatcactgcggccacccatcgaccacctgtgtgagctgctgccacgcctgcaggcccgatactactccattgcctcatcctccaaggtccaccccaactccgtgcacatctgtgccgtggccgtggagtacgaagcgaagtctggccgagtgaacaagggggtggccactagctggcttcgggccaaggaaccagcaggcgagaatggcggccgcgccctggtacccatgttcgtgcgcaaatctcagttccgcttgcctttcaagtccaccacacctgtcatcatggtgggccccggcactgggattgcccctttcatgggcttcatccaggaacgagcttggcttcgagagcaaggcaaggaggtgggagagacgctgctatactatggctgccggcgctcggatgaggactatctgtaccgtgaagagctagcccgcttccacaaggacggtgccctcacgcagcttaatgtggccttttcccgggagcaggcccacaaggtctatgtccagcaccttctgaagagagacagggaacacctgtggaagctgatccacgagggcggtgcccacatctatgtgtgcggggatgctcgaaatatggccaaagatgtgcaaaacacattctatgacattgtggctgagttcgggcccatggagcacacccaggctgtggactatgttaagaagctgatgaccaagggccgctactcactagatgtgtggagctaggagctaccagcctcccacccctcgctccctgtaatcacctaacttctgccgacctcacctctggtggttcctgcctggcctggacacagggaggcccagggactgactcctcctggcctgagtggtgccctcctgggcccctaggcagagcccggtccattgtatcaggcagcccagccccagggcacatggcaagagggactggacccacctttgggtgatgggtgccttaggtcctctgcagctgtacagaaggggctcttctctccacagagctggggtgcagcccccacacgtgattttgaatgagtgtaaataattttaaataacctggcccttggaataaagttgttttcagtaaatt

SEQ ID NO: 11638 - protein, 677 aa, Rattus norvegicus
  ref <308>: DATABASE ACCESSION NUMBER: SWISS-Prot / P00388
  ref <309>: DATABASE ENTRY DATE: 2002-06-15
GDSHEDTSATMPEAVAEEVSLFSTTDMVLFSLIVGVLTYWFIFRKKKEEIPEFSKIQTTAPPVKESSFVEKMKKTGRNIIVFYGSQTGTAEEFANRLSKDAHRYGMRGMSADPEEYDLADLSSLPEIDKSLVVFCMATYGEGDPTDNAQDFYDWLQETDVDLTGVKFAVFGLGNKTYEHFNAMGKYVDQRLEQLGAQRIFELGLGDDDGNLEEDFITWREQFWPAVCEFFGVEATGEESSIRQYELVVHEDMDVAKVYTGEMGRLKSYENQKPPFDAKNPFLAAVTANRKLNQGTERHLMHLELDISDSKIRYESGDHVAVYPANDSALVNQIGEILGADLDVIMSLNNLDEESNKKHPFPCPTTYRTALTYYLDITNPPRTNVLYELAQYASEPSEQEHLHKMASSSGEGKELYLSWVVEARRHILAILQDYPSLRPPIDHLCELLPRLQARYYSIASSSKVHPNSVHICAVAVEYEAKSGRVNKGVATSWLRAKEPAGENGGRALVPMFVRKSQFRLPFKSTTPVIMVGPGTGIAPFMGFIQERAWLREQGKEVGETLLYYGCRRSDEDYLYREELARFHKDGALTQLNVAFSREQAHKVYVQHLLKRDREHLWKLIHEGGAHIYVCGDARNMAKDVQNTFYDIVAEFGPMEHTQAVDYVKKLMTKGRYSLDVWS

SEQ ID NO: 11639 - DNA, 458 bp, Homo sapiens
  ref <308>: DATABASE ACCESSION NUMBER: EMBL / BF001401
  ref <309>: DATABASE ENTRY DATE: 2000-10-13
ttttgtttgaccaaattattttactgaactgacaagtgggtttttgatttgtcagttgcttggctgaactgatcaagtcgatagttgcttgacaaactcaccaactttagaatggccaatcgtctaaacaagtgtcagagctgattgaaataaaccaagcattgttgggctgaattatggagagacccgaggagtgactcagcctaaagcgttgacccagttgtgagcagctcacaggccctgcaggaggagcaagccaccagggcgttgtcgatctccggcaggctgctcaggtcggccaggtcatactcctcagggtccgctgacatgcctcgcatcccgtagcggtgggcgtccttggacaggcggttggcaaactcctctgcagtccccgtctgggagccgtagaacacgatgatgttcctccccgttttcttcatcttttccacaaagctgct

SEQ ID NO: 11640 - protein, 262 aa, Homo sapiens
  ref <308>: DATABASE ACCESSION NUMBER: SWISS-Prot / Q13571
  ref <309>: DATABASE ENTRY DATE: 2001-10-16
MDPRLSTVRQTCCCFNVRIATTALAIYHVIMSVLLFIEHSVEVAHGKASCKLSQMGYLRIADLISSFLLITMLFIISLSLLIGVVKNREKYLLPFLSLQIMDYLLCLLTLLGSYIELPAYLKLASRSRASSSKFPLMTLQLLDFCLSILTLCSSYMEVPTYLNFKSMNHMNYLPSQEDMPHNQFIKMMIIFSIAFITVLIFKVYMFKCVWRCYRLIKCMNSVEEKRNSKMLQKVVLPSYEEALSLPSKTPEGGPAPPPYSEV

SEQ ID NO: 11641 - DNA, 737 bp, Rattus norvegicus
  ref <308>: DATABASE ACCESSION NUMBER: EMBL / U06179
  ref <309>: DATABASE ENTRY DATE: 2000-03-04
gctagagcagataccacgatggcgccctttgcatctctggcctctggcatcctcttgttgctatcattgatagcttccagtaaagcctgtagctgtgccccaacccacccacagacagctttctgcaactcggacctggttataagggctaaattcatgggttccccagaaatcatcgagaccaccttataccagcgttatgagatcaagatgactaagatgctcaaaggattcgacgctgtgggaaatgccacaggtttccggttcgcctacaccccagccatggagagcctctgtggatatgtccacaagtcccagaaccgcagcgaggagtttctcatcgcgggccgtttaaggaacggaaatttgcacatcactgcctgcagcttcctggttccctggcataatctgagccctgctcagcaaaaggccttcgtaaagacctatagtgctggctgtggggtgtgcacagtgtttccctgttcagccatcccttgcaaactggagagtgacagtcattgcttgtggacagatcagatcctcatgggctctgagaagggctaccagagcgatcactttgcctgcctgccacggaatccagatttgtgcacctggcaataccttggggtctcgatgacccgaagccttcccctggcaaaagctgaagcctgaacactgtttacctttcctccatctttctttctcttaaatggtgaaataaagaactatcacacagc

SEQ ID NO: 11642 - protein, 217 aa, Rattus norvegicus
  ref <308>: DATABASE ACCESSION NUMBER: SWISS-Prot / P30120
  ref <309>: DATABASE ENTRY DATE: 2002-06-15
MAPFASLASGILLLLSLIASSKACSCAPTHPQTAFCNSDLVIRAKFMGSPEIIETTLYQRYEIKMTKMLKGFDAVGNATGFRFAYTPAMESLCGYVHKSQNRSEEFLIAGRLRNGNLHITACSFLVPWHNLSPAQQKAFVKTYSAGCGVCTVFPCSAIPCKLESDSHCLWTDQILMGSEKGYQSDHFACLPRNPDLCTWQYLGVSMTRSLPLAKAEA

SEQ ID NO: 11643 - DNA, 688 bp, Rattus norvegicus
  ref <308>: DATABASE ACCESSION NUMBER: EMBL / AI170379
  ref <309>: DATABASE ENTRY DATE: 2000-03-03
ggttgcatcgagtgcctcacagacactataaaaccaaaacggaatagaaacatctcggtggttaacagaacacaggaaagccaggtacagagtataatttgtcaaacacaatattgctgctccccgccccacccccacttcctccaatttataaaaagaagaaagaagaaaagaaaaagccatttggataaagagcaacacaaaatcaaaattggcagctcactgaatgcttaaaattcaggaaatcgtttttgtaactgaaactggatacattcaccatttctaacacttaggctatttttttttcaatacatagtttaagtccattcttcaggtgaaaaaaaaacatgtctttaaacacaacaatcaacactgttttggtgttccttgtttgtgtgtgtgtgtgtgtgtgtgtgtgtgtgtgtgtgtgtgtggacactgatctatatactgcttctatgccattgcctagggtgggcagcatgcatgggtaagaggaagggacatgcactatgtcatccaagtgccgcccagcctctgccacagatgacagaccctgcatccctcatttctagatgagaaagccaaggctgtcaagtcataggctctggagggaagtgcgagtataaacactgcagtgtggaaatccttcaagaaggtttttaacatctacagaagctaaacattt

SEQ ID NO: 11644 - DNA, 7525 bp, Homo sapiens
  ref <308>: DATABASE ACCESSION NUMBER: EMBL / AJ303079
  ref <309>: DATABASE ENTRY DATE: 2001-05-14
cccgggcgagcccgccgtgcgcacagctctgcccgccgcccctggagcggatccccagccgtccctgggcgttctcccgggttctagcaaagccccccggggtgcccatcagtttccttgggtgactacagcgtgtgttttttctttcctctttcccctgcctgtgtgcccttctccaggatggcagaggcggaattgcacaaggaaaggctgcaagccatagcagaaaaaagaaagaggcagactgaaatagaaggcaagcgacaacagcttgacgagcagatacttctgctgcagcattccaagtccaaagtgcttcgggagaaatggctgctgcagggcatacccgctggaactgccgaagaggaggaagccaggaggcggcagtctgaagaggatgagttcagagtcaagcaacttgaagataacattcagaggctggagcaagaaatacaaacgctagaaagtgaagagtcccagatatctgccaaagagcaaatcatcctagagaaactgaaggaaacagaaaaatccttcaaggactttcagaagggtttctccagtacggatggagatgcagtaaattacatttcctcccagcttcccgacctgccaatcctctgttcacgaacagcagaaccatcacctgggcaggacgggaccagcagagcggctggagtcgggtgggagaatgtgctgctaaaggaaggtgagtcagcctcgaacgccacagaaacatccggcccagacatgactatcaagaagcctccccagctttctgaggatgatatctggctaaaaagcgagggagacaactatagtgccaccctcctggagcctgctgccagctctctttccccagatcacaaaaacatggaaattgaggtgtctgttgcagaatgtaaaagtgttcctggaatcacctctaccccacatcccatggaccatccctccgctttctattcacccccgcataatggcctccttactgatcaccacgaatccctggataatgatgttgccagagagatccgctatctagatgaggtgctagaggccaactgctgtgattctgctgtggatggaacgtacaatggaacatcctccccagagcctggtgcagtggttctggtgggcggcctaagcccccctgtccacgaggcgacccagccagaacccactgaaagaacagctagccggcaggcacctcctcacatcgagctcagtaatagcagccctgaccccatggcagaggcagaaagaacaaatggccattcccccagccagcctagagatgcgctgggggacagcctgcaggtgcctgtcagccccagctccacaaccagctcacggtgttcttcccgagatggagagttcactctcaccacactgaaaaaggaggccaagtttgagctgcgtgccttccatgaggacaagaagccctccaagctctttgaggatgacgagcatgagaaagaacaatactgcattagaaaagtgaggccttcagaggagatgctggagctggaaaaggagaggagagagctcatccgcagccaggccgtcaagaagaatcctggcattgcagcaaaatggtggaatcccccgcaggaaaaaaccatcgaggagcagctggacgaggaacatctggagtcgcacaaaaagtacaaggagcgcaaagagagaagggcacagcaggaacagttgctgctgcagaagcagttacagcagcagcagcagcagcccccatcgcagctctgcacagcccctgcctcttctcatgaacgcgcaagcatgattgacaaagcaaaggaggacattgtcacagagcagatagatttctctgctgctcgcaaacaatttcagctgatggagaattccaggcaagcggtggccaagggccagagtacacccaggctgttctccatcaagcctttctacaggcctctggggtcagtcaactcagacaagccactgactaatccgagaccaccttctgtcgggggacctccagaagacagtggtgcctcagccgccaagggacagaaatcccccggtgccctggagaccccatcggcagcaggaagccagggcaacacagcctctcaggggaaggaagggccctacagcgagccttctaaacgtgggcccttatctaaactgtgggctgaggatggagaatttacgagcgcccgggctgtcctcactgtggtcaaggatgatgaccatgggattttggatcagttctcaagatctgtcaatgtctccttgacccaagaggagcttgactctggtctggacgaattgtcggtgaggtctcaggataccacagtcctggagaccctatccaatgatttcagcatggacaacatcagtgacagcggggcatccaatgagacaaccaatgccctccaggaaaattcactggctgatttttctctgccccagacaccacaaactgacaacccctcagagggccgaggagaaggcgtctccaagtcatttagtgatcatggtttctattccccttcctccacgctgggggactctccgttggttgatgaccccttggagtatcaggctggcctcctggtgcagaatgccattcaacaagccatagccgagcaggtggataaagctgtgtccaaaaccagcagggatggagcagagcaacagggacctgaagcgactgtagaggaagctgaagctgcggctttcggctcagaaaagcctcagagcatgtttgagccacctcaggtgtcttctcctgttcaagagaaaagggatgtattaccaaagattctgcctgctgaagacagggcgctcagggaaagggggcccccccagccactgccagctgtgcagcccagtggcccgattaacatggaggagaccaggcccgaaggaagctatttcagcaagtactcggaggcagctgagctgagaagcacagcctccctcctggccactcaagaatctgacgtgatggttgggcctttcaagctgaggtccaggaaacagcggactttgtccatgattgaggaagagatccgagcagctcaggaaagggaagaggagctgaagaggcagagacaagtcttgcagagtacgcagagccccaggacaaagaatgccccatcactgccctccagaacatgctacaaaactgctccagggaaaatagagaaagtcaaacctcctccatcccccaccactgaaggccccagcctgcagcctgacttagcccctgaagaggctgccggaacccagcggcccaagaatctgatgcagaccctcatggaagactatgagacacacaaatctaaaaggcgcgagagaatggatgatagtagttacacttctaagttactgtcttgcaaggtgacttccgaggtcctcgaggccacacgggttaatcgaagaaagagcgcactggctttgcgctgggaagcagggatctatgccaaccaggaggaagaagacaacgaataaacttccttcaacccaggaagcgtctttggtgcttgggagaccaagaaaccaagaaattaacaactgaaagcattttaatggactatttattaaagtgcaaacaaactcagcaatccttatgtagaccagaagctgcaatatacaatgatgaaaatgaaacgaaaaggaagtccccccatcagactctggacacccaggaatcaaaagagaaaggacttttttggtgactcaatcccagtgtctggtttggggccaatctacaatggatccaaaaggacaaaacatgttacaagcaaatcaacatagttgctgcaggcggaactgagaccagcctctctgggcgatgaaggacaatggtggtagggccacttagagagcagtagggcccaggctggtgcagcctacatggcacaggatatttccctgcaccagtttcccacctgtcacttgcagcatcagagggtgttgcattaactccattttctccagcagccataaaatgaatggcgtttctctccatatttgcccagaagaggcagttatgattccacttctcctacatttaattatttttaattgagaacaactcatgatcacaattcataaaatccatattttaagacaatagttcttcatgtcacaaacacaatctattctacatgaggaggctgagaaaggggaagagaaaaacaaaccaaatggatgatgttagctttaggatcgtgtctgcttataatattcactgatctgcagtttatgagaacacattttcacagttatgtttcttcataggaaaactatatttagtgggcaacaactatttttatgatgggatgggggagtatatacacgtatagaatctgtacgcgttgaacaacttggttcaagatggtgggggcatttttagagcggcaataattgaaaaaaaaggcgaactctgccttggagaggtagatgataagaaataaaaaggtgtttataactattttgtattataaagtgggccttagagataggaagaagaatgatggattccttttggatcaatcagaaaggaaacacgaaagaaaagtcaggaaggtagagagagaaaaagggagggaaggagaaagaatgggaataaaataaggaggtaagagatactatttttgctgagcaaccagtgtgtttcaggatgatacaaagaaaaatatagaatagaaataagtgcaggcttggaatcagctacaaatcctaaagatggggtgtgtgtggatgtgtgtgtgtgtgtgtgtacaccattgtgtgtttgtaaaatgtgtatgttcatgagtaagggtgtgtgtgtgtgtgtattaaaattccagagtgaccgtggcacttgggtgtacaggtaattcctccagagctgtttgctggcttcaggagtggagtgagaatttcttttttatgaaaagggatataaaggcaccgagctgatgcagtatttgtaatattaagttgacctaacaaggtatttgcatgagtcacaattacaaagttttgagcggttttgtaatttgacatttaggaaagtctcctatttattctcatactttacattcatgcttagtatactatagaggatgccagctttaatctttctgtcatttaaagccatatgataagggtattcaataattgggtgccctaaatttctggatgagaaaattttcaattctggccatgagaaagaaaaaaaaataaacagccttctttttttttcctttgttttaaaactgtggttttttaaaaaagcaataattaactcagacctcactaaaaatcatttttgtttttatattgttatgtcataagctctattatgttattctaacaagtagcaatttcacaaaatttgtatgtagatgttaacgcacatttcctttgcttcttttattagactagtgttgactttggggggggacatttattcacaaatgagaagtaggcacaaagtaaaaaatggaaccatctactaacaaggatcctttaaaactgccaagggagctctaacttgaagccacatcctacagatggcagcccaaatagcacatgggcaattggcaccatctttatatggttgagtctcctgaatattttgaatgaattctcaacaaaatgtgctagccactggggacgcaaaacaagtaagatccctgttgcaagaaattcattttatagtgagggaggttggcatggagactaaaattctcaggaaaatgagatccgtgttagattagaagtcctgatgtgaaatgggaggactcaggaaggaggatcgtctttacctgaggatttctagccagaggtcccagatgcctgggctgagaacccagcgataagggggcgttcccaaagcagacacagggataagaacagaggaggcagcagcattgcacagccccaggcacagtggcagttaggatggctggagagtaggatagttctatgggttgcccaaaaaatgtgatgcgcttcatgttttctctgactcatggatctggtagagaccatagacatgatatagactaacttccccatttttcacaatgaaggtaaaccatccttatgacttaccttaaagttttttgttctgttttgaaggaaaccatgtgcttcatgaaacctacagttgacaagagaatgtacagctaagagaaaagcttaagaggccacactattcgcggaatggctttagaggcagatgaagtggtctttgaccacagttgattgaaccagagcacttattgcttaaagaataacagagttctagagctgggggttcttgggccatgctccgtgtgtggataaggaaagaaatactgtttctgggactctcccacagtcacaaagctgttttcactgtggcccctacatctcttaacttttgctattactcctatgctgccttccggattactgctgtctatcttcttgctccactcactgaagatcctattataatcccatgaaaatgtaaattacagtttacttgggagagccagattttctctgtgctcttgagttttttattcattcaagaaaccttgggccaccgctttgtacatagcaccgtgctaggctctgggatcccaaatggacccttttaactttctgaagatgggaccgtcccctggaggaaagtcattcctgcctaatccatcgagagaaagaggcttacgaaaaactttgcctctgatgctcagccccacccccaaatagcacacaagcttgttaaccccacctcttacaaaatgtttagattctgtaggtgttaaaagcctttctggaagtattgcattctgccgtgtttataggtgttcactttcctccagagctgattaactactgacatgacttggctttctcatccagaaattatggaaacagggtctgtcagtggcaggaggccgtgctgtgttttacttggatgacacaatgcagtttacttgcctcttcatacccatgcatgctgctcaccctagacaatgacatataagccgtatatagatcaatgtccacatatatatacacacacacatatatatatataaagtgtaacaaggaacactaaaacagtgttgattcttgtctctgaagacaaataattaaaccttttttttcccaactaaagaatggatttaattaaactatgtattgaaaaaaaagtagcctaagtgttagagatggtgaatatattccattttagttaaagaacaaatttcctgaattttaagcattcagtgagctgccaattttgattttgtgttgctctttacccaaattattttttctttgtttttctttttttgggggaggaggggaaaaaagcagcaatactgtgtttggaaattatactctgtatctggttttcctgtgtatgttaaccacttaaatgttattatcctgctttggttttagagtgattgtgaggcattcaatgcaagtatacagttattttctcattaaaatccaatgtgtgttgagtttttataaaaaaaaaaaaaaaaaa

SEQ ID NO: 11645 - protein, 1103 aa, Homo sapiens
  ref <308>: DATABASE ACCESSION NUMBER: SWISS-Prot / Q9Y2D5
  ref <309>: DATABASE ENTRY DATE: 2001-10-16
MAEAELHKERLQAIAEKRKRQTEIEGKRQQLDEQILLLQHSKSKVLREKWLLQGIPAGTAEEEEARRRQSEEDEFRVKQLEDNIQRLEQEIQTLESEESQISAKEQIILEKLKETEKSFKDFQKGFSSTDGDAVNYISSQLPDLPILCSRTAEPSPGQDGTSRAAGVGWENVLLKEGESASNATETSGPDMTIKKPPQLSEDDIWLKSEGDNYSATLLEPAASSLSPDHKNMEIEVSVAECKSVPGITSTPHPMDHPSAFYSPPHNGLLTDHHESLDNDVAREIRYLDEVLEANCCDSAVDGTYNGTSSPEPGAVVLVGGLSPPVHEATQPEPTERTASRQAPPHIELSNSSPDPMAEAERTNGHSPSQPRDALGDSLQVPVSPSSTTSSRCSSRDGEFTLTTLKKEAKFELRAFHEDKKPSKLFEDDEHEKEQYCIRKVRPSEEMLELEKERRELIRSQAVKKNPGIAAKWWNPPQEKTIEEQLDEEHLESHKKYKERKERRAQQEQLLLQKQLQQQQQQPPSQLCTAPASSHERASMIDKAKEDIVTEQIDFSAARKQFQLMENSRQAVAKGQSTPRLFSIKPFYRPLGSVNSDKPLTNPRPPSVGGPPEDSGASAAKGQKSPGALETPSAAGSQGNTASQGKEGPYSEPSKRGPLSKLWAEDGEFTSARAVLTVVKDDDHGILDQFSRSVNVSLTQEELDSGLDELSVRSQDTTVLETLSNDFSMDNISDSGASNETTNALQENSLADFSLPQTPQTDNPSEGRGEGVSKSFSDHGFYSPSSTLGDSPLVDDPLEYQAGLLVQNAIQQAIAEQVDKAVSKTSRDGAEQQGPEATVEEAEAAAFGSEKPQSMFEPPQVSSPVQEKRDVLPKILPAEDRALRERGPPQPLPAVQPSGPINMEETRPEGSYFSKYSEAAELRSTASLLATQESDVMVGPFKLRSRKQRTLSMIEEEIRAAQEREEELKRQRQVLQSTQSPRTKNAPSLPSRTCYKTAPGKIEKVKPPPSPTTEGPSLQPDLAPEEAAGTQRPKNLMQTLMEDYETHKSKRRERMDDSSYTSKLLSCKVTSEVLEATRVNRRKSALALRWEAGIYANQEEEDNE

SEQ ID NO: 11646 - DNA, 551 bp, Rattus norvegicus
  ref <308>: DATABASE ACCESSION NUMBER: EMBL / AI171090
  ref <309>: DATABASE ENTRY DATE: 2000-03-03
ggatattagaaaattaaacctttaattacataagctgttttcaagaatcacgtacagagatttcccagagacgctggagttggcagtcggccaccgcagtagattgagcccaccatttcagcaaaggcgctgctggcagctctagcccttctatgtaggagagggacctctgtgaggccggctcatttgccttcattccatttccccatccaggaatcattgtgtacacccaactcccacagttccggtttaggtgaacaaggggctcagagtttgcaggtggcctgtgccactttggaactggtttttctgttcagggcttgacagatgaagtccccggcttctaggagcttctggaggttcacacccgtgtgaatccctaagccagtcagcatgtagaccaggtcctcggtagccaagtttcctgacgccccctttgcatagggacagcctccgagtcctgccaccgaggagtccacaacgctcactcccatctgcagggccaccaacgtgttggccagagcttggccataggtgtcatggcaatggac

SEQ ID NO: 11647 - protein, 325 aa, Rattus norvegicus
  ref <308>: DATABASE ACCESSION NUMBER: SWISS-Prot / P97519
  ref <309>: DATABASE ENTRY DATE: 1999-07-15
MATVRKAFPQRLVGLASLRAASTSSMGTLPKRVKIVEVGPRDGLQNEKSIVPTPVKIKLIDMLSEAGLPVIEATSFVSPKWVPQMADHSDVLKGIQKFPGINYPVLTPNMKGFEEAVAAGAKEVSIFGAASELFTRKNVNCSIEESFQRFDGVMQAARAASISVRGYVSCALGCPYEGKVSPAKVAEVAKKLYSMGCYEISLGDTIGVGTPGLMKDMLTAVLHEVPVAALAVHCHDTYGQALANTLVALQMGVSVVDSSVAGLGGCPYAKGASGNLATEDLVYMLTGLGIHTGVNLQKLLEAGDFICQALNRKTSSKVAQATCKL

SEQ ID NO: 11648 - DNA, 1583 bp, Homo sapiens
  ref <308>: DATABASE ACCESSION NUMBER: EMBL / BC010570
  ref <309>: DATABASE ENTRY DATE: 2001-07-13
ctgggccaagatggcagcaatgaggaaggcgcttccgcggcgactggtgggcttggcgtccctccgggctgtcagcacctcatctatgggcactttaccaaagcgggtgaaaattgtggaagttggtccccgagatggactacaaaatgaaaagaatatcgtatctactccagtgaaaatcaagctgatagacatgctttctgaagcaggactctctgttatagaaaccaccagctttgtgtctcctaagtgggttccccagatgggtgaccacactgaagtcttgaagggcattcagaagtttcctggcatcaactacccagtcctgaccccaaatttgaaaggcttcgaggcagcggttgctgctggagccaaggaagtagtcatctttggagctgcctcagagctcttcaccaagaagaacatcaattgttccatagaggagagttttcagaggtttgacgcaatcctgaaggcagcgcagtcagccaatatttctgtgcgggggtacgtctcctgtgctcttggctgcccttatgaagggaagatctccccagctaaagtagctgaggtcaccaagaagttctactcaatgggctgctacgagatctccctgggggacaccattggtgtgggcaccccagggatcatgaaagacatgctgtctgctgtcatgcaggaagtgcctctggctgccctggctgtccactgccatgacacctatggtcaagccctggccaacaccttgatggccctgcagatgggagtgagtgtcgtggactcttctgtggcaggacttggaggctgtccctacgcacagggggcatcaggaaacttggccacagaagacctggtctacatgctagagggcttgggcattcacacgggtgtgaatctccagaagcttctggaagctggaaactttatctgtcaagccctgaacagaaaaactagctccaaagtggctcaggctacctgtaaactctgagccccttgcccacctgaagccctggggatgatgtggaaataggggcacacacagatgattcatggatggggacatggaaatgagaataggttaaatggtgcaggtacctcatagccagctctacacagaggtctctcctggcagaaagcaggcgaagggcaggaggagctgcttggcagaaggacctcctgcccagacctgaggagtgagaggctttgagggctgaagtctccctttgttacggaccctggcccaggagttgaatgcctgaggacgtgtgggaaccccgttccctacttagcatgatccttgagtctcctctctggatggaatccgcgagctggccacctggccaccctctacacggctccaccctgccatggccgtggggcccttgctctctgacttctcaggacacaggtcatggaggttcttcccaagctggcagaggccatttgtggaaagtggagagctacgtggtggccatctgccaactccagcatctctggaaaatctccacgctgaatgtgatttttgaaaacagcttatgtaattaaaggttgaatggcacatcataaaaaaaaaaaaaaaaaaa

SEQ ID NO: 11649 - protein, 325 aa, Homo sapiens
  ref <308>: DATABASE ACCESSION NUMBER: SWISS-Prot / P35914
  ref <309>: DATABASE ENTRY DATE: 2002-06-15
MAAMRKALPRRLVGLASLRAVSTSSMGTLPKRVKIVEVGPRDGLQNEKNIVSTPVKIKLIDMLSEAGLSVIETTSFVSPKWVPQMGDHTEVLKGIQKFPGINYPVLTPNLKGFEAAVAAGAKEVVIFGAASELFTKKNINCSIEESFQRFDAILKAAQSANISVRGYVSCALGCPYEGKISPAKVAEVTKKFYSMGCYEISLGDTIGVGTPGIMKDMLSAVMQEVPLAALAVHCHDTYGQALTNTLMALQMGVSVVDSSVAGLGGCPYAQGASGNLATEDLVYMLEGLGIHTGVNLQKLLEAGNFICQALNRKTSSKVAQATCKL

SEQ ID NO: 11650 - DNA, 721 bp, Rattus norvegicus
  ref <308>: DATABASE ACCESSION NUMBER: Refseq / NM_020080
  ref <309>: DATABASE ENTRY DATE: 2000-11-01
gaattcggcacgagcgccgttgcagctatggccactgctctaggatttcgctgcctttaccgaacgcgacctgcgacgctcggtcggtacgtcgataggctgtggaggagcccgagtcgggggcaccggctttctccggctgacgatgagttataccagcggacgcgtatctctttgctgcaaaacgagttccctcaggccgtatacatcgacagctacaatagcagaggtttcactatcaacggaaaccgcgtgtttggaccttgtgcgctgctcccacagaccgtggtccagtggaacgtgggatctcatcaggatatcactgaagagagcttctcgattttctggatgctggaacctaggatagagattgttgtggtgggcaccggaaacaagactgagcggctgcactctcaagtcctgcaggccatgaggcagcggggaattgcggtggagatacaggacacgcctaacgcctgtgccaccttcaacttcctgtgccacgaaggtcgagtgacaggagctgccctcatccccccacctggagagactgcacttgcctcttctggtcaaaccacagagtgaaccatccagaacagtcaaggagggcactgagcttcgtgatctccccgtgccttccctactccccctcttggcacactagctgtcaatgctcacccaggataataattttatgatcttcttatcaaaaaaaaaaaaa

SEQ ID NO: 11651 - protein, 185 aa, Rattus norvegicus
  ref <308>: DATABASE ACCESSION NUMBER: Refseq / NP_064465
  ref <309>: DATABASE ENTRY DATE: 2000-11-01
MATALGFRCLYRTRPATLGRYVDRLWRSPSRGHRLSPADDELYQRTRISLLQNEFPQAVYIDSYNSRGFTINGNRVFGPCALLPQTVVQWNVGSHQDITEESFSIFWMLEPRIEIVVVGTGNKTERLHSQVLQAMRQRGIAVEIQDTPNACATFNFLCHEGRVTGAALIPPPGETALASSGQTTE

SEQ ID NO: 11652 - DNA, 752 bp, Homo sapiens
  ref <308>: DATABASE ACCESSION NUMBER: EMBL / BC002873
  ref <309>: DATABASE ENTRY DATE: 2001-07-13
ggcacgaggcccaacccggggactaacggcgccggtgacgacttcgccgcgcgttggtcagccatggccaccgctctcgcgctacgtagcttgtaccgagcgcgaccctcgctgcgctgtccgcccgttgagcttccctgggccccgcggcgagggcatcggctctcgccggcggatgacgagctgtatcagcggacgcgcatctctctgctgcaacgcgaggccgctcaggcaatgtacatcgacagctacaacagccgcggcttcatgataaacggaaaccgcgtgctcggcccctgcgctctgctcccgcactcggtggtgcagtggaacgtgggatcccaccaggacatcaccgaagacagcttttccctcttctggttgctggagccccggatagagatcgtggtggtggggactggagaccggaccgagaggctgcagtcccaggtgcttcaagccatgaggcagcggggcattgctgtggaagtgcaggacacgcccaatgcctgtgccaccttcaacttcctgtgtcatgaaggccgagtaactggagctgctctcatccctccaccaggagggacttcacttacatctttgggccaagctgctcaatgaaccgccaggaactgacctgctgactgcactctgccaggcttcccaatgctttcactcttatctaccctttggcacttatcttgcttatcaacataataatttatacacttctcccaaaaaaaaaaaaaaaaaaa

SEQ ID NO: 11653 - protein, 184 aa, Homo sapiens
  ref <308>: DATABASE ACCESSION NUMBER: SWISS-Prot / AAH02873
  ref <309>: DATABASE ENTRY DATE: 2003-02-01
MATALALRSLYRARPSLRCPPVELPWAPRRGHRLSPADDELYQRTRISLLQREAAQAMYIDSYNSRGFMINGNRVLGPCALLPHSVVQWNVGSHQDITEDSFSLFWLLEPRIEIVVVGTGDRTERLQSQVLQAMRQRGIAVEVQDTPNACATFNFLCHEGRVTGAALIPPPGGTSLTSLGQAAQ

SEQ ID NO: 11654 - DNA, 2573 bp, Rattus norvegicus; identical to SEQ ID NO: 9493
  ref <308>: DATABASE ACCESSION NUMBER: EMBL / X17163
  ref <309>: DATABASE ENTRY DATE: 1993-09-12

SEQ ID NO: 11655 - protein, 334 aa, Rattus norvegicus; identical to SEQ ID NO: 9494
  ref <308>: DATABASE ACCESSION NUMBER: SWISS-Prot / CAA35084
  ref <309>: DATABASE ENTRY DATE: 2002-06-15

SEQ ID NO: 11656 - DNA, 3622 bp, Homo sapiens; identical to SEQ ID NO: 9495
  ref <308>: DATABASE ACCESSION NUMBER: EMBL / J04111
  ref <309>: DATABASE ENTRY DATE: 2000-03-04

SEQ ID NO: 11657 - protein, 331 aa, Homo sapiens; identical to SEQ ID NO: 9496
  ref <308>: DATABASE ACCESSION NUMBER: SWISS-Prot / AAA59197
  ref <309>: DATABASE ENTRY DATE: 2002-06-15

SEQ ID NO: 11658 - DNA, 587 bp, Rattus norvegicus; identical to SEQ ID NO: 6992
  ref <308>: DATABASE ACCESSION NUMBER: EMBL / AI176052
  ref <309>: DATABASE ENTRY DATE: 2000-03-03

SEQ ID NO: 11659 - protein, 226 aa, Rattus norvegicus; identical to SEQ ID NO: 6993
  ref <308>: DATABASE ACCESSION NUMBER: SWISS-Prot / P29411
  ref <309>: DATABASE ENTRY DATE: 2002-06-15

SEQ ID NO: 11660 - DNA, 684 bp, Homo sapiens; identical to SEQ ID NO: 6994
  ref <308>: DATABASE ACCESSION NUMBER: EMBL / AB021870
  ref <309>: DATABASE ENTRY DATE: 2002-01-22

SEQ ID NO: 11661 - protein, 226 aa, Homo sapiens; identical to SEQ ID NO: 6995
  ref <308>: DATABASE ACCESSION NUMBER: SWISS-Prot / Q9UIJ7
  ref <309>: DATABASE ENTRY DATE: 2002-06-15

SEQ ID NO: 11662 - DNA, 430 bp, Rattus norvegicus; identical to SEQ ID NO: 7006
  ref <308>: DATABASE ACCESSION NUMBER: EMBL / AI176422
  ref <309>: DATABASE ENTRY DATE: 2000-03-03

SEQ ID NO: 11663 - protein, 617 aa, Homo sapiens; identical to SEQ ID NO: 7008
  ref <308>: DATABASE ACCESSION NUMBER: Refseq / NP_004444
  ref <309>: DATABASE ENTRY DATE: 2000-11-01

SEQ ID NO: 11664 - DNA, 614 bp, Rattus norvegicus
  ref <308>: DATABASE ACCESSION NUMBER: EMBL / AI176710
  ref <309>: DATABASE ENTRY DATE: 2000-03-03
gtttgattgtataatttaatgacaatataaacagtatagtttgttttttttctttttctttttttaaaaaaaaagactaaagcaaaaatgattaaaagctaacagaagctaccgtgacattggtttgacattcaaagtttgagtcttagcaaaacggccaaaggtatcttgacttgatacagagtatataatataaagacttttagacctaaaaatcttcaaacgttatttgaatttagcaaaagcaaaaatttcatatcaaagtgctaaacagtgctgccttaaaggtcactgcaaacaaaggataaaataactgcgtgggaagtgacatttattgtacaaatggttaataaaaagacacattataaatatatatgtaacctgctatgtttttatatatatatatatgcttatttaatttctaaccggtgtatccaagtcaccacgaacaccccatttgattattctgtaactcagcctccaggagctggtggtcttgcaataaatacaggcaaagcgattacaatagaacgtgcatacaaatgttcatacaaataaggacactatgcaacgaatcatttcataataatatgccatcaacagtagaaacatag

SEQ ID NO: 11665 - protein, 628 aa, Rattus norvegicus
  ref <308>: DATABASE ACCESSION NUMBER: SWISS-Prot / P51179
  ref <309>: DATABASE ENTRY DATE: 1999-07-15
MPCVQAQYSPSPPGSTYATQTYGSEYTTEIMNPDYAKLTMDLGSTGIMATATTSLPSFSTFMEGYPSSCELKPSCLYQMPPSGPRPLIKMEEGREHGYHHHHHHHHHHHHHHQQQQPSIPPPSGPEDEVLPSTSMYFKQSPPSTPTTPGFPPQAGALWDDELPSAPGCIAPGPLLDPQMKAVPPMAAAARFPIFFKPSPPHPPAPSPAGGHHLGYDPTAAAALSLPLGAAAAAGSQAAALEGHPYGLPLAKRTATLTFPPLGLTASPTASSLLGESPSLPSPPNRSSSSGEGTCAVCGDNAACQHYGVRTCEGCKGFFKRTVQKNAKYVCLANKNCPVDKRRRNRCQYCRFQKCLSVGMVKEVVRTDSLKGRRGRLPSKPKSPLQQEPSQPSPPSPPICMMNALVRALTDATPRDLDYSRYCPTDQATAGTDAEHVQQFYNLLTASIDVSRSWAEKIPGFTDLPKEDQTLLIESAFLELFVLRLSIRSNTAEDKFVFCNGLVLHRLQCLRGFGEWLDSIKDFSLNLQSLNLDIQALACLSALSMITERHGLKEPKRVEELCNKITSSLKDHQRKGQALEPSEPKVLRALVELRKICTQGLQRIFYLKLEDLVSPPSVIDKLFLDTLPF

SEQ ID NO: 11666 - DNA, 2714 bp, Homo sapiens
  ref <308>: DATABASE ACCESSION NUMBER: EMBL / S81243
  ref <309>: DATABASE ENTRY DATE: 2000-03-04
aacagtagctgtggccattcacacaaacacacagacacaagcgcgcacacaggctccgcacacacacttcgctctcccgcgcgctcacacccctcttgccctgagcccttgccggtgcagcgcggcgccgcagctggacgcccctcccgggctcactttgcaacgctgacggtgccggcagtggccgtggaggtgggaacagcggcggcatcctcccccctggtcacagcccaagccaggacgcccgcggaacctctcggctgtgctctcccatgagtcgggatcgcagcatcccccaccagccgctcaccgcctccgggagccgctgggcttgtacaccgcagcccttccgggacagcagctgcgactcccccccagtgcagatttcgggacagctctctagaaactcgctctaaagacggaaccgccacagcactcaaagcccactgcggaagagggcagcccggcaagcccgggccctgagcctggacccttagcggtgccgggcagcactgccggcgcttcgcctcgccggacgtccgctcctcctacactctcagcctccgctggagagacccccagccccaccattcagcgcgcaagataccctccagatatgccctgcgtccaagcccaatatagcccttcccctccaggttccagttatgcggcgcagacatacagctcggaatacaccacggagatcatgaaccccgactacaccaagctgaccatggaccttggcagcactgagatcacggctacagccaccacgtccctgcccagcatcagtaccttcgtggagggctactcgagcaactacgaactcaagccttcctgcgtgtaccaaatgcagcggcccttgatcaaagtggaggaggggcgggcgcccagctaccatcaccatcaccaccaccaccaccaccaccaccaccatcaccagcagcagcatcagcagccatccattcctccagcctccagcccggaggacgaggtgctgcccagcacctccatgtacttcaagcagtccccaccgtccacccccaccacgccggccttccccccgcaggcgggggcgttatgggacgaggcactgccctcggcgcccggctgcatcgcacccggcccgctgctggacccgccgatgaaggcggtccccacggtggccggcgcgcgcttcccgctcttccacttcaagccctcgccgccgcatccccccgcgcccagcccggccggcggccaccacctcggctacgacccgacggccgctgccgcgctcagcctgccgctgggagccgcagccgccgcgggcagccaggccgccgcgcttgagagccacccgtacgggctgccgctggccaagagggcggccccgctggccttcccgcctctcggcctcacgccctcccctaccgcgtccagcctgctgggcgagagtcccagcctgccgtcgccgcccagcaggagctcgtcgtctggcgagggcacgtgtgccgtgtgcggggacaacgccgcctgccagcactacggcgtgcgaacctgcgagggctgcaagggctttttcaagagaacagtgcagaaaaatgcaaaatatgtttgcctggcaaataaaaactgcccagtagacaagagacgtcgaaaccgatgtcagtactgtcgatttcagaagtgtctcagtgttggaatggtaaaagaagttgtccgtacagatagtctgaaagggaggagaggtcgtctgccttccaaaccaaagagcccattacaacaggaaccttctcagccctctccaccttctcctccaatctgcatgatgaatgcccttgtccgagctttaacagactcaacacccagagatcttgattattccagatactgtcccactgaccaggctgctgcaggcacagatgctgagcatgtgcaacaattctacaacctcctgacagcctccattgatgtatccagaagctgggcagaaaagattccgggatttactgatctccccaaagaagatcagacattacttattgaatcagcctttttggagctgtttgtcctcagactttccatcaggtcaaacactgctgaagataagtttgtgttctgcaatggacttgtcctgcatcgacttcagtgccttcgtggatttggggagtggctcgactctattaaagacttttccttaaatttgcagagcctgaaccttgatatccaagccttagcctgcctgtcagcactgagcatgatcacagaaagacatgggttaaaagaaccaaagagagtcgaagagctatgcaacaagatcacaagcagtttaaaagaccaccagagtaagggacaggctctggagcccaccgagtccaaggtcctgggtgccctggtagaactgaggaagatctgcaccctgggcctccagcgcatcttctacctgaagctggaagacttggtgtctccaccttccatcattgacaagctcttcctggacaccctacctttctaatcaggagcagtggagcagtgagctgcctcctctcctagcacctgcttgctacgcagcaaagggataggtttggaaacctatcatttcctgtccttccttaagaggaaaagcagctcctgtagaaagcaaagactttcttttttttctggctcttttccttacaacctaaagccagaaaacttgcagagtattgtgttggggttgtgttttatattta

SEQ ID NO: 11667 - protein, 626 aa, Homo sapiens [sequence omitted]

SEQ ID NO: 11668 - DNA, 616 bp, Rattus norvegicus; identical to SEQ ID NO: 7058
  ref <308>: DATABASE ACCESSION NUMBER: EMBL / AI177161
  ref <309>: DATABASE ENTRY DATE: 1999-01-22

SEQ ID NO: 11669 - protein, 597 aa, Rattus norvegicus; identical to SEQ ID NO: 7059
  ref <308>: DATABASE ACCESSION NUMBER: SWISS-Prot / O54968
  ref <309>: DATABASE ENTRY DATE: 2000-05-30

SEQ ID NO: 11670 - DNA, 2304 bp, Homo sapiens; identical to SEQ ID NO: 7060
  ref <308>: DATABASE ACCESSION NUMBER: EMBL / S74017
  ref <309>: DATABASE ENTRY DATE: 2000-03-04

SEQ ID NO: 11671 - protein, 605 aa, Homo sapiens; identical to SEQ ID NO: 7061
  ref <308>: DATABASE ACCESSION NUMBER: SWISS-Prot / Q16236
  ref <309>: DATABASE ENTRY DATE: 2002-06-15

SEQ ID NO: 11672 - DNA, 618 bp, Rattus norvegicus
  ref <308>: DATABASE ACCESSION NUMBER: EMBL / AI177366
  ref <309>: DATABASE ENTRY DATE: 1999-01-22
gtattttaggccttttattttaataaataacttcagttaacagcactgtcaaaattaaaaggcacttaaaacaaggtggtgactagcttgagtcagggcgagcacagcagggaaggcacgtgcaggaggtgcacagtggtcgaattgctgctgaggggccctgcccaggccctacagtcctgcaagcagcaggacggcttacagtatttgtgaaaaaggcaaatgtacagccacagaaaagaaaaggttataatagagtctgacccccaaattgcaaacagacacattagagattagaggtgataaaggagcaccaggaattaaagaaaaacaaagcagaacaggcccctgctccacaatgctactaaagttatggccttatgtaaatagtgctaagtcagggactttttagcagagaagttcccagtacttttatccaagcttggatttataaagagaaagcgttgggagttacaggatcaagtaactcacaatggcacacaggttttaaagctaagttttcctttccacatctcagaatttttccaatggacttgtaaatcaactgtgtcaaatttattttaattggaaactgtcaacacacttgtcttccgcacg

SEQ ID NO: 11673 - protein, 799 aa, Rattus norvegicus
  ref <308>: DATABASE ACCESSION NUMBER: SWISS-Prot / P49134
  ref <309>: DATABASE ENTRY DATE: 2002-06-15
MNLQLVFWIGLISLICSVFGQTDKNRCLKANAKSCGECIQAGPNCGWCTNTTFLQEGMPTSARCDDLEALKKKGCHPSDIENPRGSQTIKKNKNVTNRSKGMAEKLRPEDITQIQPQQLLLKLRSGEPQKFTLKFKRAEDYPIDLYYLMDLSYSMKDDLENVKSLGTDLMNEMRRITSDFRIGFGSFVEKTVMPYISTTPAKLRNPCTSEQNCTSPFSYKNVLSLTDRGEFFNELVGQQRISGNLDSPEGGFDAIMQVAVCGSLIGWRNVTRLLVFSTDAGFHFAGDGKLGGIVLPNDGQCHLENNVYTMSHYYDYPSIAHLVQKLSENNIQTIFAVTEEFQPVYKELKNLIPKSAVGTLSGNSSNVIQLIIDAYNSLSSEVILENSKLPDGVTINYKSYCKNGVNGTGENGRKCSNISIGDEVQFEISITANKCPNKESENQLKLNPLGFTEEVEVVLQFICKCNCQSHGIPASPKCHEGNGTFECGACRCNEGRVGRHCECSTDEVNSEDMDAYCRKENSSEICSNNGECVCGQCVCRKRENTNEIYSGKFCECDNFNCDRSNGLICGGNGVCRCRVCECYPNYTGSACDCSLDTVPCVATNGQICNGRGICECGACKCTDPKFQGPTCETCQTCLGVCAEHKECVQCRAFNKGEKKDTCAQECSHFNLTKVESREKLPQPVQVDPVTHCKEKDIDDCWFYFTYSVNSKGEAHVHVVETPDCPTGPDIIPIVAGVVAGIVLIGLALLLIWKLLMIIHDRREFAKFEKEKMNAKWDTGENPIYKSAVTTVVNPKYEGK

SEQ ID NO: 11674 - DNA, 140 bp, Homo sapiens
  misc_feature (1)..(140): n=a, c, g or t
  ref <308>: DATABASE ACCESSION NUMBER: EMBL / BG222775
  ref <309>: DATABASE ENTRY DATE: 2001-02-09
tttttcggattgaccacagttgttacggcactcttataaataggaattttcancccgtgtcccatttggcattcattttctccttttcaaatttagcaaactcccttctgtcatgtccccgtacatcgttagaagcttga

SEQ ID NO: 11675 - protein, 798 aa, Homo sapiens [sequence omitted]

SEQ ID NO: 11676 - DNA, 619 bp, Rattus norvegicus; identical to SEQ ID NO: 7088
  ref <308>: DATABASE ACCESSION NUMBER: EMBL / AI178208
  ref <309>: DATABASE ENTRY DATE: 1999-01-22

SEQ ID NO: 11677 - protein, 1199 aa, Rattus norvegicus; identical to SEQ ID NO: 7089
  ref <308>: DATABASE ACCESSION NUMBER: SWISS-Prot / P52591
  ref <309>: DATABASE ENTRY DATE: 2002-06-15

SEQ ID NO: 11678 - DNA, 31737 bp, Homo sapiens; identical to SEQ ID NO: 7090
  ref <308>: DATABASE ACCESSION NUMBER: EMBL / AC006014
  ref <309>: DATABASE ENTRY DATE: 2002-04-22

SEQ ID NO: 11679 - DNA, 614 bp, Rattus norvegicus
  ref <308>: DATABASE ACCESSION NUMBER: EMBL / AI178921
  ref <309>: DATABASE ENTRY DATE: 1999-01-22
aagactttataattttattactttgggtttttaacattctacataataatgcctgataactcttttctgtttgtctctctaattgcaagccagaaactactcaaagctgagactgctttcctggccccggaaggcacaggggcgcagctgcttcttcagagttttgccgccatgaagttaatgtgtggcttcacaagggggaacagcggcaggccgcgcttgaattcagtcatgttatgaatcacctcaggttgtggcaagggtggcgcttcggaaaggtttatatcattctgagaggggaactctccaaccacaggacaagaatccatttccctggcaagaacgtggacggatactttatgtctccttggtgcgtccacagccaacatttccttgtagaatttgatgatatcgtccttgctgagtgtctttaaatatgcaacctctatgttatctctgtcataattgtactgctgggagatgatctccccccagtacttcgcgcactctgcagagagtttctttggtttgtcgagtcggcgaatcgctaacgcctgaatgtgtttttggaaagcctcctctgtcatgtcctctatggccttttccatcctcgt

SEQ ID NO: 11680 - protein, 1019 aa, Rattus norvegicus
  ref <308>: DATABASE ACCESSION NUMBER: SWISS-Prot / P35559
  ref <309>: DATABASE ENTRY DATE: 2002-06-15
MRNGLVWLLHPALPSTLHSILGARPPPVKRLCGFPKQIYSTMNNPAIQRIEDHIVKSPEDKREYRGLELANGIKVLLISDPTTDKSSAALDVHIGSLSDPPNIPGLSHFCEHMLFLGTKKYPKENEYSQFLSEHAGSSNAFTSGEHTNYYFDVSHEHLEGALDRFAQFFLCPLFDASCKDREVNAVDSEHEKNVMNDAWRLFQLEKATGNPKHPFSKFGTGNKYTLETRPNQEGIDVREELLKFHSTYYSSNLMAICVLGRESLDDLTNLVVKLFSEVENKNVPLPEFPEHPFQEEHLKQLYKIVPIKDIRNLYVTFPIPDLQQYYKSNPGHYLGHLIGHEGPGSLLSELKSKGWVNTLVGGQKEGARGFMFFIINVDLTEEGLLHVEDIILHMFQYIQKLRAEGPQEWVFQECKDLNAVAFRFKDKERPRGYTSKIAGKLHYYPLNGVLTAEYLLEEFRPDLIDMVLDKLRPENVRVAIVSKSFEGKTDRTEQWYGTQYKQEAIPEDVIQKWQNADLNGKFKLPTKNEFIPTNFEILALEKDATPYPALIKDTAMSKLWFKQDDKFFLPKACLNFEFFSPFAYVDPLHCNMAYLYLELLKDSLNEYAYAAELAGLSYDLQNTIYGMYLSVKGYNDKQPILLKKITEKMATFEIDKKRFEIIKEAYMRSLNNFRAEQPHQHAMYYLRLLMTEVAWTKDELKEALDDVTLPRLKAFIPQLLSRLHIEALLHGNITKQAALGVMQMVEDTLIEHAHTKPLLPSQLVRYREVQLPDRGWFVYQRRNEVHNNCGIEIYYQTDMQSTSENMFLELFCQIISEPCFNTLRTKEQLGYIVFSGPRRANGIQGLRFIIQSEKPPHYLESRVEAFLITMEKAIEDMTEEAFQKHIQALAIRRLDKPKKLSAECAKYWGEIISQQYNYDRDNIEVAYLKTLSKDDIIKFYKEMLAVDAPRRHKVSVHVLAREMDSCPVVGEFPSQNDINLSEAPPLPQPEVIHNMTEFKRGLPLFPLVKPHINFMAAKL

SEQ ID NO: 11681 - DNA, 3337 bp, Homo sapiens
  ref <308>: DATABASE ACCESSION NUMBER: EMBL / M21188
  ref <309>: DATABASE ENTRY DATE: 1999-07-02
ccggctcgaagcgcaacgaggaagcgtttgcggtgatcccggcgactgcgctggctaatgcggtaccggctagcgtggcttctgcaccccgcactgcccagcaccttccgctcagtcctcggcgcccgcctgccgcctccggagcgcctgtgtggtttccaaaaaaagacttacagcaaaatgaataatccagccatcaagagaataggaaatcacattaccaagtctcctgaagacaagcgagaatatcgagggctagagctggccaatggtatcaaagtacttcttatgagtgatcccaccacggataagtcatcagcagcacttgatgtgcacataggttcattgtcggatcctccaaatattgctggcttaagtcatttttgtgaacatatgctttttttgggaacaaagaaataccctaaagaaaatgaatacagccagtttctcagtgagcatgcaggaagttcaaatgcctttactagtggagagcataccaattactattttgatgtttctcatgaacacctagaaggtgccctagacaggtttgcacagttttttctgtgccccttgttcgatgaaagttgcaaagacagagaggtgaatgcagttgattcagaacatgagaagaatgtgatgaatgatgcctggagactctttcaattggaaaaagctacagggaatcctaaacaccccttcagtaaatttgggacaggtaacaaatatactctggagactagaccaaaccaagaaggcattgatgtaagacaagagctactgaaattccattctgcttactattcatccaacttaatggctgtttgtgttttaggtcgagaatctttagatgacttgactaatctggtggtaaagttattttctgaagtagagaacaaaaatgttccattgccagaatttcctgaacaccctttccaagaagaacatcttaaacaactttacaaaatagtacccattaaagatattaggaatctctatgtgacatttcccatacctgaccttcagaaatactacaaatcaaatcctggtcattatcttggtcatctcattgggcatgaaggtcctggaagtctgttatcagaacttaagtcaaagggctgggttaatactcttgttggtgggcagaaggaaggagcccgaggttttatgttttttatcattaatgtggacttgaccgaggaaggattattacatgttgaagatataattttgcacatgtttcaatacattcagaagttacgtgcagaaggacctcaagaatgggttttccaagagtgcaaggacttgaatgctgttgcttttaggtttaaagacaaagagaggccacggggctatacatctaagattgcaggaatattgcattattatcccctagaagaggtgctcacagcggaatatttactggaagaatttagacctgacttaatagagatggttctcgataaactcagaccagaaaatgtccgggttgccatagtttctaaatcttttgaaggaaaaactgatcgcacagaagagtggtatggaacccagtacaaacaagaagctataccggatgaagtcatcaagaaatggcaaaatgctgacctgaatgggaaatttaaacttcctacaaagaatgaatttattcctacgaattttgagattttaccgttagaaaaagaggcgacaccataccctgctcttattaaggatacagtcatgagcaaactttggttcaaacaagatgataagaaaaaaaagccgaaggcttgtctcaactttgaatttttcagcccatttgcttatgtggaccccttgcactgtaacatggcctatttgtaccttgagctcctcaaagactcactcaacgagtatgcatatgcagcagagctagcaggcttgagctatgatctccaaaataccatctatgggatgtatctttcagtgaaaggttacaatgacaagcagccaattttactaaagaagattattgagaaaatggctacctttgagattgatgaaaaaagatttgaaattatcaaagaagcatatatgcgatctcttaacaatttccgggctgaacagcctcaccagcatgccatgtactacctccgcttgctgatgactgaagtggcctggactaaagatgagttaaaagaagctctggatgatgtaacccttcctcgccttaaggccttcatacctcagctcctgtcacggctgcacattgaagcccttctccatggaaacataacaaagcaggctgcattaggaattatgcagatggttgaagacaccctcattgaacatgctcataccaaacctctccttccaagtcagctggttcggtatagagaagttcagctccctgacagaggatggtttgtttatcagcagagaaatgaagttcacaataactgtggcatcgagatatactaccaaacagacatgcaaagcacctcagagaatatgtttctggagctcttctgtcagattatctcggaaccttgcttcaacaccctgcgcaccaaggagcagttgggctatatcgtcttcagcgggccacgtcgagctaatggcatacagagcttgagattcatcatccagtcagaaaagccacctcactacctagaaagcagagtggaagctttcttaattaccatggaaaagtccatagaggacatgacagaagaggccttccaaaaacacattcaggcattagcaattcgtcgactagacaaaccaaagaagctatctgctgagtgtgctaaatactggggagaaatcatctcccagcaatataattttgacagagataacactgaggttgcatatttaaagacacttaccaaggaagatatcatcaaattctacaaggaaatgttggcagtagatgctccaaggagacataaggtatccgtccatgttcttgccagggaaatggattcttgtcctgttgttggagagttcccatgtcaaaatgacataaatttgtcacaagcaccagccttgccacaacctgaagtgattcagaacatgaccgaattcaagcgtggtctgccactgtttccccttgtgaaaccacatattaacttcatggctgcaaaactctgaagattccccatgcatgggaaagtgcaagtggatgcattcctgagtcttccagagcctaagaaaatcatcttggccactttaatagtttctgattcactattagagaaacaaacaaaaaattgtcaaatgtcattatgtagaaatattataaatccaaagtaaattacaaaatcttatagatgtagaatattttttaaatacatgccctcttaaatatttc

SEQ ID NO: 11682 - protein, 1018 aa, Homo sapiens
  ref <308>: DATABASE ACCESSION NUMBER: SWISS-Prot / P14735
  ref <309>: DATABASE ENTRY DATE: 2002-06-15
RYRLAWLLHPALPSTFRSVLGARLPPPERLCGFQKKTYSKMNNPAIKRIGNHITKSPEDKREYRGLELANGIKVLLMSDPTTDKSSAALDVHIGSLSDPPNIAGLSHFCEHMLFLGTKKYPKENEYSQFLSEHAGSSNAFTSGEHTNYYFDVSHEHLEGALDRFAQFFLCPLFDESCKDREVNAVDSEHEKNVMNDAWRLFQLEKATGNPKHPFSKFGTGNKYTLETRPNQEGIDVRQELLKFHSAYYSSNLMAVCVLGRESLDDLTNLVVKLFSEVENKNVPLPEFPEHPFQEEHLKQLYKIVPIKDIRNLYVTFPIPDLQKYYKSNPGHYLGHLIGHEGPGSLLSELKSKGWVNTLVGGQKEGARGFMFFIINVDLTEEGLLHVEDIILHMFQYIQKLRAEGPQEWVFQECKDLNAVAFRFKDKERPRGYTSKIAGILHYYPLEEVLTAEYLLEEFRPDLIEMVLDKLRPENVRVAIVSKSFEGKTDRTEEWYGTQYKQEAIPDEVIKKWQNADLNGKFKLPTKNEFIPTNFEILPLEKEATPYPALIKDTVMSKLWFKQDDKKKKPKACLNFEFFSPFAYVDPLHCNMAYLYLELLKDSLNEYAYAAELAGLSYDLQNTIYGMYLSVKGYNDKQPILLKKIIEKMATFEIDEKRFEIIKEAYMRSLNNFRAEQPHQHAMYYLRLLMTEVAWTKDELKEALDDVTLPRLKAFIPQLLSRLHIEALLHGNITKQAALGIMQMVEDTLIEHAHTKPLLPSQLVRYREVQLPDRGWFVYQQRNEVHNNCGIEIYYQTDMQSTSENMFLELFCQIISEPCFNTLRTKEQLGYIVFSGPRRANGIQSLRFIIQSEKPPHYLESRVEAFLITMEKSIEDMTEEAFQKHIQALAIRRLDKPKKLSAECAKYWGEIISQQYNFDRDNTEVAYLKTLTKEDIIKFYKEMLAVDAPRRHKVSVHVLAREMDSCPVVGEFPCQNDINLSQAPALPQPEVIQNMTEFKRGLPLFPLVKPHINFMAAKL

SEQ ID NO: 11683 - DNA, 672 bp, Rattus norvegicus
  misc_feature (1)..(672): n=a, c, g or t
  ref <308>: DATABASE ACCESSION NUMBER: EMBL / AI180350
  ref <309>: DATABASE ENTRY DATE: 2000-03-03
ctaaagataagccatctttgataaattagaccacaatggaaacagtgtatctataatatacatataaaaagtccagttttcaattgtaagcaagacaggtgcagacaggtatcatgagaacctcagaggcaggagtgctggtagccccatttctttcctactggggacgcctccccacacagtggctagcctcaggtctcagcaccttgagtgggtggctcctctccagcttcagtcttcttgtgcttgcgcatatgcctgtatttgtccacataggccttcaccangttggccacctttacagggttgatttcgccactcttgctgtggcagatcttctgcacagctttgcgcaggatgtccttgtactcctccttggtcacctctctcttctggtagaagggtttaatggccagcttcacttcctccacagcccgttcctgcatgtgcagcttcttcatgtactcctcctttttggtcttctcagcagctgttttgggagtagccgtcctttcttctgagttgttggtggttggaacagctagctctgaggctgtagctggcatagtgggcactggggccaggttctgtgctgcaccacaacctgctaggggaagggtcccctgcagaatcaactggactgagggctggttgaccagtgcatagggcggg

SEQ ID NO: 11684 - DNA, 3628 bp, Homo sapiens
  ref <308>: DATABASE ACCESSION NUMBER: EMBL / Y18064
  ref <309>: DATABASE ENTRY DATE: 1998-12-11
gcgctagccggctcttcagcagcgagtgcagattgctcccccgcggccgcagatctcccgtttgcgccgcgttcagctgctcccgaacaacttttctgccggcccagaggccccagggcgtcgcagcgccgcgtgcggcccactcacgggccggcaggatggactccaacactgctccgctgggcccctcctgcccacagcccccgccagcaccgcagccccaggcgcgttcccgactcaatgccacagcctcgttggagcaggagaggagcgaaaggccccgagcacccggaccccaggctggccctggccctggtgttagagacgcagcggcccccgctgaaccccaggcccagcataccaggagccgggaaagagcagacggcaccgggcctacaaagggagacatggaaatcccctttgaagaagtcctggagagggccaaggccggggaccccaaggcacagactgaggtggggaagcactacctgcagttggccggcgacacggatgaagaactcaacagctgcaccgctgtggactggctggtcctcgccgcgaagcagggccgtcgcgaggctgtgaagctgcttcgccggtgcttggcggacagaagaggcatcacgtccgagaacgaacgggaggtgaggcagctctcctccgagaccgacctggagagggccgtgcgcaaggcagccctggtcatgtactggaagctcaaccccaagaagaagaagcaggtggccgtggcggagctgctggagaatgtcggccaggtcaacgagcacgatggaggggcgcagccaggccccgtgcccaagtccctgcagaagcagaggcggatgctggagcgcctggtcagcagcgagtccaagaactacatcgcgctggatgactttgtggagatcactaagaagtacgccaagggcgtcatccccagcagcctgttcctgcaggacgacgaagatgatgacgagctggcggggaagagccctgaggacctgccactgcgtctgaaggtggtcaagtaccccctgcacgccatcatggagatcaaggagtacctgattgacatggcctccagggcaggcatgcactggctgtccaccatcatccccacgcaccacatcaacgcgctcatcttcttcttcatcatcagcaacctcaccatcgacttcttcgccttcttcatcccgctggtcatcttctacctgtccttcatctccatggtgatctgcaccctcaaggtgttccaggacagcaaggcctgggagaacttccgcaccctcaccgacctgctgctgcgcttcgagcccaacctggatgtggagcaggccgaggttaacttcggctggaaccacctggagccctatgcccatttcctgctctctgtcttcttcgtcatcttctccttccccatcgccagcaaggactgcatcccctgctcggagctggctgtcatcaccggcttctttaccgtgaccagctacctgagcctgagcacccatgcagagccctacacgcgcagggccctggccaccgaggtcaccgccggcctgctatcgctgctgccctccatgcccttgaattggccctacctgaaggtccttggccagaccttcatcaccgtgcctgtcggccacctggtcgtcctcaatgtcagcgtcccgtgcctgctctatgtctacctgctctatctcttcttccgcatggcacagctgaggaatttcaagggcacctactgctaccttgtgccctacctggtgtgcttcatgtggtgtgagctctccgtggtcatcctgctggagtccaccggcctggggctgctccgcgcctccatcggctacttcctcttcctctttgccctccccatcctggtggccggcctggccctggtgggcgtgctgcagttcgcccggtggttcacgtctctggagctcaccaagatcgcagtcaccgtggcggtctgtagtgtgcccctgctgttgcgctggtggaccaaggccagcttctctgtggtggggatggtgaagtccctgacgcggagctccatggtcaagctcatcctggtgtggctcacggccatcgtgctgttctgctggttctatgtgtaccgctcagagggcatgaaggtctacaactccacactgacctggcagcagtatggtgcgctgtgcgggccacgcgcctggaaggagaccaacatggcgcgcacccagatcctctgcagccacctggagggccacagggtcacgtggaccggccgcttcaagtacgtccgcgtgactgacatcgacaacagcgccgagtctgccatcaacatgctcccgttcttcatcggcgactggatgcgctgcctctacggcgaggcctaccctgcctgcagccctggcaacacctccacggccgaggaggagctctgtcgccttaagctgctggccaagcacccctgccacatcaagaagttcgaccgctacaagtttgagattaccgtgggcatgccattcagcagcggcgctgacggctcgcgcagccgcgaggaggacgacgtcaccaaggacatcgtgctgcgggccagcagcgagttcaagagcgtgctgctcagcctgcgccagggcagcctcatcgagttcagcaccatcctggagggccgcctgggcagcaagtggcctgtcttcgagctcaaggccatcagctgcctcaactgcatggcccagctctcacccaccaggcggcacgtgaagatcgagcacgactggcgcagcaccgtgcatggcgccgtgaagttcgccttcgacttctttttcttcccattcctgtcggcggcctgaggatggtccgccacgaggagcttccagtgcatgttgccatgaggcctttccccagtgtggccccagcccgacaggcatgcaccagtgccgcctgtgcccacgtgtgcagactgtggctgcagagaccttgcgaccatgtgtagattgcgtggaccccgacaaagggaaggctgctgtgtagctctgtccactctgaataccaagtgtgttgggaattgcatgccatctccaccctgagcctgacctttctgagtgacatgggtgtgccaggctagactaggaggttccggtgtctggaaaagcactttacagatgagattccctctcctcccccaccttcaagcaccctgttccctctttctttcttttgtgttggatttgtttaaaaaccaaataagcatctgtgtaacctccacagtagcatttcttatttgtttggtcactgctacaccttagcagctcttcccctttcctgggggatgtgcacggcagcttgagcctgtcacgtggtcaaggcccggccccatcagaggctgggggaggcggcacattggcagtgtgtcacactgagctgggcaccacaggctgcctcatgaccctcctgtccagcaggtagtgggtgaatgtgtgaaggtcttgcctgaatccatcaggacttgggaaacagagaaccctgtgggggcggctgtgggggaggtccctgccagtgtttagaagagcctgactgtgttcagtgccttggagcagaaagccagggtcctgagtggctgaaataaaagcctctggtggaacctgca

SEQ ID NO: 11685 - protein, 890 aa, Homo sapiens
  ref <308>: DATABASE ACCESSION NUMBER: SWISS-Prot / O76024
  ref <309>: DATABASE ENTRY DATE: 2002-06-15
MDSNTAPLGPSCPQPPPAPQPQARSRLNATASLEQERSERPRAPGPQAGPGPGVRDAAAPAEPQAQHTRSRERADGTGPTKGDMEIPFEEVLERAKAGDPKAQTEVGKHYLQLAGDTDEELNSCTAVDWLVLAAKQGRREAVKLLRRCLADRRGITSENEREVRQLSSETDLERAVRKAALVMYWKLNPKKKKQVAVAELLENVGQVNEHDGGAQPGPVPKSLQKQRRMLERLVSSESKNYIALDDFVEITKKYAKGVIPSSLFLQDDEDDDELAGKSPEDLPLRLKVVKYPLHAIMEIKEYLIDMASRAGMHWLSTIIPTHHINALIFFFIISNLTIDFFAFFIPLVIFYLSFISMVICTLKVFQDSKAWENFRTLTDLLLRFEPNLDVEQAEVNFGWNHLEPYAHFLLSVFFVIFSFPIASKDCIPCSELAVITGFFTVTSYLSLSTHAEPYTRRALATEVTAGLLSLLPSMPLNWPYLKVLGQTFITVPVGHLVVLNVSVPCLLYVYLLYLFFRMAQLRNFKGTYCYLVPYLVCFMWCELSVVILLESTGLGLLRASIGYFLFLFALPILVAGLALVGVLQFARWFTSLELTKIAVTVAVCSVPLLLRWWTKASFSVVGMVKSLTRSSMVKLILVWLTAIVLFCWFYVYRSEGMKVYNSTLTWQQYGALCGPRAWKETNMARTQILCSHLEGHRVTWTGRFKYVRVTDIDNSAESAINMLPFFIGDWMRCLYGEAYPACSPGNTSTAEEELCRLKLLAKHPCHIKKFDRYKFEITVGMPFSSGADGSRSREEDDVTKDIVLRASSEFKSVLLSLRQGSLIEFSTILEGRLGSKWPVFELKAISCLNCMAQLSPTRRHVKIEHDWRSTVHGAVKFAFDFFFFPFLSAA

SEQ ID NO: 11686 - DNA, 623 bp, Rattus norvegicus
  ref <308>: DATABASE ACCESSION NUMBER: EMBL / AI228247
  ref <309>: DATABASE ENTRY DATE: 1998-11-02
agaggcgaagaagtgaaggacttctatttttaattaacagaaaggtttaaaaaatagacattcaaatgaaaatacaaaatgcattctgaagtaaaattaaatttggatgatctattattttagattatcaacaccattttattaaacccaaagtatagaaaaattatgaaaacatattccactagttcgcattcccagatgttcttatattacagaatacaacaaaggaacaataaattgagagtaagacttattaacccctacactgtgggaattgagtcaatcgctgattgaaatcaatacttttctttcaagtgatactttcttagccctatggaaatatttgtaagataacagttatactgtctgcataataatgatttcgcaaagacacgtaagaattaaaaatggtaaaagctgccaatgaaggcactgatcaccgtggcttgcttcccaaagcagttctgaccaccaaccttctttcaaatgagtaggaggtaacatcaaaagatgaacggatccaatccacaaagactggacctcaaaaggcactgatcaaactactgatctgaaatgctcaaaatgcatcctctgtttgccgtccctcagtggtccactcagtg

SEQ ID NO: 11687 - protein, 353 aa, Rattus norvegicus
  ref <308>: DATABASE ACCESSION NUMBER: SWISS-Prot / P08753
  ref <309>: DATABASE ENTRY DATE: 2002-06-15
GCTLSAEDKAAVERSKMIDRNLREDGEKAAKEVKLLLLGAGESGKSTIVKQMKIIHEDGYSEDECKQYKVVVYSNTIQSIIAIIRAMGRLKIDFGEAARADDARQLFVLAGSAEEGVMTSELAGVIKRLWRDGGVQACFSRSREYQLNDSASYYLNDLDRISQTNYIPTQQDVLRTRVKTTGIVETHFTFKELYFKMFDVGGQRSERKKWIHCFEGVTAIIFCVALSDYDLVLAEDEEMNRMHESMKLFDSICNNKWFTDTSIILFLNKKDLFEEKIKRSPLTICYPEYTGSNTYEEAAAYIQCQFEDLNRRKDTKEVYTHFTCATDTKNVQFVFDAVTDVIIKNNLKECGLY

SEQ ID NO: 11688 - DNA, 1664 bp, Homo sapiens
  misc_feature (1)..(1664): n=a, c, g or t
  ref <308>: DATABASE ACCESSION NUMBER: EMBL / J03004
  ref <309>: DATABASE ENTRY DATE: 2000-03-04
gaattcgggtgggtcgggcggggccgagccgggccgtgggccgtgtgggggccgggcggcggccggcggacggcgggatgggctgcaccgtgagcgccgaggacaaggcggcggccgagcgctctaagatgatcgacaagaacctgcgggaggacggagagaaggcggcgcgggaggtgaagttgctgctgttgggtgctggggagtcagggaagagcaccatcgtcaagcagatgaagatcatccacgaggatggctactccgaggaggaatgccggcagtaccgggcggttgtctacagcaacaccatccagtccatcatggccattgtcaaagccatgggcaacctgcagatcgactttgccgacccctccagagcggacgacgccaggcagctatttgcactgtcctgcaccgccgaggagcaaggcgtgctccctgatgacctgtccggcgtcatccggaggctctgggctgaccatggtgtgcaggcctgctttggccgctcaagggaataccagctcaacgactcagctgcctactacctgaacgacctggagcgtattgcacagagtgactacatccccacacagcaagatgtgctacggacccgcgtaaagaccacggggatcgtggagacacacttcaccttcaaggacctacacttcaagatgtttgatgtgggtggtcagcggtctgagcggaagaagtggatccactgctttgagggcgtcacagccatcatcttctgcgtagccttgagcgcctatgacttggtgctagctgaggacgaggagatgaaccgcatgcatgagagcatgaagctattcgatagcatctgcaacaacaagtggttcacagacacgtccatcatcctcttcctcaacaagaaggacctgtttgaggagaagatcacacacagtcccctgaccatctgcttccctgagtacacaggggccaacaaatatgatgaggcagccagctacatccagagtaagtttgaggacctgaataagcgcaaagacaccaaggagatctacacgcacttcacgtgcgccaccgacaccaagaacgtgcagttcgtgtttgacgccgtcaccgatgncatcatcaagaacaacctgaaggactgcggcctcttctgaggggcagcggggcctggcgggtatggccaccgccgactttgtaccccccaacccctaggaagatgggcaagaagatcacgctccccgcctgttcccccgccgcttttctcctctttcctctctttgttctcagctccccctgtcccctcagctccagacgtaggggaggggttcgcacaggcctccctgtttgaagcctgcccttgtctgagatgctggtaatggccatggtacccttctggcttatgttctggtttttaacattgtcttgtctgtgtatgagggaggggcacatgctgtgatctccaaggctgcgtctggaggggcccctgcttctccagcctggacccccagctttgcccaacaccagcccctgccccagccaagtccaaatgtttacagggagcctcctgcccagtcccccaccccgccgcgcgggccccaaggaaaaagcacaagaacgtgagacgccaccattcctggaaaccacagtccacctgctcattctcgtagcttttt

SEQ ID NO: 11689 - protein, 354 aa, Homo sapiens; identical to SEQ ID NO: 5281
  ref <308>: DATABASE ACCESSION NUMBER: SWISS-Prot / P04899
  ref <309>: DATABASE ENTRY DATE: 2002-06-15

SEQ ID NO: 11690 - DNA, 496 bp, Rattus norvegicus; identical to SEQ ID NO: 7143
  misc_feature (1)..(496): n=a, c, g or t
  ref <308>: DATABASE ACCESSION NUMBER: EMBL / AI228407
  ref <309>: DATABASE ENTRY DATE: 1998-11-02

SEQ ID NO: 11691 - protein, 175 aa, Rattus norvegicus; identical to SEQ ID NO: 7144
  ref <308>: DATABASE ACCESSION NUMBER: SWISS-Prot / P13589
  ref <309>: DATABASE ENTRY DATE: 2001-10-16

SEQ ID NO: 11692 - DNA, 372 bp, Homo sapiens; identical to SEQ ID NO: 7145
  ref <308>: DATABASE ACCESSION NUMBER: EMBL / AI039838
  ref <309>: DATABASE ENTRY DATE: 2000-03-03

SEQ ID NO: 11693 - protein, 194 aa, Homo sapiens; identical to SEQ ID NO: 5813
  ref <308>: DATABASE ACCESSION NUMBER: SWISS-Prot / Q99653
  ref <309>: DATABASE ENTRY DATE: 2002-06-15

SEQ ID NO: 11694 - DNA, 592 bp, Rattus norvegicus
  ref <308>: DATABASE ACCESSION NUMBER: EMBL / AI228669
  ref <309>: DATABASE ENTRY DATE: 1998-11-02
tttttttttttatcatagaacctttattattttttctctaaattcttagaaacgtacataacgcccgtgctctagttgtgatatcatttgatagacatttaaaacacatcttcatgtataaatattttacatttggtccatagaacagataattttactaaataatactgtaattttttaaaacaggctctgtatatagtctgaataggcatatattacatatactttttatatagagataaatttacttggtgttctgagaataaatccttattgcaaaaaaaagcatatatgataatacaattatcttcttccctctgggcaaaaactaaaaaagaaaagttacacatattcacagttctcacagtaattgtacgacccttaacgttgtgctctataaggttaagtttgggtggaaatcaggggatttcttgccaaacatctcagaggtgcttacaaacatgaaatatactgcatttatctcaaaaaagacttgttctcagttttccatcaaagaacatcgagcagcaagaaggaaacctcctgccttcatcctaaagggcttcatagacaggtaggggaaggacggggc

SEQ ID NO: 11695 - protein, 599 aa, Rattus norvegicus
  ref <308>: DATABASE ACCESSION NUMBER: SWISS-Prot / P23978
  ref <309>: DATABASE ENTRY DATE: 2001-10-16
MATDNSKVADGQISTEVSEAPVASDKPKTLVVKVQKKAGDLPDRDTWKGRFDFLMSCVGYAIGLGNVWRFPYLCGKNGGGAFLIPYFLTLIFAGVPLFLLECSLGQYTSIGGLGVWKLAPMFKGVGLAAAVLSFWLNIYYIVIISWAIYYLYNSFTTTLPWKQCDNPWNTDRCFSNYSLVNTTNMTSAVVEFWERNMHQMTDGLDKPGQIRWPLAITLAIAWVLVYFCIWKGVGWTGKVVYFSATYPYIMLIILFFRGVTLPGAKEGILFYITPNFRKLSDSEVWLDAATQIFFSYGLGLGSLIALGSYNSFHNNVYRDSIIVCCINSCTSMFAGFVIFSIVGFMAHVTKRSIADVAASGPGLAFLAYPEAVTQLPISPLWAILFFSMLLMLGIDSQFCTVEGFITALVDEYPRLLRNRRELFIAAVCIVSYLIGLSNITQGGIYVFKLFDYYSASGMSLLFLVFFECVSISWFYGVNRFYDNIQEMVGSRPCIWWKLCWSFFTPIIVAGVFLFSAVQMTPLTMGSYVFPKWGQGVGWLMALSSMVLIPGYMAYMFLTLKGSLKQRLQVMIQPSEDIVRPENGPEQPQAGSSASKEAYI

SEQ ID NO: 11696 - DNA, 2298 bp, Homo sapiens
  ref <308>: DATABASE ACCESSION NUMBER: EMBL / X54673
  ref <309>: DATABASE ENTRY DATE: 1992-08-17
gaattccgctccggccgcaggatctccccaaggtggcagaaggaggccttctggagctgacccacccccgacgaccatcagggtgaggcaactccaaggtcctactctctttctgtgcctgttacccaccccgtcctcctagggtgcccttgagccgcaaaactgctgtccacgtggaccgggggtgacatcgcacgtccatctgccaggacccctgcgtccaaattccgagacatggcgaccaacggcagcaaggtggccgacgggcagatctccaccgaggtcagcgaggcccctgtggccaatgacaagcccaaaaccttggtggtcaaggtgcagaagaaggcggcagacctccccgaccgggacacgtggaagggccgcttcgacttcctcatgtcctgtgtgggctatgccatcggcctgggcaacgtctggaggttcccctatctctgcgggaaaaatggtgggggagccttcctgatcccctatttcctgacactcatctttgcgggggtcccactcttcctgctggagtgctccctgggccagtacacctccatcggggggctaggggtatggaagctggctcctatgttcaagggcgtgggccttgcggctgctgtgctatcattctggctgaacatctactacatcgtcatcatctcctgggccatttactacctgtacaactccttcaccacgacactgccgtggaaacagtgcgacaacccctggaacacagaccgctgcttctccaactacagcatggtcaacactaccaacatgaccagcgctgtggtggagttctgggagcgcaacatgcatcagatgacggacgggctggataagccaggtcagatccgctggccactggccatcacgctggccatcgcctggatccttgtgtatttctgtatctggaagggtgttggctggactggaaaggtggtctacttttcagccacatacccctacatcatgctgatcatcctgttcttccgtggagtgacgctgcccggggccaaggagggcatcctcttctacatcacacccaacttccgcaagctgtctgactccgaggtgtggctggatgcggcaacccagatcttcttctcatacgggctgggcctggggtccctgatcgctctcgggagctacaactctttccacaacaatgtctacagggactccatcatcgtctgctgcatcaattcgtgcaccagcatgttcgcaggattcgtcatcttctccatcgtgggcttcatggcccatgtcaccaagaggtccattgctgatgtggccgcctcaggccccgggctggcgttcctggcatacccagaggcggtgacccagctgcctatctccccactctgggccatcctcttcttctccatgctgttgatgctgggcattgacagccagttctgcactgtggagggcttcatcacagccctggtggatgagtaccccaggctcctccgcaaccgcagagagctcttcattgctgctgtctgcatcatctcctacctgatcggtctctctaacatcactcaggggggtatttatgtcttcaaactctttgactactactctgccagtggcatgagcctgctgttcctcgtgttctttgaatgtgtctctatttcctggttttacggtgtcaaccgattctatgacaatatccaagagatggttggatccaggccctgcatctggtggaaactctgctggtctttcttcacaccaatcattgtggcgggcgtgttcattttcagtgctgtgcagatgacgccactcaccatgggaaactatgttttccccaagtggggccagggtgtgggctggctgatggctctgtcttccatggtcctcatccccgggtacatggcctacatgttcctcgccctaaagggctccctgaagcagcgcatccaagtcatggtccagcccagcgaagacactgttcgcccagagaatggtcctgagcacgcccaggcgggcagctccaccagcaaggaggcctacatctagggtgggggccactcaccgacccgacactctcaccccccgacctggctgagtgcgaccaccacttgatgtctgaggataccttccatctcaacctacctcgagtggtgatccagacaccatcaccacgcagagaggggaggtgggaggacagttagacccctgggtgggccctgccgtgggcaaggatacccggtggcttctggcactggcgggctggtgacctttttaatccaggccccatcagcatcccactcctggcgggat

SEQ ID NO: 11697 - protein, 599 aa, Homo sapiens
  ref <308>: DATABASE ACCESSION NUMBER: SWISS-Prot / P30531
  ref <309>: DATABASE ENTRY DATE: 2001-10-16
MATNGSKVADGQISTEVSEAPVANDKPKTLVVKVQKKAADLPDRDTWKGRFDFLMSCVGYAIGLGNVWRFPYLCGKNGGGAFLIPYFLTLIFAGVPLFLLECSLGQYTSIGGLGVWKLAPMFKGVGLAAAVLSFWLNIYYIVIISWAIYYLYNSFTTTLPWKQCDNPWNTDRCFSNYSMVNTTNMTSAVVEFWERNMHQMTDGLDKPGQIRWPLAITLAIAWILVYFCIWKGVGWTGKVVYFSATYPYIMLIILFFRGVTLPGAKEGILFYITPNFRKLSDSEVWLDAATQIFFSYGLGLGSLIALGSYNSFHNNVYRDSIIVCCINSCTSMFAGFVIFSIVGFMAHVTKRSIADVAASGPGLAFLAYPEAVTQLPISPLWAILFFSMLLMLGIDSQFCTVEGFITALVDEYPRLLRNRRELFIAAVCIISYLIGLSNITQGGIYVFKLFDYYSASGMSLLFLVFFECVSISWFYGVNRFYDNIQEMVGSRPCIWWKLCWSFFTPIIVAGVFIFSAVQMTPLTMGNYVFPKWGQGVGWLMALSSMVLIPGYMAYMFLALKGSLKQRIQVMVQPSEDTVRPENGPEHAQAGSSTSKEAYI

SEQ ID NO: 11698 - DNA, 2113 bp, Rattus norvegicus
  ref <308>: DATABASE ACCESSION NUMBER: Refseq / NM_019191
  ref <309>: DATABASE ENTRY DATE: 2002-11-05
gggcagcgcggagcccgtcggaagaggaaggaacaaaaggtccggggcccggctcggacgggccgggaccaggcgctgggtgcagggtagatttaccaggctgtttctgagtgtggattgttacccttggtaagaaaatgtcgtccatcttgccattcactccgccagtggtgaagagacttctgggatggaaaaaatcagccggtgggtctggaggagcaggtggtggagaacagaatggacaggaagaaaagtggtgtgaaaaagcagtgaaaagtctggtgaaaaagctaaagaaaacaggacgattagatgagcttgagaaagccatcaccactcagaattgcaatactaagtgtgtcaccataccaagcacttgctctgaaatttggggactgagtacagcaaatacggtagatcagtgggacacaacaggcctttacagcttctctgaacaaaccaggtctcttgatggtcgtcttcaggtgtctcatcggaaagggctgccacatgttatatattgccggctgtggcgctggccagaccttcacagccatcatgagctcaaggcgatcgagaactgcgaatacgctttcagtctgaaaaaagatgaagtgtgtgtgaacccttaccactaccagagggtggagacaccagtcttgcctccagtcttggtgcctcggcacacagagattctaacagaactgccgcctctggatgactatacccactccattccagaaaacacaaatttcccagcaggaattgagccacagagtaattacatcccagaaacaccaccacctggatatatcagtgaagatggagaaactagtgaccaacagttgaaccaaagtatggacacaggctctccggctgaactgtctcctaccactctctcccctgtcaatcacagcttggatttgcagccagttacttattcagaacctgcattttggtgttcaatcgcatattatgaactaaaccagagggttggagagaccttccatgcgtcacagccctcactcactgtagacggctttacagatccatcgaactcggagaggttctgcttaggtttgctctccaacgttaacagaaacgctactgtagaaatgaccagaaggcatataggaaggggagtgcgcttgtattacataggtggggaagtgtttgccgagtgcctaagtgatagtgcgatctttgtgcagagccccaactgtaaccagagatacggctggcaccccgcgacagtgtgcaaaatcccaccaggctgtaacctgaagatcttcaacaaccaagaatttgctgctcttctggctcagtctgttaaccagggttttgaggccgtttatcagctgactcgaatgtgcaccataagaatgagcttcgtgaaggggtggggagcagaataccggaggcagacagtaacaagtactccttgctggattgaacttcatctgaatggccccctgcagtggttggacaaagtattaactcagatgggatccccgtcagtgcgatgctcaagcatgtcctaaagtccgtcagcagtggagctcattggaagacttaacgtaccaactcctccgccacagtactcgtgtgtgatcccgtggactgtgctagtcaaaacccagagcgaaaacagcacttgaggtctcatcagttaaagcaccttgtggagtctgtttcctacatttgaattttagatgggaaattagtgtctagaaatgccctcccagaggggacaaagaagacttaaagacttaatgatgtctcgttgggcataagacagtgtcccaaaggttattaataccagtagtagttgtgtacagtaacgtgtccagacccagtattgcagtgctctgctgtttgtataccttcttagtgtgcataaatgaggtgtgtgctgctgcttggtctaggcaagcctttataaaattacagtacctaatctgttattcccacttctccgttatttttgtgtcttttttaatatataatatatatatcgagattttcaaattatcatttagaagcagattttccttgtagaaactaatttttctgccttttaccaaaaataaactcgtgggggaagactcgtgcc

SEQ ID NO: 11699 - protein, 467 aa, Rattus norvegicus; identical to SEQ ID NO: 302
  ref <308>: DATABASE ACCESSION NUMBER: SWISS-Prot / O70436
  ref <309>: DATABASE ENTRY DATE: 2002-06-15

SEQ ID NO: 11700 - DNA, 2041 bp, Homo sapiens; identical to SEQ ID NO: 303
  ref <308>: DATABASE ACCESSION NUMBER: EMBL / U68018
  ref <309>: DATABASE ENTRY DATE: 2000-03-04

SEQ ID NO: 11701 - protein, 467 aa, Homo sapiens; identical to SEQ ID NO: 304
  ref <308>: DATABASE ACCESSION NUMBER: SWISS-Prot / Q15796
  ref <309>: DATABASE ENTRY DATE: 2002-06-15

SEQ ID NO: 11702 - DNA, 1013 bp, Rattus norvegicus; identical to SEQ ID NO: 2236
  ref <308>: DATABASE ACCESSION NUMBER: EMBL / D86557
  ref <309>: DATABASE ENTRY DATE: 1997-05-14

SEQ ID NO: 11703 - protein, 309 aa, Rattus norvegicus; identical to SEQ ID NO: 2237
  ref <308>: DATABASE ACCESSION NUMBER: SWISS-Prot / BAA19880
  ref <309>: DATABASE ENTRY DATE: 2003-02-01

SEQ ID NO: 11704 - DNA, 2481 bp, Homo sapiens; identical to SEQ ID NO: 6406
  ref <308>: DATABASE ACCESSION NUMBER: EMBL / U09578
  ref <309>: DATABASE ENTRY DATE: 2000-03-04

SEQ ID NO: 11705 - protein, 383 aa, Homo sapiens
  misc_feature (1)..(383): Xaa=Unknown amino acid
MDGETAEEQGGPVPPPVAPGGPGLGGAPGGRREPKKYAVTDDYQLSKQVLGLGVNGKVLECFHRRTGQKCALKLLYDSPKARQEVDHHWQASGGPHIVCILDVYENMHHGKRCLLIIMECMEGGELFSRIQERGDQAFTEREAAEIMRDIGTAIQFLHSHNIAHRDVKPENLLYTSKEKDAVLKLTDFGFAKETTQNALQTPCYTPYYVAPEVLGPEKYDKSCDMWSLGVIMYILLCGFPPFYSNTGQAISPGMKRRIRLGQYGFPNPEWSEVSEDAKQLIRLLLKTDPTERLTITQFMNHPWINQSMVVPQTPLHTARVLQEDKDHWDEVKEEMTSALATMRVDYDQVKIKDLKTSNNRLLNKRRKKQAGSSSASQGCNNQX

SEQ ID NO: 11706 - DNA, 440 bp, Rattus norvegicus
  ref <308>: DATABASE ACCESSION NUMBER: EMBL / AI230130
  ref <309>: DATABASE ENTRY DATE: 1999-01-22
ctaggaaaaatcttttattacaaaagtttttacaagtaggcatggaactgactcccagcctgtaggctctggtgcctgcctttctaaaggcccagacagaaagttcccagggccctgaagatcagaacaaaagtcccactccgaatggacctcaccctgagtcacaggctgagacctgacatcctaggaagagagaggaggattaattgagaactcagggctgcccacgtaggctttctgtgaatgtagatagggaacgttggtttccaggctgcttcagggtcagagatgccctctggaagggagggatagtagggagttgggagaggctcccagttcacccctagagggcgcctggagacttggcagaacgcacctggcgcaggagcaggaccagcgccgccaagatcaggactgtgaagagcagcaggagagcgacc

SEQ ID NO: 11707 - protein, 495 aa, Rattus norvegicus
  ref <308>: DATABASE ACCESSION NUMBER: SWISS-Prot / O35795
  ref <309>: DATABASE ENTRY DATE: 2001-10-16
MAGKLVSLVPPLLLAAAGLTGLLLLCVPTQDVREPPALKYGIVLDAGSSHTSMFVYKWPADKENDTGIVGQHSSCDVQGGGISSYANDPSKAGQSLVRCLEQALRDVPRDRHASTPLYLGATAGMRPFNLTSPEATARVLEAVTQTLTQYPFDFRGARILSGQDEGVFGWVTANYLLENFIKYGWVGRWIRPRKGTLGAMDLGGASTQITFETTSPSEDPGNEVHLRLYGQHYRVYTHSFLCYGRDQILLRLLASALQIHRFHPCWPKGYSTQVLLQEVYQSPCTMGQRPRAFNGSAIVSLSGTSNATLCRDLVSRLFNISSCPFSQCSFNGVFQPPVAGNFIAFSAFYYTVDFLTTVMGLPVGTLKQLEEATEITCNQTWTELQARVPGQKTRLADYCAVAMFIHQLLSRGYHFDERSFREVVFQKKAADTAVGWALGYMLNLTNLIPADLPGLRKGTHFSSWVALLLLFTVLILAALVLLLRQVRSAKSPGAL

SEQ ID NO: 11708 - DNA, 1500 bp, Homo sapiens
  ref <308>: DATABASE ACCESSION NUMBER: EMBL / U91510
  ref <309>: DATABASE ENTRY DATE: 1997-10-16
ctcccgcgcgcccgcccgcccatggccgggaaggtgcggtcactgctgccgccgctgctgctggccgccgcgggcctcgccggcctcctactgctgtgcgtccccacccgcgacgtccgggagccgcccgccctcaagtatggcatcgtcctggatgctggttcttcacacacgtccatgtttatctacaagtggccggcagacaaggagaacgacacaggcattgtgggccagcacagctcctgtgatgttccaggtgggggcatctccagctatgcagacaacccttctggggccagccagagtcttgttggatgcctcgaacaggcgcttcaggatgtgcccaaagagagacacgcgggcacacccctctacctgggagccacagcgggtatgcgcctgctcaacctgaccaatccagaggcctcgaccagtgtgctcatggcagtgactcacacactgacccagtacccctttgacttccggggtgcacgcatcctctcgggccaagaagaaggggtgtttggctgggtgactgccaactacctgctggagaacttcatcaagtacggctgggtgggccggtggttccggccacggaaggggacactgggggccatggacctggggggtgcctctacccagatcacttttgagacaaccagtccagctgaggacagagccagcgaggtccagctgcatctctacggccagcactaccgagtctacacccacagcttcctctgctatggccgtgaccaggtcctccagaggctgctggccagcgccctccagacccacggcttccacccctgctggccgaggggcttttccacccaagtgctgctcggggatgtgtaccagtcaccatgcaccatggcccagcggccccagaacttcaacagcagtgccagggtcagcctgtcagggagcagtgacccccacctctgccgagatctggtttctgggctcttcagcttctcctcctgccccttctcccgatgctctttcaatggggtcttccagcccccagtggctgggaactttgtggccttctctgccttcttctacactgtggactttttgcggacttcgatggggctgcccgtggccaccctgcagcagctggaggcagccgcagtgaatgtctgcaaccagacctgggctcagcagctgctgagtcgcggctacggcttcgatgagcgcgccttcggcggcgtgatcttccagaagaaggccgcggacactgcagtgggctgggcgctcggctacatgctgaacctgaccaacctgatccccgccgacccgccggggctgcgcaagggcacagacttcagctcctgggtcgtcctcctgctgctcttcgcctccgcgctcctggctgcgcttgtcctgctgctgcgtcaggtgcactccgccaagctgccaagcaccatttaggggccgacgggggcagctgccccatccctcccccaacccctgtatccccaccccgtactc

SEQ ID NO: 11709 - protein, 495 aa, Homo sapiens
  ref <308>: DATABASE ACCESSION NUMBER: SWISS-Prot / Q9Y5L3
  ref <309>: DATABASE ENTRY DATE: 2001-10-16
MAGKVRSLLPPLLLAAAGLAGLLLLCVPTRDVREPPALKYGIVLDAGSSHTSMFIYKWPADKENDTGIVGQHSSCDVPGGGISSYADNPSGASQSLVGCLEQALQDVPKERHAGTPLYLGATAGMRLLNLTNPEASTSVLMAVTHTLTQYPFDFRGARILSGQEEGVFGWVTANYLLENFIKYGWVGRWFRPRKGTLGAMDLGGASTQITFETTSPAEDRASEVQLHLYGQHYRVYTHSFLCYGRDQVLQRLLASALQTHGFHPCWPRGFSTQVLLGDVYQSPCTMAQRPQNFNSSARVSLSGSSDPHLCRDLVSGLFSFSSCPFSRCSFNGVFQPPVAGNFVAFSAFFYTVDFLRTSMGLPVATLQQLEAAAVNVCNQTWAQLQARVPGQRARLADYCAGAMFVQQLLSRGYGFDERAFGGVIFQKKAADTAVGWALGYMLNLTNLIPADPPGLRKGTDFSSWVVLLLLFASALLAALVLLLRQVHSAKLPSTI

SEQ ID NO: 11710 - DNA, 419 bp, Rattus norvegicus
  ref <308>: DATABASE ACCESSION NUMBER: EMBL / AI232477
  ref <309>: DATABASE ENTRY DATE: 2000-03-03
aaagtttgtatgctgctttattgtatgctacagccagtgtatataaaacagttaaaccttgtgaaacagagatccatgaaaatccagagaggtagatgttaaggactgacgagtagaagattatgtgtatggcacgtgttaaagagaagcttctgtacagacttcaaacttagtgacttcgaacttagttctcgtgaatattcactggttcatgaaaagtagtttgagaaacctcgagatatatgactacaaaaaggagcagactttctggggtctgaagggatttgtacttgaagacactccagtcagcagagggtcatgttgagcattctgcagacagaactgtttcaagtctgcagctgcctgggaaacctttacgcggttgaacccgggcttcagccggagttgctgaaccacct

SEQ ID NO: 11711 - protein, 68 aa, Rattus norvegicus
  ref <308>: DATABASE ACCESSION NUMBER: SWISS-Prot / P30670
  ref <309>: DATABASE ENTRY DATE: 2002-06-15
MSGSSSVAAMKKVVQQLRLEAGLNRVKVSQAAADLKQFCLQNAQHDPLLTGVSSSTNPFRPQKVCSFL

SEQ ID NO: 11712 - DNA, 1274 bp, Homo sapiens
  ref <308>: DATABASE ACCESSION NUMBER: EMBL / AK022537
  ref <309>: DATABASE ENTRY DATE: 2002-08-06
aaaaggagccaagaccatggcgaaagccggggataagagcggcagcagcgggaagaaaagtctaaaacggaaagccgctgccgaagaacttcaggaggctgcaggcgctggggatggggcgacggaaaacggggtccaacccccgaaagcggctgcctttccgccaggctttagcatttcggagattaaaaacaaacagcggcgacacttaatgttcacgcggtggaaacagcagcagcggaaggaaaagttggcagctaagaaaaaacttaaaaaagaaagagaggctcttggcgataaggctccaccaaagcctgtacccaagaccattgacaaccagcgagtgtatgatgaaaccacagtagaccctaatgatgaagaggtcgcttatgatgaagctacagatgaatttgcttcttacttcaacaaacagacttctcccaagattctcatcacaacatcagatagacctcatgggagaacagtacgactctgtgaacagctctccacagttataccaaactcacatgtttattacagaagaggactggctctgaaaaaaattattccacagtgcatcgcaagagatttcacagacctgattgttattaatgaagatcgtaaaaccccaaatggacttattttgagtcacttgccaaatggcccaactgctcattttaaaatgagcagtgttcgtcttcgtaaagaaattaagagaagaggcaaggaccccacagaacacatacctgaaataattctgaataattttacaacacggctgggtcattcaattggacgtatgtttgcatctctctttcctcataatcctcaatttatcggaaggcaggttgccacattccacaatcaacgggattacatattcttcagatttcacagatacatattcaggagtgaaaagaaagtgggaattcaggaacttggaccacgttttaccttaaaattaaggtctcttcagaaaggaacctttgattctaaatatggagagtatgaatgggtccataagccccgggaaatggatacaagtagaagaaaattccatttataaagtactgagagaatgatattggattttgctgaacaggcctatcttgaactttggtaaattatttttgacagaatactcttttcaaaatggcatttgctgatttcataaacctttcacgtctggacgaattaccaaatgccatgaattgccactgtgtgtttatgtagaaaatacaaataaaagttattttgatggcttaggtttcctt

SEQ ID NO: 11713 - protein, 68 aa, Homo sapiens; identical to SEQ ID NO: 11711

SEQ ID NO: 11714 - DNA, 480 bp, Rattus norvegicus
  ref <308>: DATABASE ACCESSION NUMBER: EMBL / AI233365
  ref <309>: DATABASE ENTRY DATE: 2000-03-03
tttttttttttttttttttttttttggttttattattatttatttttagaaaagaagagaaggtgtatacgatgcaaagtctcatacagtatgctattgttggttgcctcctaacaccagccctgtcttgtgactcagtgatggagatgatggacagcagggatgtgctggagactgatcacagacacacaatacaccacagtaaacttgaggacagatgatgctgggctagcctgttccaaaagcaagccaacacatggtagaaagcaaggaaaccaatggacctctctctgtggggaaggcatgggtgtgaacccacaagcattcccccgtcccacacacccaccacaccctacttcatcagaccacagcaatacacaaaatggaatggtcctttggtgtttctcagcaaggatattcaggttcccagtgtcttgtttctgattttcttttcatatttgagtcccgaattcttaaagc

SEQ ID NO: 11715 - DNA, 445 bp, Homo sapiens
  misc_feature (1)..(445): n=a, c, g or t
  ref <308>: DATABASE ACCESSION NUMBER: EMBL / AW163444
  ref <309>: DATABASE ENTRY DATE: 2000-03-04
ttccgggtgtcacctccagagggcgccggctgcggagccgccctcagagtcgcgaggccggacgcagcgcggcgccgccccactcgccccagccgccgccatgaaggccgtggtgcagcgcgtcacccgggccagcgtcacagttggaggagagcagattagtgccattggaaggggcatatgtgtgttgctgggtatttccctggaggatacgcanaaggaactggaacacatggtccgaaagattctaaacctgcgtgtatttgaggatgagagtgggaagcactggtcgaagagtgtgatggacaaacagtacgagattctgtgtgtcagccagtttaccctccagtgtgtcctgaagggaaacaagccctgatttcacctagcaatgccccacgagcaggcagaggggctctaccaccacttcctggagcagctgcgtaaa

SEQ ID NO: 11716 - DNA, 392 bp, Rattus norvegicus
  ref <308>: DATABASE ACCESSION NUMBER: EMBL / K02932
  ref <309>: DATABASE ENTRY DATE: 2000-03-04
atggtggctgcaaagaagacgaaaaagtctctggagtcaatcaactctaggctccaacttgttatgaaaagtggaaagtacgtgctggggtacaaacagactctgaagatgatcagacaaggcaaagcgaaattggttatcctcgccaacaactgtccagctttgaggaaatctgaaatagaatactatgccatgttggctaaaactggtgtccatcactacagtggcaataacattgaattgggcacagcgtgtggaaaatactacagagtatgcacactggctatcattgacccaggtgattccgatattattagaagcatgccagaacagactggtgagaagtaaacaagaaagttctcctttaataaaactttgccagagctcctttt

SEQ ID NO: 11717 - protein, 114 aa, Rattus norvegicus
  ref <308>: DATABASE ACCESSION NUMBER: SWISS-Prot / P04645
  ref <309>: DATABASE ENTRY DATE: 2002-06-15
VAAKKTKKSLESINSRLQLVMKSGKYVLGYKQTLKMIRQGKAKLVILANNCPALRKSEIEYYAMLAKTGVHHYSGNNIELGTACGKYYRVCTLAIIDPGDSDIIRSMPEQTGEK

SEQ ID NO: 11718 - DNA, 5128 bp, Homo sapiens
  ref <308>: DATABASE ACCESSION NUMBER: EMBL / AF104913
  ref <309>: DATABASE ENTRY DATE: 2002-04-18
caagcgacacaaatgaacacgccttctcagccccgccagcacttctaccctagccgggcccagcccccgagcagtgcagcctcccgagtgcagagtgcagcccctgcccgccctggcccagctgcccatgtctaccctgctggatcccaagtaatgatgatcccttcccagatctcctacccagcctcccagggggcctactacatccctggacaggggcgttccacatacgttgtcccgacacagcagtaccctgtgcagccaggagccccaggcttctatccaggtgcaagccctacagaatttgggacctacgctggcgcctactatccagcccaaggggtgcagcagtttcccactggcgtggcccccgccccagttttgatgaaccagccaccccagattgctcccaagagggagcgtaagacgatccgaattcgagatccaaaccaaggaggaaaggatatcacagaggagatcatgtctggggcccgcactgcctccacacccacccctccccagacgggaggcggtctggagcctcaagctaatggggagacgccccaggttgctgtcattgtccggccagatgaccggtcacagggagcaatcattgctgaccggccagggctgcctggcccagagcatagcccttcagaatcccagccttcgtcgccttctccgaccccatcaccatccccagtcttggaaccggggtctgagcctaatctcgcagtcctctctattcctggggacactatgacaactatacaaatgtctgtagaagaatcaacccccatctcccgtgaaactggggagccatatcgcctctctccagaacccactcctctcgccgaacccatactggaagtagaagtgacacttagcaaaccggttccagaatctgagttttcttccagtcctctccaggctcccacccctttggcatctcacacagtggaaattcatgagcctaatggcatggtcccatctgaagatctggaaccagaggtggagtcaagcccagagcttgctcctcccccagcttgcccctccgaatcccctgtgcccattgctccaactgcccaacctgaggaactgctcaacggagccccctcgccaccagctgtggacttaagcccagtcagtgagccagaggagcaggccaaggaggtgacagcatcagtggcgccccccaccatcccctctgctactccagctacggctccttcagctacttccccagctcaggaggaggaaatggaagaagaagaagaagaggaagaaggagaagcaggagaagcaggagaagctgagagtgagaaaggaggagaggaactgctccccccagagagtacccctattccagccaacttgtctcagaatttggaggcagcagcagccactcaagtggcagtatctgtgccaaagaggagacggaaaattaaggagctaaataagaaggaggctgttggagaccttctggatgccttcaaggaggcgaacccggcagtaccagaggtggaaaatcagcctcctgcaggcagcaatccaggcccagagtctgagggcagtggtgtgcccccacgtcctgaggaagcagatgagacctgggactcaaaggaagacaaaattcacaatgctgagaacatccagcccggggaacagaagtatgaatataagtcagatcagtggaagcctccaaacctagaggagaaaaaacgttacgaccgtgagttcctgcttggttttcagttcatctttgccagtatgcagaagccagagggattgccacatatcagtgacgtggtgctggacaaggccaataaaacaccactgcggccactggatcccactagactacaaggcataaattgtggcccagacttcactccatcctttgccaaccttggccggacaacccttagcacccgtgggcccccaaggggtgggccaggtggggagctgccccgtgggccgcaggctggcctgggaccccggcgctctcagcagggaccccgaaaagaaccacgcaagatcattgccacagtgttaatgaccgaagatataaaactgaacaaagcagagaaagcctggaaacccagcagcaagcggacggcggctgataaggatcgaggggaagaagatgctgatggcagcaaaacccaggacctattccgcagggtgcgctccatcctgaataaactgacaccccagatgttccagcagctgatgaagcaagtgacgcagctggccatcgacaccgaggaacgcctcaaaggggtcattgacctcatttttgagaaggccatttcagagcccaacttctctgtggcctatgccaacatgtgccgctgcctcatggcgctgaaagtgcccactacggaaaagccaacagtgactgtgaacttccgaaagctgttgttgaatcgatgtcagaaggagtttgagaaagacaaagatgatgatgaggtttttgagaagaagcaaaaagagatggatgaagctgctacggcagaggaacgaggacgcctgaaggaagagctggaagaggctcgggacatagcccggcggcgctctttagggaatatcaagtttattggagagttgttcaaactgaagatgttaacagaggcaataatgcatgactgtgtggtcaaactgcttaagaaccatgatgaagagtcccttgagtgcctttgtcgtctgctcaccaccattggcaaagacctggactttgaaaaagccaagccccgaatggatcagtatttcaaccagatggaaaaaatcattaaagaaaagaagacgtcatcccgcatccgctttatgctgcaggacgtgctggatctgcgagggagcaattgggtgccacgccgaggggatcagggtcccaagaccattgaccagatccataaggaggctgagatggaagaacatcgagagcacatcaaagtgcagcagctcatggccaagggcagtgacaagcgtcggggcggtcctccaggccctcccatcagccgtggacttccccttgtggatgatggtggctggaacacagttcccatcagcaaaggtagccgccccattgacacctcacgactcaccaagatcaccaagcctggctccatcgattctaacaaccagctctttgcacctggagggcgactgagctggggcaagggcagcagcggaggctcaggagccaagccctcagacgcagcatcagaagctgctcgcccagctactagtactttgaatcgcttctcagcccttcaacaagcggtacccacagaaagcacagataatagacgtgtggtgcagaggagtagcttgagccgagaacgaggcgagaaagctggagaccgaggagaccgcctagagcggagtgaacggggaggggaccgtggggaccggcttgatcgtgcgcggacacctgctaccaagcggagcttcagcaaggaagtggaggagcggagtagagaacggccctcccagcctgaggggctgcgcaaggcagctagcctcacggaggatcgggaccgtgggcgggatgccgtgaagcgagaagctgccctacccccagtgagccccctgaaggcggctctctctgaggaggagttagagaagaaatccaaggctatcattgaggaatatctccatctcaatgacatgaaagaggcagtccagtgcgtgcaggagctggcctcaccctccttgctcttcatctttgtacggcatggtgtcgagtctacgctggagcgcagtgccattgctcgtgagcatatggggcagctgctgcaccagctgctctgtgctgggcatctgtctactgctcagtactaccaagggttgtatgaaatcttggaattggctgaggacatggaaattgacatcccccacgtgtggctctacctagcggaactggtaacacccattctgcaggaaggtggggtgcccatgggggagctgttcagggagattacaaagcctctgagaccgttgggcaaagctgcttccctgttgctggagatcctgggcctcctgtgcaaaagcatgggtcctaaaaaggtggggacgctgtggcgagaagccgggcttagctggaaggaatttctacctgaaggccaggacattggtgcattcgtcgctgaacagaaggtggagtataccctgggagaggagtcggaagcccctggccagagggcactcccctccgaggagctgaacaggcagctggagaagctgctgaaggagggcagcagtaaccagcgggtgttcgactggatagaggccaacctgagtgagcagcagatagtatccaacacgttagttcgagccctcatgacggctgtctgctattctgcaattatttttgagactcccctccgagtggacgttgcagtgctgaaagcgcgagcgaagctgctgcagaaatacctgtgtgacgagcagaaggagctacaggcgctctacgccctccaggcccttgtagtgaccttagaacagcctcccaacctgctgcggatgttctttgacgcactgtatgacgaggacgtggtgaaggaggatgccttctacagttgggagagtagcaaggaccccgctgagcagcagggcaagggtgtggcccttaaatctgtcacagccttcttcaagtggctccgtgaagcagaggaggagtctgaccacaactgagggctggtggggccggggacctggagccccatggacacacagatggcccggctagccgcctggactgcaggggggcggcagcagcggcggtggcagtgggtgcctgtagtgtgatgtgtctgaactaataaagtggctgaagaggcaggatggcttggggctgcctgggcccccctccaggatgccgccaggtgtccctctcctccccctggggcacagagatatattatatataaagtcttgaaatttggtgtgtcttggggtggggaggggcaccaacgcctgcccctggggtccttttttttattttctgaaaatcactctcgggactgccgtcctcgctgctgggggcatatgccccagcccctgtaccacccctgctgttgcctgggcagggggaagggggggcacggtgcctgtaattattaaacat

SEQ ID NO: 11719 - protein, 1395 aa, Homo sapiens
  ref <308>: DATABASE ACCESSION NUMBER: SWISS-Prot / Q04637
  ref <309>: DATABASE ENTRY DATE: 2001-10-16
MSGARTASTPTPPQTGGSLEPQANGETPQVAVIVRPDDRSQGAIIADRPGLPGPEHSPSESQPSSPSPTPSPSPVLEPGSEPNLAVLSIPGDTMTTIQMSVEESTPISRETGEPYRLSPEPTPLAEPILEVEVTLSKPVPESEFSSSPLQAPTPLASHTVEIHEPNGMVPSEDLEPEVESSPELAPPPACPSESPVPIAPTAQPEELLNGAPSPPAVDLSPVSEPEEQAKEVTASVAPPTIPSATPATAPSATSPAQEEEMEEEEDEEEGEVGEAGEGESEKRGEELLPPESTPIPANLSQNLEAAAATQVAVSVPKRRRKIKELNKKEAVGDLLDAFKEANPAVPEVENQPPAGSNPGPESEGSGVPPRPEEADETWDSKEDKIHNAENIQPGEQKYEYKSDQWKPPNLEEKKRYDREFLLGFQFIFCQMQKPEGLPHISDVVLDKANKTPLRPLDPTRLQGINCGPDFTPSFANLGRTTLSTRGPPRGGPGGELPRGPAGLGPRRSQQGPRKEPRKIIATVLMTEDIKLNKAEKAWKPSSKRTAADKDRGEEDADGSKTQDLFRRWRSILNKLTPQMFQQLMKQVTQLAIDTEDASKGSLTSFLRRPFQSPTSLWPIQHVPLPHGAESAHYGKPTVTVNFRKLLLNRCQKEFEKDKDDDEVFEKKQKEMDEAATAEERERLKEELEEARDIARRCSLGNIKFIGELFKLKMLTEAIMHDCVVKLLKNHDEESLECLCRLLTTIGKDLDFEKAKPRMDQYFNQMEKIIKEKKTSSRIRFMLQDVLDLRGSNWVPRRGDQGPRPLTRSIRRLRWKTSRAHQSAAAHARAVTSVGAVLQALPSAVDFPLWMMVADTVPISKGSRPIDTSRLTKITKPGSIDSNNQLFAPGGRLSWGKGSSGGSGAQPSDAASEAARPATSTLIRFSALQQAVPTESTDNRRVVQRSSLSRERGEKAGDRGDRLERVNGEGTVGTGLIVSRTPATKRTFSKEVEERSRERPSQPEGLRKAASLTEDRDRGRDAVKREAALPPVSPLKAALSEEELEKKSKAIIEEYLHLNDMKEAVQCVQELASPSLLFIFVRHGVESTLERSAIAREHMGQLLHQLLCAGHLSTAQYYQGLYEILELAEDMEIDIPHVWLYLAELVTPILQEGGVPMGELFREITKPLRPLGKAASLLLEILGLLCKSMGPKKVGTLWREAGLSWKEFLPEGQDIGAFVAEQKVEYTLGEESEAPGQRALPSEELNRQLEKLLKEGSSNQRVFDWIEANLSEQIVSNTLVRALMTAVCYSAIIFETPLRVDVAVLKGDIVLQKYLCDEAEGATGALRLQALVVTLEQPPNLLRMFFDALYDEDVVKEDAFYSWESSKDPAEQQGKGVALKSVTAFFKWLREVRGGV

SEQ ID NO: 11720 - DNA, 3834 bp, Rattus norvegicus
  ref <308>: DATABASE ACCESSION NUMBER: Refseq / NM_031668
  ref <309>: DATABASE ENTRY DATE: 2002-11-05
atgaaatatgccctgaagcgcctaatcactgggcttggggtgggccgagaagctgctaggccctgctacagtctggcgctagcacagctgttgcagtcttttgaagacatccagttgtgtgacatcctgggacagatacaagaaaaatacaatctacaagcaatgaacaaggcaatgatgagacctactctctttgcaaacctgtttgcagtgcttgccctctttcagtcaggacgcctagtgaaggataaagaagccctgatgaagtgcgtgagattgctgaagatattgtcccatcactacaaccacttacaggggcagccagtaaaggctctggtggacatcctctccgaggtcccagagtccatgttccaggagatcctgccaaaggtcctcaagggggacatgaaagtgatcctcagctctcccaagtacttggagctcttcctcttggctcggcagagggtgccagcagagctcgagtcactggttggctcggttgatctgttctcagaagacaacattcccagtctggtgaatatactgaaggtggcggccaactctgtaaagaaggagcagaagctgcctgatgtggctctgaacctgctccgcctggcacttcaggagaacaaatttgaacggttctggaaggaggttttggaggaggggctgctgaagaagccatcctatacatccagctacatgtgtttccgcctactgggtgcatctctgccgcttctgtcagatgagcagttgcagttggtgatgcgaggagacttgatccgacattttggggagcacatggtcgtttctaagtcccaaaacccgctaaggttcattccagagataagtgcatatgtgggtaccttcctcgaggggtgccaggacgatcccaagcggcaattcactgtgatggtggccttcacggccatcaccaatcaaggtctccctgtcatgcctaccttctggcgtgtcacgcggttcttgaatactgaagccctgcagaactacgtgacctggctgcgggacatgttcctgcagcctgacctggactccttggttgacttcagcactgccaaccagaagagagttcaggacgcctccttgaatgtgcctgagcgaacagtattccggctccggaagtggatcatccaccgcctggtcagccttgtggatcatctgcacctggagaaggatgaagctgtggtcgagcaaatagccaggttttgcttgttccatgccttctttaagacaaagaaagctactccccagatcccagagacaaagcagcacttctccttccccttggaggacggcaaccgtggggtcattgtcagtgccttcttcagcctactgcagaccctcagtgtgaagttcagacagacaccagacctggctgaaaatgggaagccctggacttaccgcctggtgcagctggcagacatgctgttgaagcataaccgcaacgtagccaatgtgacacccttgacagcacagcagcgtcaggcctgggaccagatgatgagtacgctgaaggaactggaggcccagtcctcagagacccgggccattgccttccagcacctgctgcttctggtgggcctccacctcttcaagtcccctgcagaaagctgtgacgtcctaggagacattcagacttgcatcaagaaaagcatggagcagaatctgcgccgatcacgctctagagccaaagcctcccaggagccagtgtgggtggaggtgatggtggagatcttgctgtccttgctggctcaacccagtaacctgatgcgccaggtggtccggagtgtttttggtcatgtctgttcccacctgactccacgtgggctacagctaatcctggctgtgctcaaccctgagacaaatgaggatgaggaggacaacgtggtggtcactgacactgacgagaagcagctgaaacatggagaggacgcagactcagacagtgaggacagtaagaactcagagagtgacgtggatagtgaggatggggaagaaagtgaagaggaggaccgtgataaggatgtggacccaggcttccgacaacagctgatggaagtgttgcaagctgggaatgcactgggtggagaggaggaggaggaggaagagcttggggatgaggccatgatggccctggaccagaacctggccagcctatttgcagagcagaagatgcgtatccaggcccggcatgaggagaaaaacaagctgcagaaggagaagcagctccgacgagacttccagatcagggcactagacctgattgaggtgctggtgaccaagcagcctgagcaccccctgatcctggaacttcttgagccactgctaaacatcatccagcgcagcatgcgcagcagaggctccaccaagcaggagcaggacctcctgcacaagaccgcccgcatcttcatgcatcatctttgtcgtgcccgccactactgccacgaggtggagcctggcgcagaggctctgcatgcccaggtggagaggtttgtgcagcaggctggcaaccaggctgacgcctctgttgccctttactatttcaatgcctctctgtacctgctgcgagtcctcaagggcaacaccactaagaggtaccaagacggtcagaagttagagggagcagacatcaagtctgaacccaaggactcagaggtccagactaccagttgcttggacttggactttgtgacccgggtgtattcagcgtcattggaatctcttctgaccaagcgtaacagcccactcaccatccccatgttcctcgacctcttctcccgatatccagtgatctgtaagaacttgcttcccatcgtggtccagcatgtggctggctcatctcggccccgccatcaggcccaggcgtgcctgctgctccagaaggccctgtctgcacgggagctgagagtgtgttttgaggatcctgagtgggagcagctgattagccaggtcttgggaaagaccacccagaccctgcagactcttggggaagcacagagcaaaggggaacaccagagggagctatccatcttggagctgctgaacactgtcttcaggatagtcaatcacgagaagctgtctgtggacctcactgctttcttgggcatgcttcaaggcaagcagcagaagctgcagcaaaacctgcagcaagggaatcactcgtctggctccagtcgcctctacgatctctactggcaggccatgaacttgcttggagtgcagcgtccaaagtcagaaaagaagaatgtgaaggatattcctagtgacagccagagtcccattagcacaaagcggaagaaaaagggattcttgccagagaccaagaagcgaaagaaacttaaatctgagggtaccacatcagaaaagaaggctgcatcacagcaggatcgagtgacagagggtgccatgcctgctgccactggtaaagaccagccccccagcacaggcaagaaaagaaggaagagagtgaaggctaacaccccatcccaggtgaatggagtaactgtggccaagagtccggctcccaataaccccaccctgagtcccagcaccccccctgccaagaccccaaaagtgcagaagaaaaaagagaagctgtcacaggtgaatggatccactcctgtgtcccccgtagagcctgaaagcaaaaagcatcagaaggctctcagcacaaaggaggtcaaaagaaggtcctcccagtctgccctgccaaagaaaagagcaaggctgtctctggtgagcaggagccccagcctgttacagagtgggatcaggaaaaggagagtggccaggaggagagtccagacaccttga

SEQ ID NO: 11721 - protein, 1277 aa, Rattus norvegicus; identical to SEQ ID NO: 7166
  ref <308>: DATABASE ACCESSION NUMBER: Refseq / NP_113856
  ref <309>: DATABASE ENTRY DATE: 2002-11-05

SEQ ID NO: 11722 - DNA, 228 bp, Rattus norvegicus
  ref <308>: DATABASE ACCESSION NUMBER: EMBL / AI638984
  ref <309>: DATABASE ENTRY DATE: 2000-03-04
ttgtcagataactaattgtaactgtattcagtattatattggaaaacttaagactgtaagtcttacaggatttggaaagaggaaagaataaaaagattgcataaaggaaaggaacaagtaaaatcatttcattttgcagaaaatattcaataaatagaaaagccaacatattgaataaatggttaaatgggaataatggaaggataaggattgaatgagtctggtgcc

SEQ ID NO: 11723 - DNA, 443 bp, Rattus norvegicus
  misc_feature (1)..(443): n=a, c, g or t
  ref <308>: DATABASE ACCESSION NUMBER: EMBL / AI638985
  ref <309>: DATABASE ENTRY DATE: 2000-03-04
ttattttaaatataaaatacttgaggaacattcaaataagtagaaagcatataagggttgctttcatatttattaaaagtcagctgaaactggatttttcagaaactgtcaattaagtagtaactggtaactaaatttataaaggattctgaaagttcaacataaagcacattttaatagaaccagtggggagaggggaacccataaacttccctgcctttcctagtttgtataattaaaaagtcaactcagtaatacaaacgttatgtttcttttaaaagttatgggttgatcattacctataaactatcaaaaaatattttaatttactatttgaccaaaaataaataataagtactaaaatgctgcaaattaactatgatattacctataaaactactgatcactgtgaagtcaataagcaaatgatccctgatntatga

SEQ ID NO: 11724 - DNA, 792 bp, Rattus norvegicus
  ref <308>: DATABASE ACCESSION NUMBER: Refseq / NM_032613
  ref <309>: DATABASE ENTRY DATE: 2002-11-05
atgaaccctaactgtgcccggtgcggcaaaatcgtgtaccccacggagaaggtgaactgtctggataagttctggcataaagcatgctttcactgcgagacctgcaagatgactttgaacatgaagaactacaagggttacgagaagaagccttactgcaatgcacactaccccaagcagtccttcaccatggtggccgacactccggagaacctccgcctgaagcaacagagcgagctgcagagtcaggtgcgttacaaggaggagtttgagaagaacaagggcaaaggcttcagtgtggtggcagacacgcctgaactgcagagaatcaagaagacccaggaccagatcagcaatatcaaataccatgaggagtttgagaagagccgcatggggcccagcggaggtgaaggcatagagccagagcgccgagaagcccaggacagcagcagctaccggaggcccacggagcagcaacagccacagccccaccatatcccgaccagtgccccagtttaccagcagccccaacagcagcaggtgaccccgtcctatggtgggtacaaggagccagcagcccctgtctccatacagcgcagtgccccaggtggcggcgggaaacggtaccgtgcagtgtatgactacagcgctgccgacgaggacgaggtctccttccaggatggggacaccatcgtcaatgtgcagcagatcgatgatggctggatgtatgggaccgtagagcgcaccggtgacacggggatgctgccagccaactacgtggaggccatctga

SEQ ID NO: 11725 - protein, 263 aa, Rattus norvegicus
  ref <308>: DATABASE ACCESSION NUMBER: Refseq / NP_116002
  ref <309>: DATABASE ENTRY DATE: 2002-11-05
MNPNCARCGKIVYPTEKVNCLDKFWHKACFHCETCKMTLNMKNYKGYEKKPYCNAHYPKQSFTMVADTPENLRLKQQSELQSQVRYKEEFEKNKGKGFSVVADTPELQRIKKTQDQISNIKYHEEFEKSRMGPSGGEGIEPERREAQDSSSYRRPTEQQQPQPHHIPTSAPVYQQPQQQQVTPSYGGYKEPAAPVSIQRSAPGGGGKRYRAVYDYSAADEDEVSFQDGDTIVNVQQIDDGWMYGTVERTGDTGMLPANYVEAI

SEQ ID NO: 11726 - DNA, 20839 bp, Homo sapiens
  ref <308>: DATABASE ACCESSION NUMBER: Refseq / NM_004543
  ref <309>: DATABASE ENTRY DATE: 2000-11-01
gtgataaaactacaaagcagaatacgaagaagacagaggcaaaggcttcttccctcagaccataactcaagaatatgggggtctcgcagtaatttatgctctttgcttttgtcttttcatagttttccttgtatagtttgtcacttagggcatctcctgctgccttcagctgcctaagctgtgggttctctgaagcaggaagcacattataatctgcttttcctttattcttttcatagtcttctttgtattttgctgctgaggaaatttatttggtagattgaaggtttgaacgagagctacagaaacgaaagaaaaagtctgtataagccaatggtgttcgggaagaaaataaccccattgccttgagtttgtaggtgccactactactctgaaaaatggcagatgacgaagactatgaggaggtggtggagtactacacagaagaagtggtttacgaagaggtgccgggagagacaataacaaaaatttatgagactacgacaacaaggacatctgactatgagcaatcagaaacttccaaaccagctctggcacagccagcactggcacagccagcatcagcaaagccggtggagaggaggaaggtcatccggaagaaagtggatccttcaaagttcatgaccccctacattgcacacagtcagaaaatgcaggatctttttagcccaaataaatacaaggagaagtttgagaaaacaaaaggacagccatacgccagcacaacagatactccagaacttcgcagaatcaaaaaagtacaagatcaactcagtgaggttaagtatcgaatggatggtgatgttgctaagactatatgtcacgtagatgaaaaagcaaaggatattgaacatgcaaagaaagtgtcgcagcaagtcagtaaggttttatacaagcagaactgggaagacaccaaggataagtacctgcttcctcctgatgcccctgaacttgtccaggccgttaagaacaccgccatgttcagcaagaaactgtacactgaagactgggaagcagacaaaagtttgttttacccctataatgatagcccggaactgaggagagttgcccaggcccagaaagctctcagtgatgttgcctacaaaaaaggtctcgctgaacagcaagctcaattcacgcctctggccgatcctccagatatagaatttgccaagaaagtaaccaatcaagtgagcaagcaaaaatacaaagaagactatgaaaataaaatcaaaggcaaatggagtgagacaccttgctttgaagttgcaaatgccagaatgaatgctgataacattagcacaaggaaataccaggaagattttgaaaacatgaaagaccagatctacttcatgcagaccgaaacaccagagtataaaatgaataaaaaagctggtgtggcagctagcaaggtaaaatacaaagaagactatgaaaagaataaaggaaaagcagattataatgtgcttcctgcttcagagaacccacagcttaggcagctgaaggcagcaggagatgccctaagtgacaaactatacaaggaaaactatgaaaagacaaaagcaaagagcataaattactgcgagacccccaaattcaagctcgatactgttctgcagaacttcagtagtgataaaaaatataaagattcctacttaaaagatattttgggacattatgtaggcagcttcgaggatccataccattcacactgcatgaaagtcacagctcaaaacagtgataaaaactacaaagcagaatacgaagaagacagaggcaaaggcttcttccctcagaccataactcaagaatatgaagcaattaagaaactagatcagtgtaaagaccacacctacaaagtccatccagataagacaaaattcacccaagttacagactctcctgttctgctacaagcccaagtcaattccaaacaactgagtgacttaaattacaaagcaaaacatgaaagtgaaaagttcaagtgccatatcccccctgatactcctgcttttatccagcacaaagtcaatgcctataacttgagtgataatctttataagcaagactgggagaagagcaaagccaaaaagtttgacattaaagtggatgccattcccctgctggcagccaaagccaacaccaagaacaccagcgatgtgatgtacaagaaagactatgaaaaaaacaaagggaaaatgattggagtcctcagcattaatgacgatcccaagatgctgcactccttgaaggtggccaaaaaccagagtgatagattatacaaggaaaactatgagaagacaaaggcaaagagtatgaattactgtgagaccccaaaatatcaacttgatactcagctgaagaacttcagtgaggctagatataaagacttatatgtaaaggatgttttgggacattatgtaggcagcatggaggacccatatcacacacactgcatgaaagttgcagctcaaaacagtgataaaagttacaaagcagaatatgaagaagataaaggaaaatgctatttccctcagacaataacacaagaatatgacgcaatcaagaagctggaccagtgtaaagatcatacctacaaagttcatccagataagaccaaattcacggcagtcactgattctcctgtactgttgcaagcccagctcaacacgaaacagcttagtgatctgaattacaaagcaaaacatgaaggtgagaggttcaagtgccatataccagcagatgctccacagtttatccaacacagagtcaatgcctataatctgagtgataatgtttataagcaagactgggagaagagcaaagccaagaagtttgacattaaagtggacgccattcccctgttggcagccaaagccaacaccaagaacaccagcgatgtgatgtacaagaaagactatgaaaagagcaaagggaaaatgattggagccctcagcattaatgacgatccaaagatgctgcactccttgaagacagccaaaaaccagagtgatcgcgaatatcgaaaagattatgaaaagtcaaaaactatctacacggcacctcttgatatgctccaagtcactcaagctaagaaatctcaggcaattgccagcgacgttgattataagcacatcttacacagttacagctacccccctgatagcatcaatgtggaccttgccaagaaggcatatgcgctgcagagcgatgttgaatacaaagctgactacaatagctggatgaaaggttgtggctgggtgccttttgggtccttagaaatggaaaaggcaaagcgagcttcagacatcctcaatgagaaaaaatatcgccaacatccagacaccctcaagtttacctcgattgaagatgctccaattacagtacagtctaaaattaaccaggcccagaggagtgatatcgcttacaaagccaaaggagaggaaattattcacaattacaacctgccaccagacctgccccagttcatccaggctaaagttaatgcctacaatatcagtgagaatatgtacaaagcagacttgaaagacttgagcaagaagggatatgacctgagaactgatgcgattcccatcagagctgccaaagctgccaggcaggcggcgagtgacgttcagtacaaaaaagactatgaaaaggctaaagggaaaatggttggcttccaaagtcttcaagatgaccctaaactggttcattatatgaacgtggccaagatacaatcagatcgggagtataaaaaagactatgagaagacaaagtccaaatacaacacgccccatgatatgttcaatgtcgtggcggctaagaaagcccaggatgtggtcagcaatgtcaactataagcattctctccatcattacacctacttgcctgacgccatggacctggagctgtctaagaacatgatgcagatacagagtgataacgtctacaaggaagactacaacaactggatgaaaggcattggctggattcctattggcagtctcgacgtcgaaaaagttaaaaaggccggtgatgctctgaatgaaaagaagtacaggcaacatccagacaccctcaaatttaccagcattgtggactccccagttatggtccaggcaaaacagaacacgaagcaagtcagtgatatcttatacaaggctaaaggagaagatgtgaaacataaatacaccatgagtcctgatcttcctcagtttctccaggccaagtgcaatgcttacagtataagtgacgtctgttataaacgggattggcatgacttaatacgcaagggcaacaatgtgctgggcgatgctattcccatcactgcagccaaggcatcgagaaacattgccagtgattataaatacaaggaagcttatgagaagtcaaagggaaagcatgtgggtttcagaagcctccaggatgatcccaagctggtccactatatgaatgtggcaaagctgcagtctgatcgtgaatacaagaagaactatgagaacaccaaaaccagctaccatacccctggggacatggttacgatcacagctgcaaagatggcccaggatgtcgctaccaatgtcaactacaaacagccattgcatcattacacatacctacctgacgccatgagtcttgagcatacgaggaatgtcaatcaaattcagagtgataatgtgtataaagacgagtataacagcttcttgaagggcatcggatggatccctattggttccctggaggtggagaaggtcaagaaagcaggcgatgcattaaatgagaggaagtatcgacagcacccagataccgtcaagttcacaagtgtgcctgattccatgggcatgatgttggctcagcataacacaaagcagctaagtgatttgaactacaaggtagagggagagaaactgaagcacaagtatactattgaccctgaattgcctcagtttattcaagccaaagtcaacgccctcaacatgagtgatgctcattataaagcagattggaagaaaaccattcgcaagggctatgatttgagaccagatgccatcccaattgttgctgcaaaaagttcaaggaatattgctagtgattgcaaatataaggaggcctacgagaaagccaaaggcaagcaagttggatttctcagtcttcaggatgatcctaaactggttcactacatgaatgtggccaaaatccagtctgatcgtgagtacaaaaagggctatgaagccagcaagaccaagtaccacacacctctggatatggtcagtgtgacagctgcaaagaaatctcaggaggttgccaccaacgccaactacagacagtcataccaccactacactctcctgcccgatgccttgaatgtggagcactccaggaatgccatgcagattcagagtgataatctgtacaaatctgacttcaccaattggatgaaagggatcggctgggtgcccatagagtccctggaggtggagaaggcaaagaaagcaggagagattcttagtgagaagaagtatcgccagcaccccgagaagctgaagttcacttacgccatggacacaatggaacaggcacttaacaagagtaacaaactgaacatggacaagaggctctacactgaaaaatggaacaaggacaagaccaccattcatgtcatgcctgacacaccggatattttactctccagagtaaaccaaatcaccatgagtgataaactgtacaaagctggctgggaagaggaaaagaagaaaggatatgacctgaggcctgatgccattgcaataaaggctgcaagagcctctagagacattgccagtgattacaaatacaagaaagcctatgaacaagccaaagggaaacacattggcttccggagcctggaagatgaccccaagctggtgcacttcatgcaagtggccaagatgcagtcagaccgggaatacaagaagggatatgagaaatccaagacctccttccacaccccggtggacatgctcagtgtggtggcagccaagaagtctcaggaagtggccaccaatgccaactacaggaacgtgatccatacctacaacatgcttcctgatgccatgagctttgaattggccaaaaatatgatgcagattcaaagtgataatcagtacaaggctgactatgctgacttcatgaagggcattggatggctccctctgggctccctggaagcagagaaaaacaagaaagccatggagattattagtgaaaagaagtaccgccagcacccagacactttgaagtattccacactcatggactcgatgaacatggttttggcccagaataatgcaaaaattatgaacgaacatctctacaaacaagcatgggaggctgacaaaaccaaagtccacatcatgcctgatatcccccagattattttggcaaaggcaaatgcaattaatataagtgataaactctacaaactttccttggaagagtctaaaaagaaaggctatgatctcagacctgatgcaattcctatcaaagctgccaaggcttccagagatattgcaagtgattataaatacaagtacaattatgaaaaagggaaggggaaaatggttggtttccgcagtctcgaggatgatcccaaattagtccattccatgcaagtggctaagatgcaatctgatcgggagtacaagaaaaactatgagaacacaaagaccagctaccacacccctgccgacatgctcagtgtcacggctgcaaaggatgcccaagccaacatcaccaacactaactacaagcacctgattcacaagtacatcctccttccagatgcaatgaacattgagctgaccaggaatatgaatcgcatacagagtgataatgaatataagcaagattacaatgaatggtacaaagggcttggctggagtccagcaggttctctggaagtggagaaggccaagaaagcaactgaatatgccagtgatcagaaataccgccagcacccgagcaacttccagtttaagaagctgactgattccatggacatggtgcttgccaagcagaatgcacataccatgaacaagcatttatacaccattgattggaataaagataagaccaagattcatgtgatgcctgatacaccagatattttacaagccaagcagaatcaaacactgtatagtcagaaactctataaacttggatgggaagaagctttgaagaaaggctatgatctcccagttgatgcaatttctgtacagctagctaaagcttcaagagacattgctagtgattataaatacaaacaaggctaccgaaagcaacttggccaccatgttggattccggagtctgcaagatgacccaaaacttgtgttgtccatgaatgtagccaaaatgcagagtgaaagagaatacaagaaggactttgagaagtggaaaactaagttctccagcccagtggacatgttgggagtggtactggccaagaagtgtcaggagttggttagtgacgtggactacaagaactacctgcatcagtggacatgtctgcctgatcagaacgatgttgtgcaagctaagaaagtttatgaactgcaaagtgagaatctatataaatctgaccttgagtggctgagaggcataggatggagtcccttgggttctttagaggcagaaaagaacaagcgggcttcggaaatcatcagtgagaagaaatatcgtcagcctccagacagaaacaagttcaccagcattcctgatgccatggatatagttctggcaaagacaaatgccaaaaataggagtgatagactttatagagaagcttgggacaaagacaagactcagatccacatcatgcctgatacacctgacattgttctggctaaagcaaacttaatcaacacaagtgataaactctaccgaatgggttatgaggagctgaagagaaaaggttacgatcttcctgttgatgccataccaatcaaagcagcaaaagcctcccgggaaattgccagtgaatacaagtacaaggaaggctttcgcaagcagctcggccaccacattggtgcccggaacattgaagatgaccccaagatgatgtggtccatgcatgtggccaagatccagagtgacagggagtacaagaaggactttgagaagtggaagaccaagttcagcagcccagtggacatgctgggggtggtgttggcctataagtgccagaccttagtcagcgacgtggactacaagaactacctgcaccagtggacatgcctgcccgaccagagcgatgtcatccatgctcggcaggcctatgacctccagagcgataatttgtacaagtcagaccttcagtggctaaaaggcattggctggatgactagtggttctctcgaggatgagaaaaataaacgagccacccagattttgagtgaccatgtttaccgtcagcacccagatcaatttaagttttccagccttatggattccataccaatggttttggcaaaaaacaatgctattaccatgaatcatcgcctctatacagaagcttgggataaagataaaaccactgtccacattatgccagatacccctgaagttttattagctaaacaaaacaaagtaaattacagtgagaaattgtataagcttggcctagaagaagccaagaggaaaggttatgacatgcgggtagatgccattcctatcaaggcagccaaggcctccagagatattgcaagtgaattcaagtacaaagaaggctatcgtaagcagctcggccaccacattggtgcccgagctatacgtgatgaccccaagatgatgtggtccatgcacgtggccaagatccagagtgacagggagtacaagaaggactttgagaagtggaagaccaagttcagcagcccagtggacatgctgggggtggtgctggccaagaagtgccagaccttagtcagcgatgtggactacaagaactacctgcaccagtggacatgcctgcccgaccagagcgacgtcatccatgctcggcaggcctatgacctccagagcgataatatgtacaagtctgatctccagtggatgagaggcattggctgggtgtccattggctctttggatgtggaaaaatgcaaaagggcaactgaaattttgagtgataaaatctatcgccagcctccagacagattcaaatttaccagtgtgactgactctctggaacaagtgctggccaagaacaatgctctcaacatgaataagcgtttatacacagaggcctgggacaaagacaagactcaaattcacataatgcctgatacaccagagattatgttggcaaggcagaacaaaatcaactacagtgagactctatacaaacttgccaatgaagaagcaaaaaagaaaggctacgacttgcgaagtgacgccatccccatcgtggctgccaaggcctccagggacgttatcagtgattacaaatacaaagatggttaccgcaagcagctcggccaccacattggagcccggaacattgaagatgaccccaagatgatgtggtccatgcatgtggccaagatccagagtgacagggagtataagaaggactttgagaagtggaagaccaagttcagcagcccagtggacatgctgggagtggtgttagccaagaagtgccagaccttagtcagcgatgtggactacaagaactacctgcacgagtggacgtgcctgcccgaccagaatgatgtcatccatgctcggcaggcctatgacctccagagcgataacatttacaaatctgatctccagtggctgagaggcattggctgggtccccattgggtctatggatgtggtcaagtgcaagagagctgctgaaatactgagtgataacatctaccgccagcctccggacaagctgaaatttaccagtgtgactgactctctagagcaggtgctggccaagaacaatgctctcaatatgaacaagcgcttatacacagaagcctgggacaaagacaagacccaagtccatattatgcctgatacacctgaaatcatgttggcaagacaaaataaaataaattatagtgagagcctctatcgtcaggccatggaagaagccaagaaagaaggctatgacttgagaagtgatgccattcccattgtggctgccaaggcctctcgggatattgccagtgattacaaatacaaagaagcatatcgtaagcagttgggtcaccacattggcgcccgagcagtacacgatgaccccaagataatgtggtccctccacattgccaaagtgcagagtgaccgtgagtacaagaaagattttgagaaatacaagacaaggtacagcagcccagtggacatgcttggtatcgttttggccaagaagtgtcagaccttggtcagcgatgtggactataaacatcctctgcatgaatgcatctgcctgcccgaccagaatgacatcattcatgcacggaaagcctatgacctccagagtgacaatttgtataagtcagaccttgaatggatgaaaggcattggctgggttccgattgattccttggaagttgttagggccaagagagctggagaattacttagtgatactatctaccgtcagcgtccagaaacgctgaaatttaccagtataacggacactccggagcaggtgctggcaaaaaacaatgctttaaacatgaataagcgcttatatactgaagcctgggacaatgacaagaaaactattcatgtcatgcctgatacaccagaaatcatgttagccaaactcaaccgaataaactacagtgataaactctataaacttgctttggaagagtccaagaaggaaggctatgacttgcgtctggatgccattccaatccaagcagccaaggcttcaagagatattgctagtgattacaagtacaaggaaggctaccgcaaacagcttggccaccatattggggcccggaacattaaggatgacccgaagatgatgtggtccatccatgtggccaagatccagagtgacagggagtacaagaaggagtttgagaagtggaagaccaagttcagcagcccagtggacatgctgggggtggtgctggccaagaagtgtcagatccttgtaagcgacatagactacaagcatcccctgcatgaatggacctgcctgcctgatcagaatgacgtcattcaggctcggaaggcctatgacctgcagagtgatgctatttacaaatctgatcttgagtggctgagaggcataggatgggttcccattggctctgtagaggtcgagaaagtgaagagagctggagaaatcctgagtgacaggaagtatcgccagcctgcagaccagctcaaattcacatgcattaccgacactccggaaattgtcctagcaaagaataatgccctgacaatgagcaagcatttatacacagaagcttgggatgctgacaaaacctccatccacgtgatgccagacaccccagatatcctgctggccaagagtaattctgccaatatcagccaaaaactttacaccaagggatgggatgaatcaaagatgaaggactatgatctgagagcagatgctatttccatcaaaagtgccaaggcctccagggacatcgccagtgactacaaatacaaggaagcctatgagaaacagaaaggccaccacattggagcccagagcattgaagatgatcccaagattatgtgtgccatacatgcagaaaaaattcaaagtgaaagggagtacaagaaggaattccaaaagtggaaaaccaagttctctagcccagtggacatgttaagcatcttgctggccaagaaatgtcagactttggtcactgacatttattatcgcaattacctgcatgaatggacatgcatgccggatcaaaacgacattatccaagcaaaaaaggcctatgacctgcagagtgatgccctctacaaggctgacttggagtggttgcgtggcattggctggatgccccaagggtctcctgaagtgttgagagtcaaaaacgcccagaatatcttttgtgacagtgtctatcggacgcctgtggtgaaccttaagtacacaagcattgttgacacacctgaagtggtccttgctaaatcaaatgctgaaaatattagtattccaaagtacagagaggtttgggacaaggataaaacttcaatacacataatgccagatactccagaaattaatctcgctagagcaaatgctcttaatgtgagcaataaactttaccgtgagggctgggatgaaatgaaggcgggctgtgatgtccggctggatgccatccccatccaggctgccaaggcctccagggagattgccagtgactataaatataagcttgaccatgagaagcagaagggacactacgtgggcaccctcacagccagggatgacaacaagatccgctgggccctcatagctgacaagctccagaatgaacgagagtaccggctggactgggccaaatggaaggccaagatccagagccctgtggacatgctttccatcctgcactctaaaaattcccaggctctggtcagtgacatggattaccgcaattacctgcaccagtggacctgcatgcccgaccagaacgatgtgattcaggccaagaaggcctacgaactgcagagcgataatgtttacaaggctgacttggaatggttgcgtggaattgggtggatgccaaatgactccgtgtccgtcaatcatgccaaacatgccgcggacatcttcagtgagaaaaaatatcgcacaaaaatagaaactctcaactttacgcctgtggatgacagagttgattatgtgacagcgaaacaaagtggcgagatcctcgatgatattaaataccggaaagactggaatgccaccaaatcaaagtacaccctcacagaaacccccctgctgcacactgcccaggaggctgctaggatactggaccagtatctctacaaggaaggctgggagagacaaaaagccacaggttacattttgcctccagatgctgtgccatttgttcatgcccatcactgcaatgacgttcagagtgagctgaaatacaaagctgaacatgtgaagcaaaaaggtcattatgttggtgtcccgacgatgagagatgatcctaagctggtttggtttgagcatgcaggccagattcagaatgagagactatacaaagaggactatcacaaaacaaaggccaaaatcaatatacctgctgatatggtgtcagtcttggccgccaagcaggggcagacccttgtcagtgatattgattatcgtaattacttgcaccaatggatgtgtcatcctgaccagaacgatgttattcaggcaagaaaggcctatgacctacagagtgataatgtctacagagctgacctggagtggctccgaggcattggctggatcccactggattctgtggaccatgtaagggttactaagaaccaggaaatgatgagtcagatcaaatataagaaaaatgcccttgaaaactatcctaactttacaagtgtggtggatcctccagagattgttttagccaagattaattctgtcaatcaaagtgatgtaaaatataaagaaacatttaataaagcaaagggcaaatatacgttttcaccagatacaccacatatctcccactccaaagacatgggaaaactctacagtactatactgtataaaggggcgtgggagggcaccaaggcctatggctacaccctggatgagcgctacattcccattgttggagccaagcatgctgatctggtgaacagtgagcttaaatacaaagagacatatgagaagcagaaaggtcactacctggctggaaaagtgatcggtgaattccctggtgtggttcactgtctggatttccaaaagatgaggagtgcgttgaactacagaaaacattatgaggataccaaagcaaatgttcatatccccaatgacatgatgaatcacgtgctggctaaaaggtgccagtacatcctcagtgacctggagtatcgacactatttccaccagtggacgtctcttctggaagaacccaatgttatacgcgtccgaaacgcccaggagatcttgagtgataatgtgtataaagatgacctgaattggttgaaaggcattggttgctacgtttgggatacaccccaaatcctccatgccaagaaatcatacgaccttcagagtcagctacaatatacagcagcaggtaaagaaaatctacaaaactataatctggtcacagacacgcccctctatgtgactgctgttcagagtggcattaatgccagtgaggtaaaatataaagaaaattatcatcagattaaggacaaatacacaacagttctagaaacagtggattatgacagaaccagaaacctgaagaatctttacagcagtaacctgtacaaggaggcctgggatagagtgaaagccaccagctacatcctgccttccagcaccttgtccctgacacacgccaagaaccagaagcatctggccagccatatcaaatatcgggaagaatatgaaaagttcaaagctctttatacgttaccaagaagtgttgacgatgatccgaacacagcacggtgcctccgagttggcaagcttaacatcgatcgcctgtacagatcagtttatgaaaagaacaagatgaaaatccacatcgtgcccgacatggtagagatggttactgccaaggattcccagaagaaagtcagtgagattgattaccgcctgcgcctccacgaatggatttgccaccccgacttgcaagtcaatgatcacgtcaggaaagtcacagatcagatcagcgatattgtatacaaggatgacctcaactggctgaaaggcattggttgctacgtctgggacactcctgaaatcctccatgccaagcatgcttatgatctacgtgatgatatcaagtataaagctcacatgttgaaaacaaggaatgactacaagcttgtcacagatacaccagtctacgtgcaggctgtcaaaagtgggaaacagctaagtgacgctgtctaccactatgactatgtgcacagtgtcagaggcaaagtggctccaactaccaaaaccgtggatctggaccgggcccttcatgcatacaagctccagagttcgaatctatacaaaaccagcctgcgcaccctgcccactggatatagacttccaggtgacactcctcacttcaaacacatcaaggacacccgttacatgagcagttatttcaagtacaaagaagcctatgaacacaccaaggcatatgggtatacacttggccccaaagatgttccatttgtccacgtccggagagtcaacaatgttaccagcgagagactgtatcgggaattgtaccacaaactgaaagacaagatccatacaactcccgatccccctgagatccgccaagtcaagaagacacaagaggctgtcagtgagttgatctacaaatcagacttcttcaagatgcagggccacatgatctctctgccatacacaccccaagtgatccattgccgctatgtgggagacatcaccagtgatattaaatacaaagaggacttgcaggtcctgaagggatttggctgcttcctgtatgacactcctgacatggtccgctcccggcacctgcggaagctctggtctaattacctatacactgataaggcaagggagatgcgagacaaatacaaagtggtgcttgacactccagaatacagaaaagtgcaagaactgaagacacatctgagtgagctggtctacagagctgcaggcaagaagcagaagtcaatctttacttcagttcctgatactcctgatcttttaagagccaagcgagggcagaagcttcagagtcagtatctgtatgttgaacttgccaccaaagagagaccccatcatcacgctggaaaccagaccacagccttgaagcatgctaaagacgtgaaggacatggtcagtgagaaaaagtacaagattcaatatgaaaagatgaaagacaagtacactccggttccagatacgccaatcctcatcagagccaagagggcttactggaatgccagtgatctacgctacaaagaaacatttcaaaagaccaaagggaaataccacacggtgaaagatgccctagacattgtctatcatcgcaaagtcacagatgacatcagtaaaataaaatacaaggagaactacatgagccagttgggtatctggaggtccattcctgatcgtccagagcatttccaccaccgagcagtcactgacacagtcagtgatgtaaaatataaagaagacttgacttggcttaaaggcattggttgctatgcctatgatacccctgatttcactctggctgaaaagaacaagactctctacagcaagtataagtataaagaagtatttgaaaggacaaagtcagatttcaagtatgttgccgactctccgatcaataggcatttcaagtatgcaactcaattgatgaatgagaaaaaatacagagctgattatgagcagcggaaagataaataccacctggtagtcgatgagcctagacatctgctggctaagacccgcagcgaccagatcagtcagatcaaatacaggaaaaactatgaaaaatcaaaggacaaatttacctcaattgtggatactccagaacacctgcgtactacaaaagtcaacaaacaaatcagcgatatcctttataaattggaatacaacaaggccaaacccagaggctacaccacaatccacgacacgcccatgttgctgcatgtccgcaaggttaaagatgaagtcagtgatctgaaatacaaagaagtataccaaagaaataaatccaactgcaccattgagccagatgctgttcatatcaaagcagccaaggacgcctacaaagtcaacaccaatctggactataagaaacagtacgaagccaacaaagcccactggaagtggactcctgaccgaccggacttcctccaggctgccaagtcatccctgcagcaaagcgattttgaatataagctggaccgggagttcctcaagggttgcaagctttctgtcactgatgacaaaaacacggtgctcgccctcaggaatactttaatagaaagtgatctgaaatacaaagagaaacatgtcaaggaaagaggaacctgccatgccgtacctgacacgcctcagatcctgctggcgaagactgtcagcaacctggtgtctgagaacaagtacaaggaccatgtcaagaagcacttggcacagggctcatacacaacactaccagagacccgggacactgttcacgtcaaggaagtgaccaagcatgtcagtgatacaaattacaaaaagaagtttgtcaaggagaaaggaaaatccaactactccatcatgctggagccaccagaggtgaaacatgctatggaagtggccaagaagcaaagtgatgtcgcttacagaaaagatgccaaagagaacctgcattacaccacagtggctgatcgaccagacatcaagaaggccacacaggcagccaaacaggccagtgaggtggagtacagagccaagcaccgcaaggaaggcagccatggcttaagcatgctcggtcgcccagacatagaaatggccaagaaggcagccaagctgagcagccaggttaaataccgagaaaatttcgataaagaaaagggcaagacaccaaaatacaatccaaaagacagccagctctacaaagtcatgaaagatgctaataatcttgcaagtgaggttaaatacaaggctgacctgaagaaacttcacaaacccgtgactgacatgaaggagtctctgatcatgaatcatgtcctgaatacaagccaacttgccagttcttaccagtacaagaagaagtatgagaagagtaaaggccactaccacaccatacccgataatctggagcagcttcacctaaaagaggccacagaattacagagtatagtgaaatacaaagaaaagtatgaaaaggaacgaggaaaacccatgctggactttgaaacaccaacgtacatcactgccaaagagtctcagcagatgcagagtgggaaagaatataggaaagattatgaagagtccattaaaggcagaaacctgactggcctggaggtcacgccagctttgttacatgtcaaatatgcaactaaaatagcaagcgagaaagagtacaggaaagatctagaggaaagcatccgtgggaagggcctcactgaaatggaagatacacctgacatgctaagagcaaagaatgccactcaaatcctcaatgagaaagaatataagcgagacctggaactggaagtcaaaggaagaggcctgaatgccatggccaatgaaactccggattttatgagggccaggaatgctactgatattgccagtcagattaagtataagcaatcagcagaaatggagaaagccaatttcacttctgtggttgatactccagagatcattcatgcccaacaagtcaagaatctttcaagccagaaaaagtacaaggaagatgctgagaagtccatgtcgtattatgagactgttttggacaccccagagatacagagagtccgggagaaccaaaagaacttcagccttctccaataccagtgtgaccttaaaaacagtaaaggaaaaattacagttgttcaagacacgccagaaatactgcgtgtaaaagaaaatcagaagaatttcagctcggttttatataaagaggatgtctcaccaggaacggctatcggaaagacacctgagatgatgagagtgaaacaaacacaggaccacattagctcggtgaagtataaggaagcaataggacaaggaactccaatccctgacctgcctgaagtgaaacgtgtgaaggagacgcagaagcacattagctcggttatgtacaaagaaaacttgggaacaggcattccaaccactgtgactccagagattgagagagtcaaacgcaatcaagagaactttagctcggttttgtacaaagaaaatttggggaaaggaatcccaacacctatcactccagagatggagagagtcaaacgcaatcaagagaactttagctcggtgttatacaaagaaaacatgggcaagggaactcctttacctgtcactcccgagatggagcgagtcaaacacaatcaagaaaatattagctcggttttgtacaaagaaaatgtggggaaagccaccgcaacccctgtcactcctgagatgcagagagtcaaacgcaatcaagaaaacattagctcggtgttatacaaagagaacctggggaaagcaacccccacaccctttactcctgagatggaaagagtgaaacgcaatcaagaaaactttagctcggtattgtacaaagagaacatgagaaaagcaactccgacacctgttactccagagatggagagagctaagcgcaaccaagaaaacattagctcggttctttattctgatagtttccggaaacaaatacaaggcaaagctgcctatgtattggatacccccgagatgagacgggtgagggagacccaacggcacatctcaacggtgaaatatcatgaagactttgagaaacacaagggttgcttcacaccagtggtgacagatcctatcactgaacgagtaaagaagaacatgcaggacttcagtgacattaactaccgaggtattcagaggaaagtggtagaaatggaacaaaaacggaatgaccaagatcaggagactattacaggtttacgtgtctggcgtactaatcctggttcggtttttgactatgatccagcagaagacaacatccagtcccgaagcttacacatgattaatgtccaagctcagcgccggagccgggagcagtcacgatctgccagtgcactaagcgtcagtgggggtgaggagaagtctgagcattcagaagcaccagaccaccacctttcgacttacagcgacgggggtgtctttgcagtctcaacagcttacaaacatgcaaaaaccacagagctcccacaacaacgatcatcttcagttgctacccaacagacaacggtatcttccatcccatctcatccatctactgctggaaaaatcttccgtgccatgtatgactatatggctgctgatgcagatgaggtgtccttcaaggatggagatgccatcataaatgttcaagcaattgatgaaggctggatgtatggcactgtgcagaggactggcaggaccggaatgctcccagccaactacgttgaagctatttaggcatttcaaagcatcacacttgtctgcaggacttacagatcctgcagtcaatgtttcggtttagactctccactgttacctaagttctcaagctgcctatggtttttctgtgtcaatgtgatttatggtagtaccatcctttctcctttgggttttaaaataagttgcagaacagacactttaaaagcttctgcaatattatttctgtgcctagagtctttctccattataaacatgttttaacattatttcttttctaaaacagggattttgaatatgccaaacacattaaaggaaaaatagcagagatgttcaccttttccttgctgattgctaatgcttattatttctaattcagttctgaagttataaacttataatcaatacaaaccagcaactaataaaacctctaattctgcaaaaaaaaaaaa

SEQ ID NO: 11727 - protein, 6669 aa, Homo sapiens
  ref <308>: DATABASE ACCESSION NUMBER: SWISS-Prot / P20929
  ref <309>: DATABASE ENTRY DATE: 2001-10-16
MADDEDYEEVVEYYTEEVVYEEVPGETITKIYETTTTRTSDYEQSETSKPALAQPALAQPASAKPVERRKVIRKKVDPSKFMTPYIAHSQKMQDLFSPNKYKEKFEKTKGQPYASTTDTPELRRIKKVQDQLSEVKYRMDGDVAKTICHVDEKAKDIEHAKKVSQQVSKVLYKQNWEDTKDKYLLPPDAPELVQAVKNTAMFSKKLYTEDWEADKSLFYPYNDSPELRRVAQAQKALSDVAYKKGLAEQQAQFTPLADPPDIEFAKKVTNQVSKQKYKEDYENKIKGKWSETPCFEVANARMNADNISTRKYQEDFENMKDQIYFMQTETPEYKMNKKAGVAASKVKYKEDYEKNKGKADYNVLPASENPQLRQLKAAGDALSDKLYKENYEKTKAKSINYCETPKFKLDTVLQNFSSDKKYKDSYLKDILGHYVGSFEDPYHSHCMKVTAQNSDKNYKAEYEEDRGKGFFPQTITQEYEAIKKLDQCKDHTYKVHPDKTKFTQVTDSPVLLQAQVNSKQLSDLNYKAKHESEKFKCHIPPDTPAFIQHKVNAYNLSDNLYKQDWEKSKAKKFDIKVDAIPLLAAKANTKNTSDVMYKKDYEKNKGKMIGVLSINDDPKMLHSLKVAKNQSDRLYKENYEKTKAKSMNYCETPKYQLDTQLKNFSEARYKDLYVKDVLGHYVGSMEDPYHTHCMKVAAQNSDKSYKAEYEEDKGKCYFPQTITQEYDAIKKLDQCKDHTYKVHPDKTKFTAVTDSPVLLQAQLNTKQLSDLNYKAKHEGERFKCHIPADAPQFIQHRVNAYNLSDNVYKQDWEKSKAKKFDIKVDAIPLLAAKANTKNTSDVMYKKDYEKSKGKMIGALSINDDPKMLHSLKTAKNQSDREYRKDYEKSKTIYTAPLDMLQVTQAKKSQAIASDVDYKHILHSYSYPPDSINVDLAKKAYALQSDVEYKADYNSWMKGCGWVPFGSLEMEKAKRASDILNEKKYRQHPDTLKFTSIEDAPITVQSKINQAQRSDIAYKAKGEEIIHNYNLPPDLPQFIQAKVNAYNISENMYKADLKDLSKKGYDLRTDAIPIRAAKAARQAASDVQYKKDYEKAKGKMVGFQSLQDDPKLVHYMNVAKIQSDREYKKDYEKTKSKYNTPHDMFNVVAAKKAQDVVSNVNYKHSLHHYTYLPDAMDLELSKNMMQIQSDNVYKEDYNNWMKGIGWIPIGSLDVEKVKKAGDALNEKKYRQHPDTLKFTSIVDSPVMVQAKQNTKQVSDILYKAKGEDVKHKYTMSPDLPQFLQAKCNAYSISDVCYKRDWHDLIRKGNNVLGDAIPITAAKASRNIASDYKYKEAYEKSKGKHVGFRSLQDDPKLVHYMNVAKLQSDREYKKNYENTKTSYHTPGDMVTITAAKMAQDVATNVNYKQPLHHYTYLPDAMSLEHTRNVNQIQSDNVYKDEYNSFLKGIGWIPIGSLEVEKVKKAGDALNERKYRQHPDTVKFTSVPDSMGMMLAQHNTKQLSDLNYKVEGEKLKHKYTIDPELPQFIQAKVNALNMSDAHYKADWKKTIRKGYDLRPDAIPIVAAKSSRNIASDCKYKEAYEKAKGKQVGFLSLQDDPKLVHYMNVAKIQSDREYKKGYEASKTKYHTPLDMVSVTAAKKSQEVATNANYRQSYHHYTLLPDALNVEHSRNAMQIQSDNLYKSDFTNWMKGIGWVPIESLEVEKAKKAGEILSEKKYRQHPEKLKFTYAMDTMEQALNKSNKLNMDKRLYTEKWNKDKTTIHVMPDTPDILLSRVNQITMSDKLYKAGWEEEKKKGYDLRPDAIAIKAARASRDIASDYKYKKAYEQAKGKHIGFRSLEDDPKLVHFMQVAKMQSDREYKKGYEKSKTSFHTPVDMLSVVAAKKSQEVATNANYRNVIHTYNMLPDAMSFELAKNMMQIQSDNQYKADYADFMKGIGWLPLGSLEAEKNKKAMEIISEKKYRQHPDTLKYSTLMDSMNMVLAQNNAKIMNEHLYKQAWEADKTKVHIMPDIPQIILAKANAINISDKLYKLSLEESKKKGYDLRPDAIPIKAAKASRDIASDYKYKYNYEKGKGKMVGFRSLEDDPKLVHSMQVAKMQSDREYKKNYENTKTSYHTPADMLSVTAAKDAQANITNTNYKHLIHKYILLPDAMNIELTRNMNRIQSDNEYKQDYNEWYKGLGWSPAGSLEVEKAKKATEYASDQKYRQHPSNFQFKKLTDSMDMVLAKQNAHTMNKHLYTIDWNKDKTKIHVMPDTPDILQAKQNQTLYSQKLYKLGWEEALKKGYDLPVDAISVQLAKASRDIASDYKYKQGYRKQLGHHVGFRSLQDDPKLVLSMNVAKMQSEREYKKDFEKWKTKFSSPVDMLGVVLAKKCQELVSDVDYKNYLHQWTCLPDQNDVVQAKKVYELQSENLYKSDLEWLRGIGWSPLGSLEAEKNKRASEIISEKKYRQPPDRNKFTSIPDAMDIVLAKTNAKNRSDRLYREAWDKDKTQIHIMPDTPDIVLAKANLINTSDKLYRMGYEELKRKGYDLPVDAIPIKAAKASREIASEYKYKEGFRKQLGHHIGARNIEDDPKMMWSMHVAKIQSDREYKKDFEKWKTKFSSPVDMLGVVLAYKCQTLVSDVDYKNYLHQWTCLPDQSDVIHARQAYDLQSDNLYKSDLQWLKGIGWMTSGSLEDEKNKRATQILSDHVYRQHPDQFKFSSLMDSIPMVLAKNNAITMNHRLYTEAWDKDKTTVHIMPDTPEVLLAKQNKVNYSEKLYKLGLEEAKRKGYDMRVDAIPIKAAKASRDIASEFKYKEGYRKQLGHHIGARAIRDDPKMMWSMHVAKIQSDREYKKDFEKWKTKFSSPVDMLGVVLAKKCQTLVSDVDYKNYLHQWTCLPDQSDVIHARQAYDLQSDNMYKSDLQWMRGIGWVSIGSLDVEKCKRATEILSDKIYRQPPDRFKFTSVTDSLEQVLAKNNALNMNKRLYTEAWDKDKTQIHIMPDTPEIMLARQNKINYSETLYKLANEEAKKKGYDLRSDAIPIVAAKASRDVISDYKYKDGYRKQLGHHIGARNIEDDPKMMWSMHVAKIQSDREYKKDFEKWKTKFSSPVDMLGVVLAKKCQTLVSDVDYKNYLHEWTCLPDQNDVIHARQAYDLQSDNIYKSDLQWLRGIGWVPIGSMDVVKCKRAAEILSDNIYRQPPDKLKFTSVTDSLEQVLAKNNALNMNKRLYTEAWDKDKTQVHIMPDTPEIMLARQNKINYSESLYRQAMEEAKKEGYDLRSDAIPIVAAKASRDIASDYKYKEAYRKQLGHHIGARAVHDDPKIMWSLHIAKVQSDREYKKDFEKYKTRYSSPVDMLGIVLAKKCQTLVSDVDYKHPLHECICLPDQNDIIHARKAYDLQSDNLYKSDLEWMKGIGWVPIDSLEVVRAKRAGELLSDTIYRQRPETLKFTSITDTPEQVLAKNNALNMNKRLYTEAWDNDKKTIHVMPDTPEIMLAKLNRINYSDKLYKLALEESKKEGYDLRLDAIPIQAAKASRDIASDYKYKEGYRKQLGHHIGARNIKDDPKMMWSIHVAKIQSDREYKKEFEKWKTKFSSPVDMLGVVLAKKCQILVSDIDYKHPLHEWTCLPDQNDVIQARKAYDLQSDAIYKSDLEWLRGIGWVPIGSVEVEKVKRAGEILSDRKYRQPADQLKFTCITDTPEIVLAKNNALTMSKHLYTEAWDADKTSIHVMPDTPDILLAKSNSANISQKLYTKGWDESKMKDYDLRADAISIKSAKASRDIASDYKYKEAYEKQKGHHIGAQSIEDDPKIMCAIHAEKIQSEREYKKEFQKWKTKFSSPVDMLSILLAKKCQTLVTDIYYRNYLHEWTCMPDQNDIIQAKKAYDLQSDALYKADLEWLRGIGWMPQGSPEVLRVKNAQNIFCDSVYRTPVVNLKYTSIVDTPEVVLAKSNAENISIPKYREVWDKDKTSIHIMPDTPEINLARANALNVSNKLYREGWDEMKAGCDVRLDAIPIQAAKASREIASDYKYKLDHEKQKGHYVGTLTARDDNKIRWALIADKLQNEREYRLDWAKWKAKIQSPVDMLSILHSKNSQALVSDMDYRNYLHQWTCMPDQNDVIQAKKAYELQSDNVYKADLEWLRGIGWMPNDSVSVNHAKHAADIFSEKKYRTKIETLNFTPVDDRVDYVTAKQSGEILDDIKYRKDWNATKSKYTLTETPLLHTAQEAARILDQYLYKEGWERQKATGYILPPDAVPFVHAHHCNDVQSELKYKAEHVKQKGHYVGVPTMRDDPKLVWFEHAGQIQNERLYKEDYHKTKAKINIPADMVSVLAAKQGQTLVSDIDYRNYLHQWMCHPDQNDVIQARKAYDLQSDNVYRADLEWLRGIGWIPLDSVDHVRVTKNQEMMSQIKYKKNALENYPNFTSVVDPPEIVLAKINSVNQSDVKYKETFNKAKGKYTFSPDTPHISHSKDMGKLYSTILYKGAWEGTKAYGYTLDERYIPIVGAKHADLVNSELKYKETYEKQKGHYLAGKVIGEFPGVVHCLDFQKMRSALNYRKHYEDTKANVHIPNDMMNHVLAKRCQYILSDLEYRHYFHQWTSLLEEPNVIRVRNAQEILSDNVYKDDLNWLKGIGCYVWDTPQILHAKKSYDLQSQLQYTAAGKENLQNYNLVTDTPLYVTAVQSGINASEVKYKENYHQIKDKYTTVLETVDYDRTRNLKNLYSSNLYKEAWDRVKATSYILPSSTLSLTHAKNQKHLASHIKYREEYEKFKALYTLPRSVDDDPNTARCLRVGKLNIDRLYRSVYEKNKMKIHIVPDMVEMVTAKDSQKKVSEIDYRLRLHEWICHPDLQVNDHVRKVTDQISDIVYKDDLNWLKGIGCYVWDTPEILHAKHAYDLRDDIKYKAHMLKTRNDYKLVTDTPVYVQAVKSGKQLSDAVYHYDYVHSVRGKVAPTTKTVDLDRALHAYKLQSSNLYKTSLRTLPTGYRLPGDTPHFKHIKDTRYMSSYFKYKEAYEHTKAYGYTLGPKDVPFVHVRRVNNVTSERLYRELYHKLKDKIHTTPDPPEIRQVKKTQEAVSELIYKSDFFKMQGHMISLPYTPQVIHCRYVGDITSDIKYKEDLQVLKGFGCFLYDTPDMVRSRHLRKLWSNYLYTDKAREMRDKYKVVLDTPEYRKVQELKTHLSELVYRAAGKKQKSIFTSVPDTPDLLRAKRGQKLQSQYLYVELATKERPHHHAGNQTTALKHAKDVKDMVSEKKYKIQYEKMKDKYTPVPDTPILIRAKRAYWNASDLRYKETFQKTKGKYHTVKDALDIVYHRKVTDDISKIKYKENYMSQLGIWRSIPDRPEHFHHRAVTDTVSDVKYKEDLTWLKGIGCYAYDTPDFTLAEKNKTLYSKYKYKEVFERTKSDFKYVADSPINRHFKYATQLMNEKKYRADYEQRKDKYHLVVDEPRHLLAKTRSDQISQIKYRKNYEKSKDKFTSIVDTPEHLRTTKVNKQISDILYKLEYNKAKPRGYTTIHDTPMLLHVRKVKDEVSDLKYKEVYQRNKSNCTIEPDAVHIKAAKDAYKVNTNLDYKKQYEANKAHWKWTPDRPDFLQAAKSSLQQSDFEYKLDREFLKGCKLSVTDDKNTVLALRNTLIESDLKYKEKHVKERGTCHAVPDTPQILLAKTVSNLVSENKYKDHVKKHLAQGSYTTLPETRDTVHVKEVTKHVSDTNYKKKFVKEKGKSNYSIMLEPPEVKHAMEVAKKQSDVAYRKDAKENLHYTTVADRPDIKKATQAAKQASEVEYRAKHRKEGSHGLSMLGRPDIEMAKKAAKLSSQVKYRENFDKEKGKTPKYNPKDSQLYKVMKDANNLASEVKYKADLKKLHKPVTDMKESLIMNHVLNTSQLASSYQYKKKYEKSKGHYHTIPDNLEQLHLKEATELQSIVKYKEKYEKERGKPMLDFETPTYITAKESQQMQSGKEYRKDYEESIKGRNLTGLEVTPALLHVKYATKIASEKEYRKDLEESIRGKGLTEMEDTPDMLRAKNATQILNEKEYKRDLELEVKGRGLNAMANETPDFMRARNATDIASQIKYKQSAEMEKANFTSVVDTPEIIHAQQVKNLSSQKKYKEDAEKSMSYYETVLDTPEIQRVRENQKNFSLLQYQCDLKNSKGKITVVQDTPEILRVKENQKNFSSVLYKEDVSPGTAIGKTPEMMRVKQTQDHISSVKYKEAIGQGTPIPDLPEVKRVKETQKHISSVMYKENLGTGIPTTVTPEIERVKRNQENFSSVLYKENLGKGIPTPITPEMERVKRNQENFSSVLYKENMGKGTPLPVTPEMERVKHNQENISSVLYKENVGKATATPVTPEMQRVKRNQENISSVLYKENLGKATPTPFTPEMERVKRNQENFSSVLYKENMRKATPTPVTPEMERAKRNQENISSVLYSDSFRKQIQGKAAYVLDTPEMRRVRETQRHISTVKYHEDFEKHKGCFTPVVTDPITERVKKNMQDFSDINYRGIQRKVVEMEQKRNDQDQETITGLRVWRTNPGSVFDYDPAEDNIQSRSLHMINVQAQRRSREQSRSASALSVSGGEEKSEHSEAPDHHLSTYSDGGVFAVSTAYKHAKTTELPQQRSSSVATQQTTVSSIPSHPSTAGKIFRAMYDYMAADADEVSFKDGDAIINVQAIDEGWMYGTVQRTGRTGMLPANYVEAI

SEQ ID NO: 11728 - DNA, 419 bp, Rattus norvegicus; identical to SEQ ID NO: 7336
  ref <308>: DATABASE ACCESSION NUMBER: EMBL / AI639002
  ref <309>: DATABASE ENTRY DATE: 2000-03-04

SEQ ID NO: 11729 - DNA, 537 bp, Rattus norvegicus; identical to SEQ ID NO: 7337
  ref <308>: DATABASE ACCESSION NUMBER: EMBL / AI639019
  ref <309>: DATABASE ENTRY DATE: 2000-03-04

SEQ ID NO: 11730 - DNA, 449 bp, Rattus norvegicus
  ref <308>: DATABASE ACCESSION NUMBER: EMBL / AI639022
  ref <309>: DATABASE ENTRY DATE: 2000-03-04
ttggttctttttttcggagctggggactgaacacagggccttgtgcttcctaggcaagcgctctaccaccgagctaaatccccaaccccgtttcaatacatttcaatacgtttagcagaagtaggactatgaaatgccgctaaccgcaatcttcctacctcaggccctttacgaaatgcctttacaggtgcgtagatttttaactcccttttaaacaaatcgattcatcaactgaagaccatttggaagatctgctaaaaagattctcctttcacaaaaacaagattccagaaatctttgcttcgttcttccaccacactcactcctgatttaaatagcagaaagtgagtcaggatatggataccagattagaaaaacatatctgctcagaggcaccaggcagggtcaatgttaaaaatcttgccttaattcatttatttattttttag

SEQ ID NO: 11731 - DNA, 460 bp, Rattus norvegicus; identical to SEQ ID NO: 7344
  ref <308>: DATABASE ACCESSION NUMBER: EMBL / AI639088
  ref <309>: DATABASE ENTRY DATE: 2000-03-04

SEQ ID NO: 11732 - DNA, 419 bp, Rattus norvegicus; identical to SEQ ID NO: 7363
  ref <308>: DATABASE ACCESSION NUMBER: EMBL / AI639132
  ref <309>: DATABASE ENTRY DATE: 2000-03-04

SEQ ID NO: 11733 - DNA, 747 bp, Homo sapiens; identical to SEQ ID NO: 7364
  ref <308>: DATABASE ACCESSION NUMBER: EMBL / BG722716
  ref <309>: DATABASE ENTRY DATE: 2001-05-09

SEQ ID NO: 11734 - DNA, 383 bp, Rattus norvegicus; identical to SEQ ID NO: 7365
  ref <308>: DATABASE ACCESSION NUMBER: EMBL / AI639139
  ref <309>: DATABASE ENTRY DATE: 2000-03-04

SEQ ID NO: 11735 - DNA, 501 bp, Rattus norvegicus
  ref <308>: DATABASE ACCESSION NUMBER: EMBL / AI639148
  ref <309>: DATABASE ENTRY DATE: 2000-03-04
ttagaattttcccagtgtatattaaaaacatatatctttacaaagaagcttagtcttttctggaaatcatttctactagagattcataatctgaatagtccttcagtgactgtatcaggtcatccagaagacagtctccttgcatgaagctctcaaggtcatgtagtgatttgtttattctgtgatctgtgaccctattttgtggaaagttgtatgttcttattttctctgatcttcctttagttccaacctggatctttcgagcactgtatcttttagcagtttcttcctctagacgcatgctgtataaccttgcacgtaactttttcatagccagctccctgttcttcagctgagatctttcttgctggcattcagaaataatacctgtgggaagatgaactatccgaacagcactgtctgtggtatttacgtgctgacctccagctccacttgctctcttcgtatcaattctcaaatctttagggttaatcaccagtt

SEQ ID NO: 11736 - DNA, 2559 bp, Homo sapiens
  ref <308>: DATABASE ACCESSION NUMBER: Refseq / NM_019041
  ref <309>: DATABASE ENTRY DATE: 2002-04-04
ggcacgagggtcagggtccgcgatctcggactaaggatgcggtcccgggttctgtggggcgctgcccggtggctctggccccgccgggccgttggcccagcccgccggcccctgagctccggtagcccgccgctggaggagctgttcgcccggggcgggcccttgcggaccttcctcgagcgccaggcggggtctgaagcccatttgaaggtcaggaggcccgagttgctggcggtgatcaaactgctgaacgagaaggagcaggagctgcgggagactgagcacttgctgcacgatgagaatgaagatttaaggaaacttgcagagaatgaaatcactttgtgtcaaaaagaaataactcagctgaagcatcagattatcttacttttggttccctcagaagaaacagatgaaaatgatttgatcctggaagtaactgcaggagttggaggtcaggaggcaatgttgtttacatcagagatatttgatatgtatcagcaatatgctgcatttaaaagatggcattttgaaaccctggaatattttccaagtgaactaggtggccttagacatgcatctgccagcattgggggttcagaagcctataggcacatgaaatttgaaggaggtgttcacagagtacaaagagtgccaaagacagaaaagcaaggccgcgtccatactagcaccatgactgtagcaatattaccccagcctactgagattaatctggtgattaatccgaaagatttgagaattgacactaagcgagccagtggagctggggggcagcatgtaaataccacggacagtgctgtccggatagttcatcttccaacaggtgttgtttctgaatgtcaacaagagagatctcagctgaaaaataaagagctggctatgacaaagttacgtgcaaaactgtacagcatgcatctagaagaagaaataaataaaagacagaatgctagaaaaattcagattggaagtaaaggaagatcagagaaaataagaacatataattttccacagaaccgggtcacagatcacagaataaacaagacgctgcatgatcttgaaacttttatgcaaggagattatctactggatgaacttgtacagtcattgaaggaatacgccgattatgaatctttagtagaaattatttcccaaaaagtttaagttgatttgttatttatagactttcgtagcttagaaaaattctacagtacatccacatagggtgaaagtacccttactctcttgaaaaacgttgagttaacacagttggaggtaatatgcatattctgaagtcatagataatttacacagatctctctcaatgcattagcaaaaatcatacaatatacagatggtcctcgatttacattgtggttaattcccaataaacccatcataagttaaaaatgcatataacgttagcaacacagcagtctcctaattaatgacagcttgacttaacaattttccaactttaccatggtgtgaaagaggtatgattcctaagccctaaggagctcctcagcttgaaatggggctgcatccctataaacccatcataaagtcaaaaaatcctaaaacataagttggtgaccatctgtaatcatgatgtggtggtaaatcttggacgctaccttacaataactagacaaaggaaaatcatcctttgtcctgttctgtgtaaatatttaatgaatgatcaaaacttcagtttaaatattatgaaaaactttaaacataaagtagtagaaataagacagtaaatactgtatcctaatatccagtcaggatacagaaaccataccattaacttgaacagggataattttaatataaaaaactgttaactgataatggtactaacttttaagagggatgaaagagagctatgatgtcctaggactgagagtaccccaggaaagaatacccttgaaagggtctccccttccccatggtgaagtcaggcctaatggagagagtggctacagcctactcagtgattgggaaattccctgtcttgccctgggccagagctggtgtaccgctggtggatcaggtcttacaagcaaagaacctcacactcccaactggtaagccagaagcctcttgctagggtgtgagcaaaacttggacaggaactctcagtagatgtttgtgtttgtcaagattctccagacaaacttccttaaaaggattggcttgtgttgttattattaagtctaacaagtccaaaagctggagtgtgaggcaggaggctggaaacccaggaaagctgatggtgcaaggtccagtccaaaggtatctgttggaggattctcttgttctgggaagaggacggtctttttttctcttcagaccttcacctgactggatcaagcccactaacatcgaggaggacagtctgcattactcagagttcactgattgatttaaatgtcaatctcatataaaacaccctcacagaaacacctagaataatgtttgaccttataattggaaaatcagagcaaaagttaaatctctaaaaaaaaaaaaaaaaaa

SEQ ID NO: 11737 - protein, 445 aa, Homo sapiens
  ref <308>: DATABASE ACCESSION NUMBER: SWISS-Prot / O75570
  ref <309>: DATABASE ENTRY DATE: 2001-10-16
MNRHLCVWLFRHPSLNGYLQCHIQLHSHQFRQIHLDTRLQVFRQNRNCILHLLSKNWSRRYCLQDTKMLWNHKALQKYMENLSKEYQTLEQCLQHIPVNEESRRSLNRRHAELAPLAAIYQETQETEQAIEELGSMCKSLNKRDEKQLLELALEERQTIDQKINMLYNELFQSLVPKEKYDKNDVILEVTAGRTTGGDICQQFTREIFDMYQNYSCYKHWQFEPLNYTPADYGGLHHAAARISGDGVYKHLKYEGGIHRVQRIPEVGLSSRMQRIHTGTMSVIVLPQPDEVDVKLDPKDLRIDTFRAKGAGGQHVNKTDSAVRLVHIPTGLVVECQQERSQIKNKEIAFRVLRARLYQQIIEKDKRQQQSARKLQVGTRAQSERIRTYNFTQDRVSDHRIAYEVRDIKEFLCGGKGLDQLIQRLLQSADEEAIAELLDEHLKSAK

SEQ ID NO: 11738 - DNA, 31737 bp, Rattus norvegicus
  ref <308>: DATABASE ACCESSION NUMBER: EMBL / AF220294
  ref <309>: DATABASE ENTRY DATE: 2000-07-21
ctagattctcctgtgtaccctcaacatgtcaagctttgatttttcatatatgaatgttttacctgcatgtacctatgtgtgtcgcatgcatgactggtacccatggaggccagaagagatcatcagagcccctgaaactggagttacaggtagctgaaggttcccatgtgggtgctgggaactgaacatacatcctttgcaagagcagccagtgctcctaaccactgagccacctttccagcctctccctcaacaaggcacccttgactctcagcaccttgtgttggcagctgcccttctcttagaggattctataacaaaaccatgagctcgtcctcgcctctctagctcctgctcagtctgggaattcatccgttagcttcctgagtctcgagtgcggctgctgtgcctgcttgtgcgcatcattttgttcatgctttgttgtttgttcctgggtgggtggctgcagctcctgtcgcagctctgtccctcaggcctccatgttagccagcaatagttggacaagacctccatggagagccctgcgtgtatgaacccctcagctttggtttagctctgttagcatcgtctctgcgctactcaggagcaaggctatccatgtgaggtggtggccagtgccctctggcactccactgctcggtgctcctcaggtactgcctgggagctcctgacactgctggtagcccaagtcactcactgccccctccccctgctgcttctcttgttgggggccttgctctctttgcttttgttttcattgtgtggaacacaaagctcacagtaataaagacaggactcacctgcccctcggaggcagcataaagacagatctggtacagtagtgcagcagttgaccctcggggacaccaagaccactgctggtccctcacatgagctgtctgccctggccgcttttgctgtgccatctaggatacacttgagtttctagatcactgagatatttgaaaggtgagacccattgatccctaagcaacagtggtatcttttacaggagaagtatgccatcggggagcccacggtgccatccaccctggcagaagagttcacctacaaccccttcatgagagtgaagtaagatggtagtggggctctctcttgactgcacccctcctgtggtgtagctcatgccttatgacgcgagatgaaccagggctgagcccatcctgaccctcacaccccagctttattaagagtacccaagaggcaggctttgtcccataaatatgatatgcttttcttagcatcttgcaaggatgtgagggacccaggacccattcggggagtggctttggagggcttctttaaggatcggtgaagctctgggtctctgggctaggtaggcagtgtagagctggcggcttccatctgtattttgctgggagcgcctgctaggcttgcttaatcccagcggttttcttcctgcggacgtcccaggctctgggaacgggctgtttgtgtgttgcctgcagcctgttctcttgtctcgccgccccagggagaagactgtgcaacagcatgctggcgagacagaccctgtgaccaccatgagggccatccgcagggagaaggaccagttcaaggtgcctcgggactgaagcacacccacgctgggacagggacttctaaccgactggcctgctgctaatgcaggacagtctacttttcagttaattcagagcccttagcttgtgttatcaaatgttctaatgcatatttataagagaaaaaaggtttaaagtatttattcccataacctctgcttatggactctttattacctctggctttcccggtctataacctcagggtcctgtggtcacatgacatccagtttgccccagtttgttagaggtgcttgctctgggagggactgagcctgggtaggcctcttgacatcctggctctttgggaaggagatgcctggcacctctctgggcttttcctccctttttgactagcctcaagggtagcaactacttccaggaattagtacctgtgtgtgtctgtgttgacattttcatgagatgcttctgtgtcagtgtgagtggacttaagtctttgagagcaagttggggcacagcctggatctcaggttgccctgtcagaggcctcaagtctggcctcagcgaggcaggcttctgatgtgtgtgaagctagccatttgccaaggcccttctttaggtcagactgcttctgggttggccaccatggaggctgtgctcagcgttgtgaattctcagcaagagttactctggcgcccctgccctgagcagcctggagcctgtcattaagtgtgtcaatagtcccttttggcctccaccttgtcctgtctcctcctgggagaggttggatctttgcatttgctgagttgaaccagtgtggtagtcctgggaagctgccacccgccgtggctctgcctctgtcgccgcattacagcttttcctcttctgctccctcctgcctctccaaggcttttcttttccttcgcacacccagaccgtattcctgtagaagtgtttcccttattcctggagtctggtggcttgcttcagtagaccatcctgtggccatgctttgatggccagcttgctgtcctatgccagccccacaagccgttactttagctttatagttatttgttgccagggagacacagagtccagagcatcctagcatccattcatatcagaatggggaactctgggattgaatttggaggtgcagctccagtgggggagaggcagctgcagcatggcaccaaccattacccagccacactgtccagctgccttgcattgcattgctgctctgtagtcccgatggctgcagcctgagcagacagagtccaaggtttaggacacaacgtgccctcacttcttccctcagccacacatggagaactcaagccacctatacttctgacagactggctttggactcagggctttttctcccccagccattctcctagattcctagggcctcacggcacttaggagaactttattataaaagagaacaaaagctgggcatggctgcgtatgttttaatctcagcatccgggaagcagaggcaggagaatctaacctagtctaagagtcccagcaagcgagagctatagagagagactccatctcaaaagccaaagctaaaatgacagagacgggatggctgataagatcacaggacctggcatacagagactgtgccacttcggagttaggggcagctcctgcacatgcgcatcactgccaagcttcctggcctcagttccatccacattgtgacacagtggggtggcagatggaggagtcgctggcctttggaatggagtgagtctccagctactccccgctctgcaggtctgtggccactccagccacccattctttgtggtatcctagggacctgccctgcagggtaacagacactgggacctcagggaaaatcggtgagtagcagacacaggccataccatccggggacgggagagtgagagcggccagcagaaacagtgcttcagggaaacgagaaaaagtgcagcaggtgctcgctgtgacctttccagagccgatggccagggatgcctcctccaagaaggaacgtttgtgtaaacatgtgggaaaggggctggggtgggctacagaagcaggagggaggtaagaggctgaggggagagggataaagatgtgtatattagcctggtcgtgctggtacatgtgcttaatccagctctcttagttggaggccagcttgagccctaggagagaaaccctgtctcaaaaaagcaaaacaaactaaaacaaagtgtatgtgaatgtctctcgtgtgtgtacatacacatatgtgtgtgtgtgtgtgtgtatatacacacatatacacatatacatatacatctattctgatatataagcacaaagctatccaagagcaaacttagttgaaaaaccaaacctccagcctccagggtcagtgagacatgcaaggaagtgtggctaggttccgacaggcggtggctatgtgagccacacggcccttggttttgattccagtgggaagcacactcctgctccaccagggttcttgactccgggtggaagtaggcccagcagcacagtgatggtcaggagggatcaccggtggtgcggtatgagctgtgagactccaagtgctagctgggaggcttcagcagacactcagacaaggcacaggctgggaacctggaggcaagccgtttgcctcctgacagggcaccgttgtgaaggtagtcaagctgaccagaagtcagaaatgagagagacaaggaggggcctgctaggccaagagcacagagtggtggagcaaggggtgcacctccaactggcggctgccatggtacccaatcctgagtcttaagacctgccgctccctgcttgtgcatcctctcttgaatgttaactgttgtttgatctagtgaactgtacagattgtccggtcctgagccgtcattgcagtgggtgggtgagatccgttattgagtcccaggacgaatccctttatagctgggaaaccacaaaggacgtaacaagtacttacagctggccaggtgtggtggcgcacaccattgatcccagctcttttgaggcagagccagacgtacctgtgcgttcaaggccagcctggtctaacagagcaagttgcaggacagccaggactatatagagggatcctgtcataaaacaaaaacaaaatcacttttaattgagatgaaagccacacaagtagccatttaaatttcagccctgggtccacccacatacaccactgctggtcggcacctggtatactgtgttctgtgttcctatctgtcgtgatctgagcttctagtcactggtgtctgtccagctggaagaggcaggcttctggtctaccaccagtgtagatgtgtgtcttcaagggaaacaggccagggtgagaataaagaattggatgggtggcacagggtggaggtggggacagcactagaacctgacctgctcagggtagccagctctttctgtcctagggcccatccctctgtgtgagtatcagaggcaagagacccatctctgccctccgatttatggtctgcgtgagagcagctgacacgctgggcgtggaagaagacattgctttcctcttcctacccctcagctccacagctcagagtctgtctgctctgaacacccaccctgtaggctctgcctccccacccccgtttgtcaccagtcatcggtctcctgccgcaccctgggcatgggtagaagacagggcccagtgcccggtgctcaaagactcaccagccacagtaactggagatgacactgtcatcggactgaatctgaatcatcacttcgatgtgcacaaacgctctctgggacagatcgtgtcccatatgccaactcacagagcctaaagtatttagtgtgttctctaaccaagtacagttagagagccgggcgcagtgagcatttccaacactaagtgagtcaggaagagaagggggtacacaaagcaccaagcactgcgtagggtggagagacatctttatatagaatatatatttatatctcacgtatatgtatatatattatagggaggcagggcagccgggggaggcactgggagtgaacctggggcctcacacaccctaggcaattattctacccttgagatttacttttagtcctaacaattttatagctttaagcacctatttgagaaaataggaagtcttaaaaatgcaggctttaccttaacaagaaaacaagtgaaactcgaatgatcagaagggaaggctggggtacagggctcagggacagacacttactgagcatgtgcaaggctgggcccatcctcagagtgaatgggcgtttaagtcaactcagtgctctggcccacgatcgcatcatggcaaaggctgaggaagaggcattgcttaggttcgaggccagcctcgggtacagagtgaattcagggatacactgggctacagagtaatacctgtctcaataatagaaagtggaaattcataaaacagaaaaaaagttctttgaagggatgaaaaaaaactctgacttaccctggatcaaacttaaagatataaattacaaaagtcacgcagacagaaatcactcttgcttgtatggaagtcaccagggtttatgagggattctaggagaaactgaagctgaaatggataaatccctagaaagacgtaaatcactgcaactgacgagaaaataatgagctggggtggtatgtgcctctcaactccttgggaggctacaaattgcttgaggccatcttgggcaacacagccagatgtgggggtggggttatttgattgacactaggtctctagttgagactggtttcaaactcctgatcatcttgtatccgcacgagattggatttggaacacatctataccaactgaagtcgtccatggagagcagaggccatacagcttcgttggtgtattctgtcagttacatcagacacgcgaatgtttcagaatacagaggtactgctcccaacccacttaccaggtgaatatttctctgctacaaaaggccaggaaagatatcacaagacaaaaaaatccttgatatcaccaacccagattcaagttcagcaacattatatgccgtggtcttgtgggatctgcctcagcagtgtaaggttgaacatcagccaggatagctagcggactgtgtgactacagagcaacgcgtacaggatcttctcagaagaatgatggcaaagtccaccattaatttacagactagctccacaaatacagttgggagctttctttgctaacagaatgcccctatgtgcttaacctgtggccacgagagacccacagccctactgacatcagaccacacagtttaccatcttacagtttggaggttggcagccgacatggctctcatggggtgtcagcagggctgcatttctgaaggctctaggaacgtgtccttgacctgtcccacttcttagaagcctcctgcgtttccagctcacagcccctgtctctgcctgcaaagctggagaccctggttgagtcctgattcaggctccccatcaccttcggaatccttcttcctctccaggacaccaagtttcctttggcctcacccgggagctctcactaaggtcaattccctctgccacgtaaaggtcacggtcactcgtggcagtcatgggttctagggatcaggacatgggcgtctcttattgattatatcaccttctagaacttgtgaaaatggtgcacccagcaccaaagttaatgctgtatggcttaatcttccccacgctggcaagggagagtcatctactattgccgtgccgtagggcactgcaataagtcattaaaaggcttgccagggttttataaaaaaatctagaaggaggtaagcgaacgaacggcacagcctcacacagcaaatcctaaggaatactgtttcccactggaattaaaaaatccttgagttataagatgaaagtaaactcattgcgtccctacatactagttagtaatccaagagtgaaataaaagcagttcttctctcaagagcatcaaaactcataaaataccaaggaagcactttatcaaggtgtagggtttacacaatgttaagagaaatgaacaaagccagtgggcaggatggtcaggctcacagatgagaccactcactacgaggctggcttcccacaagctgatccacagataaagtgcagcccccagcaaaattcacaccaaaaggtgtttgagaaagtgacaagcaggctttaaaattacacagtggctcaaagaatccagatgacccaaaacaacgttggaaaagagcaaggttccgggacctgtggccacctaaaactagaaagcacggccatgacgtgcggtgtgtgcgaggacagggctgccaccaggcgcggaagctgagtggagaataaactgttacgcttgtgcccattggattttcctttgttggatgccatgagcagtctttttgacagatgggttaggtcacttgggcttgttcagaggaaacatgaatgaacgcatataacgtgaaaatggagaactaaaaagctctggactctgaaatttggaggaaggagtaatacaaaatataggttcatggtttaggcagtgttcttggatgtgaaatgcaagtcttgagccagaggagaaacaaattgatattcttcagaatatcagatattcagaaacttgcaataaaaaagacattctaaaaagaaatagacaagtttcagacagggaaaatttaccaaatatacatctggtaatatgtgacatctagtctcacgtccatacgaagtcttagaaaacaacgaccttaacccagggctggagaggtggccctgtgcttcagagccctgactgcttttacagaggaccttggttcactccccagatgccacaggtgcctcacagctgtccctgcctccagttccagggatccagtactctcttttggcttcagcaggcaccaggtttgcatgtagtgcatatacatacattcaggcaaatactcagacatttaaaaaaaaacaattaaggctgagagtgatgctgcacacctttaatccctgcacttaggatgcagaggcaggtggatctctgtcaatttgaggccagcttggtctacagaactagttccaggacagtcagccccacccccacaccccacccccacaaatcctgtcttgaaaaccaaaccagccaatcaaccaattaaaaaaaaaatatatatatatactttttcagaagagatgttaaaatggccagtaaggcacacgagagggattggagagatgcgcagtgacatactcactctgcagacacaagggtctgagacccctcgcccacatggatgctgtttgtggccgtgcatgtctatagcagcagcaccggggcacggtcatgcatacacaccaagctctctggtttcctggtcagccagactagacaaagagtgggctacaggttcagtttaagatcttgcttcaaaaaatgtcagaaaaatgctaactgatggcttccacgtgtttgcatatacacatcacacaaaaatatgaaccatcctgatttttaagttatattacaaaacaataatatcaacagcatggtactggcataaaacagacatatttatcaatggagtagaaatgaacacccaaacataagtccacatagctacgactgcctgatttttttttttcataaagccagaactacacctttaagcaatacagcatcaccagtaaacagtggtcggatcggatactcacatgaaatgtgattcttactccttatcctgcacagcctctagatggatcgaggatctccacataagaccgagcccctgaatcagaggagaaagtagacagggaattcactttaactttcttgcacggaaaaggatttttcagaacaagcccctgatggcacaggcattaaaatcaacaactgacaaacgggatcacctaaaactaaaaagttcatgttcagaaaaacaccctgccatgtgtaaagagacgtgctgcagagagagcgcatcgccagctccacatcggcagggttagcatctagaatctacagacgacaacagcaaaccctgaacacagccagaaaataagcaacccagctaggaaatagggcagagaagtaaatgtatcccagaggacaagtcgcacatggctgagagcggaaaagcttgctcaccatctctagacactaggaaaaggcaaaccaaaactacttcaagatttcatcttaactgagtcagaggggccaagattttaaaaaacgaacaaacaaacaaacaaaagcagatgtcgacatccatgtggggaaagcgaggcacttgctggtgggaaaccgagtcgtttgaatcccagtgagataaagaaaaaccccagtacatgggatgtcagtcaggggagaagttactcagagagctagagagagcgttgccctgtgatgtagctctctcatgcctgggcagatacccagagaccaacggcagagacactgctcagtcacactccttgctgtaccgatcccaacagtcacaaaatggaaacacctaggtgtccatcagctgatgcacagatagtgaagatgtggcccatttacacagcagaacattattcaacttgtgacaaataaactggagctggagagacgacacttgctgctcttccagaggacccaggtttgggtcacagcagccacatgaggtggggcaggaccacctgtaactgcagttccaagagataatactctggcctccgaggccaccagcacacatgtggcacacatgtggcacacatacacattttacaaggtttttttttttttaaactgatcaagaacttcacaggcagctgggcagtggtgatgcacgcctttaaacatggcactcgggagacagaggccgtcagatctctgtgaatgtgaggctaccctggcctacagagtgagttctaggacagccagggctatacagagaaactctgtcttggaaaaaagaaatggaaggaaggaaggaaggaaggaaggaaggaaggaaggaaggaaggaaggaaggaaggaaggagagagagagagagagagagagagagagagagagagagagagagagagagagagagaaagaaacaaaaagaaatttgcaggcaaatggatggaattagaaacattctgggctttaactgctagttacaggcctccacccaaaaacaaacaagaaaccattctgagtatggtaacttggatttggaaagacagatgtcacgttttctctcacttggggatgttagctttgaatcttcagatgtgtgtgctgacctggagtgtttgcagaactcaggaagttattaaaggcctcagaggggacttcaagctttggagaagacaaaatggttcacaaggttgaagggggataatgaaataagcagagtctctgttggggactggttctaatggtttgtcttaattcagctccccaagtcacacaggaatctactgtccagatgctgaagggtccctgtccccaattgtttttgattggtcaataaagttattaacagccaatggctgggcagggaaatggaggagggacttttagatttactagactagggacaaagggaggaagaaggaagagtgtagcaaccagcaaccacgggttactgggttcctgaaaggaaagctggggatggatgggaaggacggcgagagaaatagcgagccaagacaaagttctctgatcaaggctcaatgttttaattcttaagtctgaatataaagagggggaacccatccccactttgccaggatcttgtcaggaaaacaagctcagctgctcagcaggtactggcttcttgcaggaagctgcagatgtggcaggaacagactacacctaggtcagaagactccaccccaggtgggctagcaactgtggcaaacaaggtctggctcagcctgctcaaggctagggggagggcacagaacagaatcgttggggctggcttacagtttcagaggtttagtctattatcatcatggtgggaagcatggcagtgtgcacacagacatggtattagagaaggagctgatagagttctgcatcttgttctgactgtagccaggagagaagactgacttccaggcagctaggaggagggtctctttgcccacacccacagtgacacaattcctataacaagaccacacctcctaaaagtgccactccctgggagatgcatattcaaaccaccacaaagggatgaatcagggtgaggaatggaagagactatagggagggggaactaaccctagaggctttggggcaatgggctatgtacctagtcttatgttcctcgtttccagagttgagaggtggaaccctgctgaaacccagtggtggtaattcccacctacatggaatggaaggagttccctcatgtctcctggacccctggctcctgttgaagttactgcccccacagcccccacaggagaagcatgtcccaagcttctgacctcctagacgcctcccagttacctagcaacagcgagatacaagcccactataagaggggctgcttggccccacctcactctctcctcatcctctctctctaacctcttactctctagcctttcctctttccctctctttcccccttccctcctcttggccatggccggtctctttctttttaccttctctcctttccccttgcctttctacaataaagttctaaaaccttagactgtctctgttcaaggccctgttgtgcttggacgatgggataggctttctcttaatgagctgtgcctaatctcctatcaggtcttccagccatggattggatttaggactctcgcctgcatgggaacctctctccctctgccctctctccagggctgagagtgttgccctggggcccctggtatcagagctgtcccttgtccatcccccattccccccccccctcgagtggggtccagtggcttcacacagccagatgcccatccgaggccgagtggaaagtgtctgacagtcctcccatatctgcctgcccagagcacaggaactctggctggatatgggcactctctccctcccctctctttcccccacaccccacagcctcacaacagacctcttgaaaaagccacatggaaccctactgccatagaagattcctgaaatatatacagagtagtggatatagctcagcagttggagtgctggcttctccccagagagttaatttccagcacctacctggcacttcacaactgtctcaacttcagttttaggataacagctgccattttctggcctccacaggcaccaggcatgcactttgctgcacagacatatctgcaggcaaaacactcacacacataaattaaaataattagttttaatggagctgcccattaaagagcacaacaccccaactagatactgtttgctagcaaatgaaaactccagtaccagggatgggtttgtgggttgttgaccaatacggccccatagcccagcacttgggagacagaggcagatggatctccgtgagtttaaggccagcctggtctacatagtgagtttcaggacagccgtaactacacagaaaaaccctgtcttggaaaaaaaccacaaaaccaagagacagagagagagaactcccccaaagatacccaagcattctatgctattgccaataccctttgctaccatccagagcttgacagtaaggccccgtcagtgaagacaccacatactgggttcagtctggagaagtcaagccggttactcactgggttcttcacccctctacctagacgtcagcatgtatggtaacgcctgtaaaaccagcagctgcacagaagacagtggaaagccccagctctgaggatccaggtaggagcagcagtgactggggctaggagagcctggcgcacctgaccctggtgctgaggcagggaaagaatgaaacctgagctctccctgagtgtggcagatgatacaatgtgaactgtggaaagcgacataaaagattataaaagtacctaaagggaacatgtttaggtccaaatgtaaacaggactcaaaactctagtttgatcaatcaaaggacatttcaaagctgtgaagggttagccgggggtggtagatggctatgagcccagtgtgctgaggactggagcaagaggatcatcctgaatttgagcccagtctggactacacagtgaggtattgtcacagaaatgtaaaatcagcctcagcaaggtgacacaggctgggatcctagcacttgggaagtagaggcaggaaaagcaagagtttaaggccatcctttacaatatttcaatttcgaggctagtttggtctacttgagaccttgtcaaaataaaaaaaaaaaaaaaaaaaagggaaagaaagaaaagaaaagaaaaagaaagagccaagtagtggtgcatgcttttaatcccagcacttggggggcagaggcaggaggatctgtgtgatttcgaggctagcctggtctacaaagtgagttccaagatagccagggatgttacacagagacaccctatcttgaagaaccaataaatatccacaatctgtgtctggtagctggacagcttcagggtgtttggcctcaccagaaatccagaaaacaatgaacaatggacaggcaggcatctaccagtcagcgaggtacagggacagaagtgttagggaggacgtacacttccctgtggacactcaaatgctgcctccacagaaacactcacaggcccttcagacctcgaaagtcaccattcacagcttcactgggtgtggtcccggagggaggcgctgagtgtccagccaggacaattgtaccatgatggctgcattcacttggatgatgcccgaagaaacatagactctgtctgttggcatattccaggctagacacagggcccagggaaggcaccaggaggtaaccctggatagaatagcagagttgtcagggattacggctcttcagtggctgggccttgtgttcctgtgtggtgtggtgtggtgtggtggcagcacttcgcttgggtgaagcaagcctggcaaggcttccacaccacatgaagcagggcttggagacaggaagagatcctagtccagcagggcccatagggactcaggcactgctgctggcccctgctctcagcagaggctggctactggccccgcagctctgctgagaccgcacttttgctgtgtaaactgctctgtggctctgggcggagactccctccctgccgatctataatttctcagaaaagaggctgaggaataacatggaaaatgccctagacatggggaggcatggtgggagccacagcccctgaccctcccagacctgcctacttcctctgcttgcttagagatggctcccaatgtcccccaagcccctgagaagctgttctttctgaaacccagcactgccttgcctggcccctcccgtgtgcattccccccatcccgggcagggcaaagggacagagctcaggcaggactggctggagtgtccgtcaggtcacaggtttcaggccctggaggaggaagctgagatgtggctccggcagggtgagtggagccagggccaggttgagggccccacacatggccctcctgcctccccctggggcagcatgtttacccggggtctttgcacacaaggtagtaggttgttaggccctccatactgtggaggccagcagaaactggctctgcccctgaggctgcggtgccccactgtcttcctgccaacccttttctaggaggactgtgctggggagagcaaacacgaggtagctggtggctctgccaggtgttcctagaagaggccctgggggaggggcggtagccagccgtcagctgacctagaggtcacaggaagactgagactgggccttagacaaacccctggactgggaggcacaaatggtgggcccacttaggcctaagaaaccccaggtcagagagcattcgagaagtataggcaaggccttaggaaacagggcaaactgtttaagcctgacagagtcatctgctccgtatagaggtgagtgggggggttcccaggaacccccgagctccctcaccttagctgaacctactgggagacagggccccctacacctaccttgagcaccaatcccgaaggcctactccaccaagcctctacctccaacaccagcagaggtggctttcaattgctcccccgcccctcaatccccgagactttggggcggacaaagtgcccctcccctgcaccacccgcatccagaggagcttctgttgagacttgttgcccagccctagagggttaaaggagccagagtgtggggcagggccagctgagggctgccagctacaggcagtggggaaatccactgggcagcagcctgtgctgtagacggcccttgctcactgcctgcctgcggccagctctgtacaaggaacaatggctctgaggacaggtgaggaatccgtctcccctgccacttgctctgagggtagctggtcctcagccagagccctctgggagaagccgcagtaggcttaactcagggtgggctggtgggaattctgggttgggtcttggatacaattcctggcaccggagggtctcggttactttcccccttggtggtggcactgtgggaaagggccagatgaaggcagggtaggcagaagaaacaagtacctcacccctgggcgcaaggtgcagaaatggggctcattgctccccatattctggtctcatagcttgctgagatggtatgctgcacacagcccgagatccttctggctaccgtttctcttaagggcctggccctgggtgaacgggaaaatgtcttcttcctcgtctgccattggtgtgctcccacaatgcctagggcttcccccacttccaaaccaccgttacacagtcacacaagatacaaactgcgcaggtgcgggacagtgtcgttcttcccaacttgatctggggttctcagcatacaccgaggcagattaagttggggtgctagccgggttcatgtgatttgacgcttggttgaatggacagttggggttttctagacccccactcttctaccagtaagggttatagccttcatataatggggagcaaataaggcacgcttcacccatatgagggcccaacaggcagggaatgcccagcttgctgcctagccattgaggaccacaaatgaatatgctacctgggtctatatccccaagtattctgcaagagtcagctcttggactgcacttcgattctgtttctcagcctggctgttgtacaccctagaggacacagcctgcctagtggccagggcccaggttgcctggagagcagggtgatgtgggagacccaggccctctgtgcccttgcagtgcgacggggatcaccacttgctggttccagggtctgggaaattgaagtggcttcaaaagataggacgtggctgtcaccagtgtttgcttagtatcaaagtgggatggcggatgccatctcttacaatggctgagggttagggaagcccagggtttggttcatatcctgggggcatctccttgccaacccttctccccacaggaagcccagccctggtggtgcttctggctttctgggtggcactgggcccctgttacctgcaggggacagatcctggagcatcagcagatgccgagggcccccagtgccctgtcacctgtacctgcagctatgatgactacacagatgagctcagcgtcttttgcagttcaaggaacctcactcagctgcccgatggcatcccagtcagcaccagggctctgtggcttgacggaaacaacctgtcctccatcccctcagcggccttccagaacctgtccagcctagacttcctcaacctgcagggcagctggctgaggagcctggagccacaggcactgctgggcctgcagaatctctaccatctgcacctggaacggaacctgctccggagcctagctgcaggcttgttcagacacacaccaagtctggcttcactcagtttgggcaacaacctcctgggccggctggaagaagggctgttccggggcctcagtcacctttgggacctcaacctgggttggaacagcctagtggtcctgcctgacacggtgttccagggcctgggcaacctccatgagctggtgcttgctggcaacaaactgacttacctgcagcctgcgctcttgtgtggcttgggcgagctgcgggagctggacctgagcaggaacgctctccgcagcgtcaaagctaatgtctttatacatctgccccggctgcagaagctctacctggaccgcaacctcatcacagctgtggccccccgtgccttcctgggcatgaaggcactgcgttggctggacctgtcacacaaccgtgtggctggcctcctggaggacaccttccctggcctgctgggtctgcatgtcctgcgcctggcacacaacgccatcactagcttgcggccgcgtactttcaaagatctacacttcctggaggaactgcagctcggccacaatcgtatcaggcagttaggtgagaagacgtttgagggcctggggcagctggaggtactgacgctcaatgacaatcagatccatgaggtcaaggtgggcgccttctttggcctcttcaacgtggctgttatgaatctctccggcaactgtctgaggagcctccccgagcatgtgttccaagggctgggcaggctgcacagcttgcacctggagcacagctgcctgggccgcatccgcctgcacactttcgccggcctctcagggctgcgcaggctcttcctccgggacaacagcatctccagcatcgaagaacagagcctggcagggctctcagagctcctggaactcgatcttaccgccaaccagctcacacatctgccccgccagcttttccagggccttggccagctggaatatctgcttctgtccaacaaccaactgacaatgctctctgaggatgtcctgggccctctgcagcgggccttctggctggacctctcacacaaccgcctcgagaccccggctgaaggccttttctcatctctggggcggcttcgctacctcaacctcaggaataactccttgcagacttttgtgccacagcctggcctggagcgcctgtggctcgatgccaacccctgggactgcagttgtcccctcaaggcgcttcgtgactttgccctacagaaccctggtgttgtcccccgctttgttcagactgtctgtgagggagatgactgccagccggtgtacacttacaacaacatcacttgtgctggccccgccaacgtctcaggcctcgaccttcgagacatcagtgaaacactctttgtgcactgctgaccctgctacttactggcctggtctggctgaacactgccttatggccaggatagtgtttcactgttaccagaataagctggctctggaatacttacccatctcaaggggataggtcatggctgctcacttcctggatgcagggcagtaccggaagcgatgtggcctaaatagggtgggcacaggccaagtgcccgagggcccaaaggaggggaggtgctcagcagcacaccctgctggcaacaattaaagcaaatccgaagcatagcttgtgacctagagtgtgaacttgggcaaggtctccctgtcctctgtccctgccccacgtctcttgtcttagttctgcagtcaaggcccagtctgagccttgctggtgtggagaacacgtgtcccacttcttttgcaccggatctggcccatttcctcttgggcttcttaggaccctctcccccgctccctccaggccctgcatccctgctcagggcactacactggggccaggttgggttcctgcaggtgtccagggcccaagtcatcagcacccaggtgtgaggtcagcacccaggtgtgaggtcagcacccaggtgtgaggtcaccacctgcccactacttcattggggatgggggcagctgggagttgaagactgccatctgactacaggaatcacccccttgcacattcccctggaccccatatcccttgaagacttcagctttgcccaggaatcatctctcccccttgacctctctaggaaggagggaagtagggcctctgtgcctcagctcacacttgaacactcagccttctgcttccaacggtctcagccatttgctagcagatccacgggtttccaaaaacacagtgtgccaaccccattcccccaaacaagacagacaccttgaccacatcttcaggccctttataatctttactaatactgcttgttccagacatgaaatgtaggggaatcaagagtcacctcgctgaggacaaagggcttggatgctgggtccttcctaagacggggcggtatgtttaatagcagagttctgtaaagttaccagatgtgccggtaaaccacagtgtcacaaaaggcacacaacacagcatgtgtgggtcagtctcgatgagaaagcactggccagctcctgtgtggtgtggctatgagagcagcctgttgacctggggcagaagtgactagggttggacgaaagcctataggctaaaggttaaggctgctattatctcaaggaatcaggatgcaggctatcccctcagctatagactagtttggtgaagctagtgtcagccaaggacatgggggcctgcagatctccgcatggatgtaatcgcatagtccagccattgcccaggccaacaactacaggtcccaaaacagtcctgagggcctctgctcccaaaggccttacaggcatgcagcaccagaaggctgccaggcggtcaggagcacagggcagacatcctgtgcacaactctctgggctatggacgtgagtgcggaatatgcagtgcttttgggaaattcctggatgaagtcacgcccttcctccaagctcctggtaagttgggaatccagggggacagagcctgcaatgacaaaggccaggaaaaggctgacaaaatggctcactgggtaaaggtgctgcggccaagtgtgataagccaggttccatatccaggacctacatggtaagagatagcagacctcacaatctcatctccccatggacactgtgcatgcgcacacccacaaccccttccttaatgcacaaacaagaggaggcctagcaagagcctgcagcaggtaaggagtgtcagctgaccactcatttgtcagaaactcaagcttggctctccatgacctcccatagggaacaatgtggtacaagtggtaggagcctggtattcttgacacacacacactcccagaaatgtagctgggtgtttggcagcccagagaaacctcagattgggctcttatatagaagggaggcccaccacgccagtcagactcatggagaagccccgtaggtggaagttggggccccagatggcctgctcctgacactcacctaaaaagggaactccagccagccgggccagctcctccccactgccgctggagaagacattggtgcactcctaggagacaagggctgtgagggtccagctcgcagacccactcaccatgatgagacccgtagctagggtaagacccacaagtggtccaggaagaacgcccagtaagaatgtcttctctatccacaaagttacttacctgacactgggacctgtggacaagagacctactttctcaaagtccctgactacctgacctgtcttgtcctccctcagaccttgaaagatgcccacccatcttctaagactcacagcgcagtgtgggcaggtgaagccgctcatgttctctatgacccctatcacctgcagcccagtcttcttacagaaggtcagctcccgcctcacatccccaatagacaccgcctgtggatcagaggaggggccagtcagccacagatcaggcaagaatcaagcagagaacatggcccactacagtccattccaagctcaaccagggtggacagacagatacacagacagacacccatgcccaggtagggttggaagagttgccagtagtacctgtggtgtggtgactacaagagccccaaggggcctgtaggggcgcagggcttccatagtggccatgtgctcatcagaggtccctggaggtgtgtccacaaccagataatccagctgcccccaggccacgtcagacacaaactgctttatcagtgctgcaaagaccccaaagcccagcagtaatccctgagaaagggttaggaaaggaaaggcccatcttgtccagcccaggatctccatcagttgcttctgggcagctcccaggtaaccctggggacatgtgccacacagggcagccagggcccgctgatcttcgagataacatggcagagcttctggggtcccacaagctcgccttgctttccagcagccttaccacctgctagcactcaactgtctgcacactccacgtggcggggtgtagccaactcccattgaggccccaggtgaggatgcaacctagactctaagggcatctgtgccctcaagcccagagaaaatgccctggctcgagcaccttgacagcacatccaggacagctagccattaaatctaagtgtgttattcttcccaggcagtctctcatggcagctaggatggttcaatgttacccgcttaaagctcagcactgggatccactgcacactgtgcggccttagacccttggcttgagtgagggcccgtagggagggttctcagaagagagatcccttcctatctaaggagtgcctgatggcttcacaacaaatgcagagcacagcttctcccttgatcttggtctcatgtcatactctccatccagaggctgggagaaacccagaggtatatataccctgaagggtggacatctatgcacagtagaagcgttccaatgggaaagagactccaatacaggccaggaccagcttctggctttatccaatggcagtaggcacgagatgggggaaagcggcctcagtaaagaggcactgaggagttggaggaagggaggaagcactgcttctcactaagttcttaccatgtttcttgggacctctccacaccacggcctcatcagggttttccagcaggaaccccacagacataagggagatgctctgctcctgatccacaaagacaggcacccagccattgtcacactggtgcacggccttgccttgtgcacggagcatgtgtggtatgctgggaccgcacaggtccacatctaggattcccacctgcaaggaggaggatgctgaggggtggaaagaagtctgccaagcctgttgggagctagggacaacaatgaaacaggtgtcaatcctggtccaggcctcaccttcttgccctggtggcgcagagccagggccaactccgtggagatggtgcttttcccaacgccaccctttccagaaagaacaaggatgatgtgtcgcaccccggccaggttcccgggttctggtgagaaacaggagttggggtgtctgagagagcgacaaagacaaaggcacgcgggtaggtcttctagaagccccagacctgtctcagcctcacttctgtctgaagtggagcaactgaaggcacgtgcacacgtgaacgctcacttcaaactgccagctaattttaacagacacagaggaaactaacagagtagatgatcacagctaagcgacacccgcgcacaaacgcagactccacactagagacttccagttctagggaagcagggcccccaattctcggaaaggcgtgaggctgaggtcttagagcagatataaccgccgatgtgtgcatcgcgacactcggctagctcagtaaacaaggggacatgggatgttttggcgtgggcctgcacgcggttcgccttcagactttcccaacccctcgcgtttgaccgacctgcacgctcaccggcagcagcctccattccgctactagttgcttttcgcggctctcttccgcttcctctccaaactttcgcagcctttgaaccaatggtgacaagagcccgccccttactcattttgagaggttagtcattcaccgtccagccaatcagatcacccaaggaggtcccgatcctggcaactgatgatgacgccacgggcacggacacacttccttatatttgtccaatggtcatgcgaaagtttttttgaccgctctagcgaggaccaataggaactttggttcaagattgacagtttgtgcaagcctcttgacagcagtcctgtctcgcgagacccgcccccgcgcgaagctgccatagagcccgccttcggctgccgggccaatgcagggcgggggcggggattgtttgcgtcgcggccggaacggaaagtgggtcagcgccgggggagctttttggccgcaggtgagccgcgccggcccagcccggtcaggcccggcgggcggcgggttgaccttgcaggcggtcaagccggccacccgttgttccctggcggtggcgctcgggagtctgggcgggggcctcggagtcaggcgtcagggacggcatcgctgtggcgagatccgcgagcctttggcgagggaagcaaccttcagccccgcggaggccgagcgtggctacgtccagcgacatctctggttcattcattgggttcctactgtgtgttcttatacggcgctcagccaacccaactgctgtggagtgctgtgcgcggccccgcccggcttctttgtgaatggccggggcgaggtagggtagtacagtgggtctacagggggacagagtcgactattagaccaagacagtccacttgggagaggagatccggacctctcaaagcctttcattttgtcccaagaacgatgtcaagccagtgagtttaaggttgtatcaaagactgagtttgtagtgtgcagagccggatgggtgagagggagttgtgtggtgcaggaagcggtgggtctccaatggcaaggaggggtgtcaggagtggatgacagcggtgtttctggcatgaggaactggatgctgtggatgccatttgccaaagtggaccgcggaggaggagcaagttaagtgtcaaatgcctgaggggcaacagctcctgaacagaatgcagagatgggctgggacacctccaaagtcatgggtgtctgggttgtgttttacaccatcgccctggacttgattgaggtgctcagatactcgagccaggtacgagcttgtgggagtttctggagctcagagctcagtgttgagggcttggagtccccagcctttggtggatccatggcttaggctgccaggtagaagtggcagggggcagagttgtggggtgtagatttgggccttgtttggacattgatacattacatgtctttaaagttacagttatttttttccaggttctctccactatggcccggcgtacacggagtagcagggcatggcatttcgtcctgagcgcagcccgccgagatacagatgcccgggctgtggctctggcaggcagctctaactggggctatgactctgatgggcaggtaggtcgaagtggcaaggtggggataaccagtgtctatgttgggtgaaaaagacactgagccaggcagctgagctgtgccctggtatgtggtgctttttggtctggtaaagcctgaggtgtgtcaggcctcaagacagagacagggatcgaaagttctggatagtgctggttactgcaatgcttgttcaccaggcctgccaattttattattgtgtgccacagtgaatgggtggatgtcaggagccttgtatgtgtgttctatcttccacctttatttggtatctggggagcaagcttaggttgtccgtgacgtgcagtagcacacatacatatgctgagccatttggatcaccctggatgtttcttttgtcacacaaatgctgtatttcatgtgtgttgtatatgataggatctgtgatcttttttgggtttttgagacagggtttctctgtatatccttgctgggatcaaaggcatgtgtcactatccctgctggttttattttcagaaatggtctcacagtgtaatacaggcaggccttggacttgaggcagtttattgtgtgtgggcacacgggtagaggtcaggagtcgctggagtcagttctctaccatgtgacaccttggggtcatcagtgcatgatttttctttataatatttatagttcttgaagttcaaatgtcctaagacttcctttgttggagactctgagcacagggtagatacccagcccagtgtgcctgactcggctcctggggggtaggtggctgctgacttgctggtaccagactggttctctgaagccgggttagggttacagttaggctcccttctagaagcccattgcattggatcaccagattataaggaaaacttgatttacttactaggtcagcagtgccccaggcccttcttgggggcttttgagcttgagtcagcccaaattttcagctacacctccagttcctaatgatgcacctgaaacagcctcagtcatcacagtgacacacgcatgcctgttgtctgtcatgtggcaggtagctgtgggtgttcctgggcctgggttgggttgagcatcctcctcccttcctcctgtcctaggcagattggcttcttactcagtggatctgccttgcctctagaagatcccatctttgccagtggggtacaaggtctgctctgaggtatgagccttccctccaggcaaaggagctggtctgtttggcttcggagtggccttagttaacgttgactaaccaaactggggctggctccttgtgggttatacgcccctatttcagcacatagtacccagaattggatgttggttttcagtcccgactcggctgcctattgctggacatttcctcacctctcatgatgttatacatccaccatgatggttctccatctctagactttttgaggcccttcctgaggagccagtgaacttgaaaaagcagcagagaccagaatggtggacaccctgagtattgtgaagagaaagaatacagagtgaacgtggtccaagctcctcttggtggttgaatgcttccttgtagagaagtgcaggatggctatatggctgtaaatagatccattataggggctcctggaccattgtgtggagcacagcagggcagctcaggaagtagaggccaaaacttcagggactgtcaagtcagctagcctgaaccctagcaccaaaacagggatccaagggcctgcagagcagctgaatagcaagagttgattggtcggtcagtcagtggctggaacttgaccagctcagctgtgtcctcacatccagctaggctctgagcagctgcattacccattagaccttgtggagcatgcttgctcctcttgattccagtgcccttgcaggggatggagacacacatcccatgtcttagcctgagtggacccagatgctagaccttgttgacagcagcagccctgggctttaggagaccatgaactacccagggaagacaggtggtggatgctgtgtggcctatggcagtcaggccttctggggggaaatggggcagagaaagccaagtaaaaagccattcccctagggccacctcccatctcagtgttgtctttcagacaaggaggcttagcactcaggttgattatgttgagcactggagagcgccaggtgtctggctgcttctctggtggatttgagaagggatttgtcataaacagagtgacctaccccttccctcccttccagcacagcgactccgactctgaccctgagtactcctccctgccaccatccatccccagtgctgtgcctgtgacaggagagtccttctgtgactgcgagggccagaatgaggctaccttctgcaacagtctgcacacagcacaccgtggcaaggactgccggtgtggtgaggaagatgagggtgcgtgtcttgccgctgggacgtgtggagggctgggcaggttccctgggaccaggcaggcaccgtttagctgtagccctccctagtttaggccctctgtcttacagattttgattgggtctgggatgacctgaacaagtcctcagccaccttgctgagctgtgataatcgcaaggtcagctttcacatggagtatagctgtggcactgcagccattcggggcaccaaggagctaggggatggccaacacttctgggaaatcaagatgacctctccagtgtatggcacagacatggtaaatggccaagcaagagggtagatgccatgggccctgccgctaggcatctaactgtccaggcccactatttacagatggtgggcattgggacgtcggatgtagacctggacaagtaccaccacacgttctgcagcctgctgggcagggatgaggacagctgggggctctcctacactggtaggtgttacctgggtcatgggtggggctggcagtacagcagacctcccaggatcaccccattgctcctcgcagggctcctccaccacaaaggtgacaagacgagcttctcttcacgctttggccagggctccattattggtgtgcacttggacacctggcatgggacactgacattcttcaagaacaggaagtgcataggtgaggtgcctttgtagagcctttaggggtggggccaggcagtctgacttgaggctcctgacagatgagggagggtgggcaggcctgaagcagattggggttaccaggccagaccagagtattttctgtgttcagactatttgagctgcttactgtggtgccttgtgggaggagcttcctggctcccaacccacatggcacttaggctaagcctgccttccaggagtggctgctactcggcttcaaaacagaaggttctacccgatggtttgctccacggctgccaagagcagcatgaaagtcatccgctcctgcgccagctccacatccctgcagtacctgtgctgctaccgcctgcgccaactgcggccaaattcaggggacaccctcgagggcctgcccttgccacctggcctcaagcaagtgctgcataacaagctgggctgggttctgagcatgaactgcaaccactggaaatcccctgtgccccctcctggcacagctacacctggtgccgagagtctggagaccaggccctgtcagaggaagcgctgccgaagaagctgacttctcccctgggaacgcagataccttcctctttctcgcccttccagggcagcaggagagggaagaactgaggtccaggcttttccctatctccctgaggccaggacagtcttctccggtgaccatggagtgaaggtcattctactgcctgtgctggtagggaagccgtactcctgtttgtcctttgagttgccacatgtcttgggaactgcagctaggcacgtgtgaacctagattccaagcccgggaggctggccgacgaaggggagtgcattcatatcccagggagaagatgggctgtccccacccacggggccgtggggctttcctgacttgcactgcatgttgtcagctcctgctgcagagatggcagtgggtgccctgtgaaggggttttgtcttgtccctctatgttatatcattaaaagagccttcacaaatgcccaagctgcctgtgtctattgtttatctgtctctgtccagcggctttgagagagcctggcttggatctctgagcacctctctctgaggatgtaatagtacaactcggcactcaggcctgctactaagcctcctgcaccaagtggccactaccctccactcttccattcacctcagcttccattaccctctcacccacctcccatggtatttccatttgaccatcaggcaacagagtctatctaccacagtctgaaaaggtatgggctggacccaaacctccttgcctgcctctcagaataattagattcttaggcagacttgtcctgttgtactgatgggcaggaggtgacccaggatggcacaggtcaagagctcaggtccagcaggaggtcagggtcggtggttgtcaagaagatacagattctgcgtgagaggtcaggccccactctgcgaggctgcttgcctttgtgggccttcacagggagatcagctaggaggctcaggcgttcttgctctgtgctgcagtccaggagagcctggagtaggcacaagtgtgaggggtggacggtaagtcctgatcctggaaggagggatttaggggactcacctgttgcaaaaggcggggtgatgggaaggcagtaacaacagcgtcagccacagctgggctgacccggttgaactgtctgatttgtcgccaccacactcctctgagcccagagccatctctggtcacttgctggcctgaggcccagtgccctgctgtgcagaaagaaaaggcctgggagtcccggagctgcctgaaatgacacccagacagacgctttgagaaccccatttgtgcagccctccgaccctggcctgtgtccactcggcccctgcagagatgcatacttcgaggggagctgcgagagggccctggtgaaggcacacacgtactgactcagctcctgccacgaagccatcagcagcacatccaggtttgcatggagctgcagcagcaccaggatctggggagtgtgagagtgggtacggaccacatgacctctggggaatgccagcccagtgatcctgggaactaaggccagttctgacaggccagcctacagccaagtgcagagacaaaggcaaggcacctaacaactccacacagccctcacctcctccacctcagcccagctgatggctcccctggcatgggcttcctttgacttctttagttgccatgtcttctgagaactgagctggtgagacctgaacagaggggacgattttttgggctccagagtctcctacctctgcagagccaaatcaggccaagtggggttagctgtgacagagccaccagaggcaagccactttcctggaatcccacccaagccagccctactgaggttaagtggtaccacaggtatgcgtccagtccaatgacagccagatgggagcgggtgagactcttgggagaaagccaggggatggagcaaggtggatctgtgatctgaaagcaagaatatccccatacttgttcacaggagggctttgacggcaggcctatagccactgttgtaccaggggaatgctacccagcatgtgtttgacaaacgttggcccttggacagcgacacctgcaaagcgtttagcagaactgtgctctaggcaaataccagttgggcattgttacctttaagtctagggaatataagcagccaagtgagggattattagcttttgtagacaagagcccacagccagtgcctacattatacagacaccatcagctagaattctcagttcctcctccatgcctggccagtttgcagtcaggtcactattctcctaaaggctctctaacgctctgatgtctggagcacgcagcaggcttcctcatctcaccctcaacaccttgatgatcctcgacagaagctccatcccatcccagactgtcaaaggagacccatcaaataaagatagggctttcccccattacctgggtcagctgcgcagcaccctgaagaaattcctggggttccagcagcagcaactgttcctgctcattttcagccttcgcctccagaggcacctataggggatatcagctgccctgctaaccaccagtgtgagcccagggcttctccctgtgctggccagtcagtcaccagacactatcaataaccctccagctcccgtgaagttcaggccagttgggtctgttccctagaagtccctgaatacaaaaactagcccaactcccatcctcattgccaacaggcggttatctggcagcagctgagttcaggtttcttgtgttaagaaattcgacttaggcatccttcagtttttttcgcctcctgtgctacctcgctagccagaggaaaagtgaatcatg

SEQ ID NO: 11739 - protein, 56 aa, Rattus norvegicus; identical to SEQ ID NO: 7408
  ref <308>: DATABASE ACCESSION NUMBER: SWISS-Prot / AAF69479
  ref <309>: DATABASE ENTRY DATE: 2001-12-01

SEQ ID NO: 11740 - DNA, 487 bp, Rattus norvegicus; identical to SEQ ID NO: 7410
  ref <308>: DATABASE ACCESSION NUMBER: EMBL / AI639255
  ref <309>: DATABASE ENTRY DATE: 2000-03-04

SEQ ID NO: 11741 - DNA, 608 bp, Rattus norvegicus
  ref <308>: DATABASE ACCESSION NUMBER: EMBL / AI639331
  ref <309>: DATABASE ENTRY DATE: 2000-03-04
ttatttttaaccttttatttggatgttttatacaaattcagtatattttttcctcttatttggtactttgtcttagaatcttataataataaagaaaacatatcatgatttttcactaaagctcatgtaagctgttccccaagtcccctgtatttacttcaatgtatcacataaatatgatctctttctctatgaatagactgacaggaagaatccttgtgcaagctagacaagatcaaatatggaattatccagaatataagtagtacatttaatgaaactcaaaagatactttccttcaaaaacaatggaaaggaactggaaaacctctgaagttacagaaagttcagttttacaaaaatgtttgaaaaacaacaatttttaccgtactttttaaaaaagttaacacacaaaactgaagactgcccaaagatgttcagaaagaacaaacattatcaaaattatattaatttgaagataaatcaactattaaaagcctagttattagctcatatgaaatctgaattattgcttttaaataaatggtcatactaaggaatgtggtcagttgtctgtctgtccttctgcactggttttgccatcttccc

SEQ ID NO: 11742 - DNA, 528 bp, Rattus norvegicus
  ref <308>: DATABASE ACCESSION NUMBER: EMBL / AI639381
  ref <309>: DATABASE ENTRY DATE: 2000-03-04
ttggcaaaggtaactgaagtttctggcttctgtgacgtggtttggttgttactcagctctcactatttaggtggtcttagtcccaaggtggtcactgtgctgaagtggcagagatggccagcccccgtctcgctgcgacatcagaccgtcgctgtggaaggctcagggctgctccatccaacccctcgatcacttacttcctcctacccaagtacccatctcttaccctcacccagtaaggcccattagcatgtttccccttcctctggcgaatttgcataattattcactgcctttttcctagaaccaaatcacggtaatgattttcctcaagtaagcgtcccacaactctcttgattctatcgtacacactaagtttgccctcgaattattgcgtcatgttaaacacatacagacaaagggaaggacacactcttcagtagagaatcagaggggtcggggctgagtgtagacaaggcagtatagagctcagccacccaagcccctaccagagcatgaagatagttg

SEQ ID NO: 11743 - DNA, 31737 bp, Homo sapiens
  ref <308>: DATABASE ACCESSION NUMBER: EMBL / AL138478
  ref <309>: DATABASE ENTRY DATE: 2001-05-01
gaattcaatgtggtcggatgcattttgcctcaggggtataaaattaatttagaaatgacattttaaatagtggaagccttttatataatgatgtgaaaattattctgcttttgaaaatcaaaatcaaacatgaaacagtatgtctctctgtaaagaagtcagatatcttgttgggatattactttggctttctgccaaaaaaaaaaaaatctctattctcctaactctgaagaaatgaagcaaaaaagatatttgaggaaggaggaggggattgtgattgttttattgagactagaatccagatttgcaaagcagcacttcttttttttaactctaacccagacaaaaaaaaaaaaattgggttccttccccaaatagaatctctaaactgtatctaatgaaacttgaataactagtttggattttaaaagacagaagaccctgcccattgctgactgcagtttaattatgtaataaaccaaccaatcctgtttttgtctggtttagacgccttgcaaaatattttccatagaatatactaccctcgcctaatgtaccttctcccttttcttgttaaccatctgatggtaaattcttttaattctgcttatttaaagcacttggcttgcctcaccttacccggtaatagttttatagtcagaagcagcatctggcctgatgataagaatcagaaaatggaattgtattactcccaaggagctagttgtagcctgtgctttttctttcaagaaaatactctgcttagatagaaggcattcacattacgtggtccccactgggctgagaaaaaaacagtctgacaaagtgcagaaaatatggttagctccctcaaagtcgagccacttccagggtcgatgccagtgaaaggaaacttgggtagagtgggtcagcatgaagtgcctgccctggaaaagggtcctttccatctctccctcttttcacggccgtaattgagtgaagactatcaccaacttgacttacaaaagctgctgtttgcttccttcttgtgccccaaagtaaacaaaataggcaggttcctgattcggagtgagtggcatggagcccaggcctttgtttgctgttaagttgtcggggcagcggagcaaatagatgtgaagagattaaccaaacaagaaggcctggcaagggtgaccctttctgtccagccaagggagtgcagtcatccgcacggtgcaggaggcagggacctggtctctagtagggacttgcacgtacaaacctggtcctctttcaacatcgggtggagctgaggatgacggagcttgcttcacagatgatagaatccattttagaggtttagtccaacccccttcttttacagataaggaaacagtggccatccgaaacctgcccagactggttggtaggtattttaaacaaacaaacaaaaaagatatatcatcaaagttgagagagaaggcacactgaattatttgttcatctttgggaactttgtaacttcttccagaacattttgccacttttttttgtttgcatattgccccaagagacttagtttttaaactctttaaagatccgtgagaaaactcattgagtaaagacccatctgtcaacaatgtacatggtaatattatctttgttactgttacagtgagtataaaatttagaagaaacaatagcttaataaattattaggtatagccttaagcaactgcaccacaatttttgatatttgtatgccttctttaagaaacatagttgtcaaatttcctctggggtgggggcagtcttactgcctcccccaggacaaatgggaaagggccttatttattacctctcttcagtattttccacacagggtgggctgaaaggctcatgtcctcaaaccagtagctagccaaaaacaaatacttaagttttacttatctgtatatttcagctgtctcccaaaacagagaggtgacttataatgataaggtgcaagaaacaatggaatcagccatccttaaggtagggttttgaaacagtagctatatgtttcaaaaaggggagagagggacagtcactctgcagggtctaaggaaactagagtgaccgattcaaaacccatcttcgagtttcctagcagctaaggcaaaaagagaaatatggtacacacagctcttatttctggtataagtacacataccagtgaagtgcctgcctctaagaatgagcccctgtcttggggctttcaatgagtaaggtaagaaatgtctttaacagaatttaatgtagttacgaaggttccacagatacccttttcttatgaggcccttggtgaaaggcaaggattcagagctgaactgaggttgtctccaggcaatgctgtatggaaggttgggggagagatgggcagcaggtgtgtggtcacattctatccatctgctctgacacttccctgtgcctgggaaggatgttggacggggaggccttagctggcagccaggagcatgcccagatggtatctctatgtccagaaaaacaaaatgaggaaattccccctccctctactaaccttgtaaaactgcagaggcctggtctgcctttgagtggctttttgaaattgtcaacttaaaagacctgagttttttataacgtatctctttagcaacaatgagctccagaaagtaactgctccttagcggtgtcaaacctgatcctcattaaaccagcagagccctcctggaggcaaacagctctttgggccctccagacatggaggattttaatgatgtgcctggttctgtggtctgagatacagaagtgataagtagtttaaggggttgaggcagaaagggaggcaatacaaagaattaagtatttacaaaattgttggaagggccaaaggagggggacccaggccagcctttcagaaatgatttccagaatcctaaggagccagccaccaggcaggctgccatcgccggatctgtgtggtcaggaacacacctcatggctgtgacccagagcccactgccacccctgcaactgcctcttgacacccaggcactggagaatgggcactgggaggtcacggcaggaaaacccagcctttctgcagcattgcaggccactcacacagccaaagggggcctcacctcacctcagcctgacttcatctaattggcagaactgaatttacccccagaaccccagctgcaaggaagtctggaagatgaagactgtagcttcccaacctccgcagtttgaaggagcaatccacagtgcccccaacacacgatccttgtgaattgtgagattctgataacataacactggccaaagaacatgtcttattctattccagctgccataacaaaataccacagactaggtggcttaaacaacagaaatgtattgtctcacagttctggaggctggaagtccaggatcaaggtccagcagggtatggtttctggtgtacagactttcacgtctggctgtatcatcacctaccctttttttctgtgcttgtgtggagagggaagaggagatctctcttatgtggtcactacttatgctactcttatagggccacgaatcccatcatgaagaacatgacctcctctaactctatcacctcccaaagggccctatcttcaaataccatcaaattggaggttagggattcaatgtatgaattttagggagacataaacattcagtccctagcagaacacatcttcctgttatagcaaatatttcaggatcatcccagaccaaaggatcataatgcttccttttagcaaggggagagaatttcgttctgttctgttgatgctctctggggtgagactcaacctaatgatgagtgaatctgaagccagtgctacccctttctgtataatccactcctaaaagaattggataaaagctatggaccctttccagaaacatgcacaaattcccagtgtctacatgtactttctgcaggtttaagtcttcctgtggactgaccacctaccccagatccctctttgtagcctgtttcctgttctttcttcagtataagcgactctttgctcctccagaaactgcttttgtttgggtggtcatcagcaagccatggtactgttgatcaggtcccaggacactaatgagattcagtggttggagttgagaactttctgtccacatccagagagagaattggtttctacagttgcatacactgaagctctgattaggatctttcctattacctttagttaataaacatgaccaagataacttggccactttggaacatgaagattgtgataaaaatgaatttacttgcaaagcttaatctccaaaattgctttgaatctgggctcaggtccctccagaagtaaaaactgcacagtgaaacgtgtagagtgacatcagctggcttgggtgggacacagtatattctagttgaaaggtaatgaaactttttaaagaattggatgaattaacatctttatgtgaaatggaatcaatacaataaatccactatggctttgttagctattctcttttgttttttggtttttgcaacatgtctagatggagaaaataagctgccagagagtggagaaatgtaaaaattaattgtgttctgtagtccaaactgtatagtttctttggagaataaaataaagcaaaatgaagtgagccgaatttgccactcagcagatgccaggattttaccctgtcgatggagtgtttcactttgataacctgtctgatgaaccacccaaggaaggggctgactcgatagcacctctgtttttaaccctttccattactgggtgctgaggttgtccttacactgacaaataactaaatgaaatgtgcagtctacaaccaaaatgtaactaaaataggaaatgatggtctttaaatacgtggcttgtttgtgttaattaatgctgcaaatgacacttagggataaatatagtagaggctgatttactgagcagcaaagcaaaactctagagaatcagggcttttatttaaatagagtatttgagtgacaacagtatgtgtcttagtccattctcgcattgctgtaaagaaatacctgagactgggtaatttataaagaaaagaggtttaattggcttacggttctgcaggctgtacaggaagcatggaggcacgtgctcagcttctggggaggccacagaaaacttacaatcatggaggaaggtaaagggagagctggcatttcataggagggtgagaggggcgggggcaggcgccacacacatttaaacaaccagatcttgtgagaactccattgcaagagcagcaccaaagggatggtgctgaaccattcatggaagatccacctccatgatccaggtacctcttgccaggccccacctccaacactggggattacaactgaacatgagatttggtggggacaccgatccaaaccgtatcagtatgctaggtgctgtgtcaagccacagttctgggactgtgaaaagtaggcacatattttgcaaaatacttgtgtagcatggaattggagtttctcagccaagtaagtacatgaaatgttccaataaataatgtaaaacatgaagaatttcccaccgaaaagtttctccttatctgttaacaatggtggaatgaagttcatcagtgcatccgcattggtatatcatgcagtgactttatattgagatgcaaatgcactaggcccaattaaataccgttgttgtgatgtatttagacttgttcctttgtgttgttttactgaaccaaaaggaaatagtcatatttcttagtagtgacatgcctagaaaaggagtaaagcaattattcttttctttaaactctagttttggccatctctgaatagtgggtaagttttgcttttctgaataaagaagtgtttacaaatatagagaacatcattcactcccaggttctattcaagaaaagcatattggtaaaaactgtatttctcagggccatttattcaaagcccatgccttcaagcaggaatcgtcactccgctgtgtaaatgttgtggtgtgacattgtctgctatttatctgaaactgtttatgtcacactttggaattttctgttcctcctttcagccgggaaggaattagctggtgctccaatatctctcaaatttttctagtgttggctaaggatttgaaatatcattggaaaaatattggccattcgtcagggttattgaatacctattggggaaaggtaaaggagcagaagctcctaatacgtaaaggaatgggagaggcacagattagctgcctgggctttgtgttggaagcaagaactggaattaacgtggccgccagataaggtggtaactacagctggttctgtgagttcctcacccctgtgattttatcatcacatttgtttatatcattcatatatatggaatatccagtgagtccgaagtgttttagagtaacaaaaagtttattcttccaaatatccgtggaaggtaggtgagtacctcattttattttagtgtgtttgtcgttgcgtggttaggaaatgaggcctttgagaggacttgtctaatgttgttaaaaaagaaaaactgggagatcttctgtgtttctctggaaggcatcactgggatgtagcttctttgatgtttaagagacaggtggaggggtcgagcagattgtggctcaagaccctggttgaacctggctcctgtctcagcctccatccagcccgctaattcaagtagatctttttcacactgttcatcagtaagatgatttcagagggtctcttttagctcaaaaattctattattctgtgcttagaactgagagagtctgtctatatgaaaatccaggcaggttgcatttccccacagacagttcagtctatataatggtttgggctgtaggagctcgagatattgctaggtggggccaattataaggtataatagtataataagtcagcatttttaaagtgaaagagtctctgtagcaatcttacaaaatactaaagtggaaaaatgatcagaaattgatcttttcaacttggtgattccatggatagacagtagatgcacatcatcactggcatattaatttgagtcgttgcttttgccttttccccagtaaaaagccctggctagtctgtgtctatttaaagaagtaaaatgctactcagtgaaaaatgataattagtaaaccctaaacagattgaagttccccagggaataagcgcggatgcctgacctcagaagttgcaaagggaccctggctgcccatcattgtcacgccaatgggtagggcccgtacccgcctttttttgtacttcccagcatgtaggccagcctgccacaagaggtcaatttggatactgtggtcacattttaaaaagagaactataattatgacctctcattatgtacagtgatgcctgctgagttaaagataatggcactccctgcctgaaagtatcagttaattgcctgcaggggtcagaagggtgctcatgtctgtcccctcccgcatagactcccccaaccccaaccaggcatgcactgaaggcagacacacttgggcctgctgtgcttctcacgctgtttaagcaccaggtttaaccactgtttaacactgattatagtggaaggtcaagtttaactcatctgcaagagggaaataaaacttcaatgagcttagacctagcctgtcttccctgatggcattcttggagcacagtgtcacctggagctccatgttatgggccctgtctttgttgacaaagggtacattccacatctggtacagtacgtttagtatattttgctaccattttttccccattaaaactttttactgtagagtatttcaaatatatcacaaaaaacagaatcatgaacccttgtatacttttcacccagcagtcatcaatcctggccaagtttatttcatctgcccctgtcccactttccaccacctccttcacccccaagtaatgaggattttggagcaaatcctcagttatcatataatttcttctgtatgtatttcattacgtatttcaataatttacagattcttaaacatacaactatagtaatatcaatagcacaccttatagtgttaacagttccttagtatttatcccatcggtgtttgtatttccccaaaagcttataattttttagccagttgttttttttttaatctagactcaaataaagttccatacgttgtaactgatggatgtgtcccttaggtctcctttaagctggaggagttgtgttgttttgttttgttttgctttattttgttttgtttgagatagagttttgctctttttgcccaggctggagtgcagtggtgcgtctcggctcactgcaacctgcacctcccgggttcaagcgatcctgctgcctcagcctcccaagtagtggggattacaggtgcctgctaccatgagttctccttccatatttatctaccactgtctttttctcttgccgctactgctactactattgttgttcttattgttaaagaagagattgaattgttggcttaaaaacagatactcatttttatttcccctctgctcccctctaaatctcttcccctaaacattttatggccacactgtcctttggcatagtcaaagtctgaaggctcccaggcacggcttaggcttaaagcaagcttagtttaaaaaaagaagaaaaaaaagtcgaaactctttctagaagaatgttgaaaggatgagagaaaaccgcaggcatgatggcagttacggtggttgatttttccttctctgttttccagttttctttgtttcgttttgcttgtataacactagctgtaatttttttcctattgaaagatgaaatatggttttcatggtacggaacgaacccagttgccgtcatgaagtaacctgatccaccagcttgccaggcgggcctgcagagcgcctctccagatgtttttgtccttgctgccgccccactgggaacggaaacctccgctgtccacgccatcatcttccgtcgatcttacccttccaatctgcctgggtctgttcatcatattttctggcgattatcaagccctcttggtttttccaaaaacaagtatgccccagatacaaactgaagagctctatttggcttagcatttacagttttgtctggaatgaatacgcagcatccacaagaggagaccacgtttggcccgagctcacctcctttaaaagcatgtgtccctgaccaggctctggccctcacgcttgggcctcctttattcctcatgacacttacttagtgtttgtgcttatgtacggggcgttttacccactatgttagtccattcaggctgctataataaaatacctcaaaatgggtggcttataagcaacagaaatttatttctcacagttctggaggctgggaagtccaaaatcaaggtgccagcagattccgcgtctgatgccagcttgctctctggttctagagggcatcttcttgctgtgtcctcccatagtggaggggacgggcagctctctagggcctcttttatgagggctctcatcccattcattgaaacgggagaagttcccttaacccgctcccagggcgcgtgacagggatgcagcttgcttcttcagtgccccattgctcaaacccctaaggggagcatgcagacgggaaggtcgtggggagcgtttttggcccctgacctcacagcagcatctagggttgagtgtttacagctcccgaagccccggtgggcgtgtgttacagggcgctctttcagttttgccatctgcaggcggcttgtgttaatcagctcagttagactctctgccttatcacagaggtggatggggagccagaaggtggtcttcccctggcatggagcagactctcctccaaccacctccagccaaattccgcgtcgtcccgccgtcgatggcctgctggtgtctgttggtgtcggtcgatgtgttgttctgctcctcttaacgtccagccgcttacgtcagtgcctactagggtcttgggtttttgtgggcacacgatgggagtgtggcaggccagaaggcaactttttgggcatgaaagcagaaatgcctgtcctcatttaggtccttgggcacaggcccaagggtggagccctcgccagggaccccgcccttctgtacccggcacttcccgtgtcatcatgagggcccctccctcatgacctcatcacctcccaaaggcctcacctcctcatgctttcaccttggtgattcggtttcaacataggaattttgggggacacacacattctgatcacagcacccacatagaccatgtggctagaaagtaaggaacttgcctttttttttttttaaatcaaacacattcaaaaaagaagcatctttcaaagtagactcctgacatgcagaatacttgtccagggatgtagccattcttaataaccattctagaaaattctgtggagattttctttagaacccatttcccattcgctcaccagaaaatcagctcttgcactataattcttttatttccatgatacctttatgtatagtcttaatcctgaatctacatttccatacttaattgtgtctaaaatgaaatactcattaacagcataacgatatcttttgttctcaatgatggatggatggatggatggatgcatgaatgcatggatggatggatggatggatggatggatggatggagcctatgtctctttgtatcaaattgaatatgcactattcagggaaagcaaaagcaatggcagttatattatcatagccttctcattgtaccaatgtaggacttcccaggaaccaggctctgctttaggtgtgaggcagacagtaggtgaagggcccgtgtaagataaaggaaaatgcaaatgcttttttggcgctttgttttatttttcaactgataatatgtgagggttatttctgaatcaacacatctcagaaaactataaaaaagttttttaaaaaaaataccaagcatttgattggcttttctatttttttcctagtctatttttcggaggaagaatttgactagagagagtaaaaggctaagtgttgaaactgaggcctggacagagctcggtgcccatgagacctgctgtgagaattgagaatcagcagcccccgaattcactttagaggaatagctgaggagggcagcccagccatgcaccatcatttcccgtgaagagtgtaccacagccaccccaagatgggagtggctctcagtgtggacagaccgaagccagaataagtatcccaagtctccactgggaaatgtgctttcatgtcctttggttcctctttgtgcctgaagctcgggtttctaagggagaaagagagagatcgctcctgtgggtggttgtagtagtagttgtgtgtgtgtgtgtgtgtgtgtgtgtgtgtgtgtgtgtgtgtgtgtgtgtaagggagtatgcctggttataccggtatttctttctgaccttgggataagatggcccaaatatggcttaaataaaccaagctttagtagtacattatgcttgtggccttgtgacttttagtctgggagcagggtaaccagagcaccaatgctggctttcttagcactaaaggcgtgcagaagtccctgctctgttggctcgttaccagcttcccttctgtggggtgctctgggtggatgaggaccgtcagactggctggaggaaaaccatagaagattatagtctcagcttaaagtaaggagccctgggagcggaagaaatgtgtgacatttgcccactcttccttgccctccaccttgtccagccccagcccagcagcatatctgcctgccccatgcacatgctgtgatctgagtattcataccacacgcccccgcttccttaaacactctgcccgctcagcgcatgactccagtggggcagcctggtcaggactggttcttctgccctccatgccctccttcccagaggagggacatgctccaggcacacctagcctggcagacagcctccctcgggtgccacagacacagggcactatgaggcttgctggtctatgtgggagggagaacagatctgggccttggctggatatccagagcctctctctgaagaacgccctagactttgatttggaagtccactgtagcaaagggagggaattctgcgatgtttgcttgaactgctcttaaatcctgtggtgcaggcataaagagtcaaggtgagaaaccgcacatccctctgaagtcccctcccctcaacatctctacctattgcattctcgggtttcagccccctggagtacctattgctggggatctgtaactgattacttgatgggctgtaaatagttgaattattttatttttaatatgttctcctcactccccctccccccaccccccccacattccctggttgcagatgggttcttagagcaccactggacctgtcttaaagtttaaaaaagggaaatggtgggtcactcctggctgtggaagataaccattgccccagagctgtagcatctcacagctgcagaatttacgtgatcttagagatttaggctccaaagttctgtggggtttttttgtattactagaaaggaatacctgagcctgcgtaatttataaagaaaagaggtttatctggctcatggttctgtaggctgtacaacttcatggcgccagcaccagcttctgatggagatctgagactactccactcatgcgaaatgcggaggggaggaatcacagagtgagagggaaagcacgagagagatgggggaagggagggaggtgccaggctctttttaacaaccagctctcacgggaacacatagagcaagaactcactcatgaccacaaggacagctctgagccattcacgagggatcctccccgtgaaccaaacacttccagtgaggccccacctccaatgctggggatcaaacttcagcatgtgctttagagaggtcgagcacattaaactgtagcacattacaaatccccttccagatgtttgagaagcagctttctagtaaggaaatcaaaaggcaaaaccttttgtaacaaagagattgcctcagcagaacagtggtttatggcatagtgggaccgggtgtgtgattcaatatggtagaagtctacccagaaagaacacagtgaggttttgttctcagactacgtcctgtgtctctataatgagaggcaggtgtcaggtgtgggaacatcactggctccatagttcctttttaaattattttgagttagtataagacatacatccccaggcaaagtgagcctatgttcagagtcaccctccagttcttcagtgctcgagcattagggaggaagacagtggagaggtgggcacgcagttagtgtgtgccttgaagcactgatggcagggttctgcgtggtatttactctcactaacacacctgccagtgtcactctgagatggaatctttccttctgtaaaagattatttgcacattgacccagttgaagacagagttaatgaagatgccgtgcatgtggaaatactcaattctcagcactgacaagcactgccatgcctgctggggccaagccactatgagcacccccacagctgtgggaaagttggtgcaggggttaccagcaaccacgaacccttttactagaggaggaagtggcttctggcgtgggaactgggcaggagctatcttccaataagtggagagaagtgatggttggggaaagccaatcactggggaagatgaccttatagcatagagagggggaaaaacagactcaagaaagatgcactggtggtccctggctggccgtgcccaggcccctatactctgagcatctccctgggcctttggctgtggtctcaaggggcttcctggtcccacctctggcttctggccgtggcacatcctttctcttggacaccagtgtggccaggctctgaggtgctctggggtctcttgggagtctccattcctgttcctgccctgtggaagccttcttgcacctgaggctggctccagtcccctcctgggcggtgagcttcagctgtaacactggatgaagaaaccaggagcaagcaggacattttcaaagcaaagaatgccagactctagagggcttcggcattaatcgccctctcctccctccctgcagggtcagaatctcttccacggcaaccccaaatgtcccctgtgcacatggctatgagctactgccatccccagagaggggtgacccaggagacagaaaccagagaatgcagtaagcagagattcacaactggatgagatgcaaaggggaagagacttgagaggaatgtgtagtttctcattcatctatagggagctttaaaaaatttaaaaaatatataaactgacctcagacaagtccagcacagttaacaagccaaacagaaccaaatcaaaaccccctgcctcttcaataatggctctgtcttattacccatgggacaggatcataacttggtctgggtcatttgtcacctttgtcctgggcttcaaatctagaagtttagattttttggtattctcagtttctgtccacatggttctttgagttttttcctaggcagctgctagaaagattttgatcaactggtcaaagatattaaagaagtcaatgttgatcagtaggaaaatttagagtgccagataaaagaggtgtctgggatggcagtgtcttgtcaaagggctggaggtgatgcgttcacttgctttggaatcacagattcgggaatgtgacggcaatgtgacgcagacctcgctgctgaggcgaaaaggacgttagaattaagggactcagaagacatcaaagttaaagcggttcttgttgcccggagaaaacagaaatacgaaagcatctgcctggggagtatcaaggtactcctttcatttctccagcagaggagcagcagggacagtgatcgactctgaggaagtgagaggcccggagagcttccagcccggccatcctaacaccaccttagaattggggcgcctgagacagccctcagcaccaggctcccagcccaggatgctctttgagctctgtacttaccttccagtagcttttcctagaatccccttcctgattaagtgaaatgaggggtaatagatgggcaatttacacgagttagaaagatgccccctgttggggagctgacttggacagatgtattccgaatttgcagggttcactgtgatactgttcctcagagcccgtacattcttcatttagagtttaccagtcactgtatttaagctggaaagactcaggaaatgtgtgaatgggagcctcatacccagagtacccccaatgaaatgtagagcttacttggagatgtgtgtgtttgtttgtttgtttgttttcatctgttcttatccctttggccctaaaaattatccaagcacagtcatccgttgggtatccatgggggattggttccaggaccccctaagataccaaaacctgaggatgttcaaatctcttgtataaaatagtgcagtttttgttgttgtttttgttgttgttgttgttgttgttgtctgagatggagtctcgctgtgtcgcccaggcttgagcgcagtggcacaatcttggcttactacagcctctgcctcctggattccagtgattctcctgcctcagcctcccaagtagctgggactacaggcacccaccaccacacctggctaattttttgaatttttagtagagatgggatttcaccatgttggccaggctggtcttgaactcctaacctcaagtgatccacctgccttggcctcccagagtgttgggattacaggcatgagccaccacaaatagtgtagtatttgtatagatcattcatcctttcccctttccccccgagtcccccactcacctaccaacttaattagatcatcttttgttccaacaaacagctgttagtttcagtttgcttaatcattgctttgagcttgcctcatgtcttcagagcagcaagagtttggggtgctctttgattcattttttggagaagaaaggcccctcttggtgttctccgtctccaacttccatcctaaagatgatgcgtaaaatcacaacttggtgtccaacttagtgggagatttttgttccctaaaatcctgctcatcagaagcttgtgcaccgggctcactggcgtcactttgtctcctgtctcactgtgacaagaacccctaaggtgtttgcagttcatgtccacagtgaatccagtctcctgtttcccacttcatccctcctgctcactcgggcaacttctttctcaataaccttcagccaaaagggaagtggaagaaatattcatggcaaatgacgtcagtagagctgacggcaccccgtgttctgctgccttcaagatcagaggcggctgttatagatatcttgattgattgcaacagaagccaaagggtatggctcttacttacttcagtgatttcaaagcaacaaatgtagatatcctatctgtcttaaccgatgcctagggattttgcaaaaaggaggaaaagaaagacgtcaacaacaaagtgaattgtatatctgtttacttttgatgtgttctattggagatagtttggtttgaagagctgcttttcttgatcataccacatgtatctgtgagcttagtgtgaggtttctcagccttagcactattcaccttttggactggatcgttctttgtggtgagggctgtcctttacgctgtagaatgttgagcagcctccctggcctcagcccattagatgccagtagcaccctccagctctcacccagtcatgacaatcaaaaacattttcagacattgccatacatccttgggggaaagaagtgcaaaattgcctgcagttggaaatactggcttagtatacaaggtgtgcgttaatgcagatctactcagcatttccccacaaaatccacagcttacttggagttttgtttatttgtttgcttgcttgttttcatctgttcttatccctttggccctaaaagttatctaagcacagtcatccctcggtatccatgggggattggttccaggaccccctaagataccaaaatctgaggatgttcaagtccctgatataaaacagtgtagtatttgtatgtgatctatgcacatcttcctctgtattctgtattatctctaggttacttataatacgtcatacaatgtaaatactatgtaaatagttgttagatggcattgtttgggggaataatgacaagaaaaaagcctgaacatgttcagtacagacgcggccatcatctcactacatagtatacatgtcagcaacagtgtaacattttctggaattatttttccctaatatttttgatcctttgctgatgaaatccatggatatggaaaccacaggtacagaacccatgggtatggagggctgactgtattttttcttcattgtagggggttaattaatgccccagttgtgtcattctcatgcagagttagagaaaatggacaaagatatttcaaagcaaagaagtctagtaatgttacagaagatctggcagcacttgtcttccttgatggcttctttggatggcatccttcatttactgcgacagccgttcttcgcctttcaaacacttcagaattccctgacagattcctacaaagattccttcagctagggtggagcctgatgtttggttttctggggttcccgtggaatttcactgcacatctggaggcttatgccctggggagcatccagtacttctcccccaagctgggtgccaggcctcaggcagctggattcacccaggagcagattggacaagccatccatttacttgttcactaactatccagcactctggatgttgcaggcactgttctaggtgctagggaacaccctagtgtatgtatctgaccatgtacccgtgctctttttttttttttgacacagtcttgctctgtcgcccaggctggagtgcagtggcaccatctcggctcactgcaacctctgccttcaggttcaagcaattcttatgccccagcctcccgagtggctgggactacaggtgtgcaccaccacatccggctaatctttgtatttttagtagaggtggggtttcaccatgttggccaggctggtcttgaactcctgacctcaatcaatctgccaccttggcctcccaaagtggtgggattactggcacaagctaccactcccagcctacccgtgttcttatatctgatcatttctgtctgagtgtgtgtcatctattatttggtatttttgtttgtttgtttcttgaatttcttttattcagttaaagagatttcatcatcctataagacccctcaggtgtgagggggagcagagagagctggagaaacaaaacacattagccctgtggaaaatcacatgatttctaagaaagtaatggttatgattcttaggctttctctataggaagtgtttcattgtcattgttttgttaggttggtcagctcagaggtgctgaaggcagtgcttacatttttgcagcaggtatatatcgcagtgtggattgaaccaggggcttcctgctggccttgtattcttagtttgttaaagcaaatggcctctccaagtcacttcccactgaaactaaatcccagaggaagcggaatgaacatggttagaaaccacaccaggaacccacagaatacccacaccaggcttgatggattgctgtgaaacagacctggcagggacccatcaggacaggctatggctttctggaggcaatagtgtattctcccagccttactaaggctgttagctgcccctaaggtctttggagtagatgccccatttggtaggtgttccttggaatccgtagctctggcagccacaagtcacaaagggaggagcaaatcaagggacattacagagcaggaactatgtggaaagggatgaaaaaccaaaccggccccttccaagtctgcagccacccacccatcattttaaaatgagtggactcaggcacagcaaaatgaaaggaaagtcagcagacccaggacttaaacccaagaatcctcatgtctagtgcagtgcttttcccgtcctgtccacggaggagaagcctcttccacaacccatggaaccatctcaacagtttgagaaactgaggctcaatatttttcttcacccaaatagctggaccgttgattctggaaactgtgttacctgtttgtctccctgcagcataatataactgtgtgtgtacattcaaaagaagaggatttgaaaacatctttaagacgtgtgaccgttttccagtctcgtactacagagaagaggcaatgtgataagacaactacattaaagatgaaaattgaaataggctgctgggaaccggtccagaggagaagtaacatttgttactgaagcatgggcgaaggaggaatttttttttaatatgggatttgagattggctcagtctggatgatggttggtcataactctattcagcacccatgacagcatgcttggtgtgatactgaattaaccagcaatcaatgatttaggtactgatgggaatgctgaattaggtactgattgctgaattaggtactgatgggaggaccctgcccatccaaaaatttaaaaggtggcacttgcttgttctctcgtacccccctgtctcacttcattcccctgagatataacgtgaagcactcctgccaagtgggtctccattcctagaaagagttcctggccaaaatgcctttctcttttcttttgctgataaactgggttggaccatctagggaagatcctacaaagccaatccactgctcccctcctggagatcttgtcctgggccctttacccttcacaatcagctatgcctctgaagcagaagcccccgctgtccaccaaacagctacccagttccctgaaatgcttccagccacaaatctccaatgtctttggtccgaagcatcctaccacaatagcgtgcctgcatcagaaagttcctctgctatctaaagaggtaaaccaccagtagtctctcttgaccacagaaaatttggacttttttatagagacccagagtgtgctgatgagaagtagcacatcacctaaggtagagagtgggagtaagccccagagagaggcacaggaggaagagagtggggcagcactgtgtcctcataggaaggggtggggtagagagatcaaagggaggggtgtttggggtgaggggactgggagaagtgtgcagaggcagtgcccttaggtgcccagaatctgtaggttggagtaccgtgctgagcacaagttatttaatcagcccaaacactttctttctaccttctggtagtttgcaatctaaagaaaaggcaatgcctgtacaaacagtgcagtgtgtatttatgcacaaaattctcaccgtagaaaaacttttgatagcatatactaatataaaaggctgacgaaataagtgaaaaaaattttaagttgcaggaaactattttccatataaagctattttttaaaaaaatagatttgcatgcatgagtacgtatatatatgtgtgtgtgtcttagtttttcaatgaatatgtacatatatgcttattttcacatacataatttttggacatatatataagaaagtatgattttgaaagtaagcttatagggaaggcatttctctctcaaattatatccatctagtgtttttttttttacagtgagcacatattactttcatgacttttaataaaaagggaaaaacttaagtattttaataatagataagagcaagcattatagtatctcttatctttggagaggagagacaggaggctgttggctctgaagacagaagcactcacagggtgtcagggtgtgacaaggagaaaggcatatgagacgttctagcagagagtccaggacacttttccatagaaggatgtcagactcattaggctgcttggtgttcaacccaggagccaaagagggtcctcctggcattgatctacagtgctaggtctgtgcttaaccagcttgctagttaaggaaagaggtctgagtgattacttctatttttgtttgcctgtaaatctggatattggaccaagaaagtgttatatctagtacactcacaaatgaaaacataaaagatgacacttgggaaatctttgcaattttagggtaggctaagatttcttagaacacaaaagacattaagctataaaagaacaaaatggtaaactggactaaaaaattaaagacttctgcttattaaaagacactcttaagaaactgaatagtaaaccatggactgagaaaaaaaaaccatgtatctcacagaggacttatattcagaatattttttaaaatcttacaactgaataatactagttgaaccacctaactaaaaaatgggtaaaagactttaacagacttttcatgtaagatacgaatggccatcaagcacatgaaaagatgctcaaggttatttgtcattagggaaataaaaatgaaaaccccagtgaaatattactatatatcccctagatggctaacgtttttaaagattgacaatttcaagtagtggcaaaaaaaatatggagcaactggaactctcctacgtggtacaccctctttggaaaacaatgtagcaattctctataaagctaaatatacatttaccagcaattttccaagagaaatgaaaacacaggttcaaaaaagactggtataaaagttcacagcagcttttttatcatatcccaaactggaaacaatccagtgtcaacctaccggtgaatggattgcggtatttccgttcagtgactaccactcagcgatagccataaggaatgaactattgacaccccatctttgatgaataacagaaggtgggggggtggggggtcataggtggatgctctacagatccaaagcacccccacaagtgtgccttgggaatgtcccacttaggttctcccacatgtgtgattattgatggaatacttttcctttaaggttttctctctctctttctgttttctttctttcactatgtcttctttttatttgtgtccctctacaatttcctttaatgtgttttggaagaatactgaaatattttctttaattttctggccatataaataggaaaagactccagacttcctccctgtgtttcttcttgttctgggcccagcaaacctcctggccaccgagaaaaactttgggtacgagtcacctgcggaggcagggaccatgtagccaggccaaccatggtcacctgtagcactttcgttctcaataatggcagagaccttttgcttggcaggaaaaaatcgtttttcttggctaccccctgagaaaggaaaaggccctttctaaaacgaggggcaagagggaaaggcctgaggccttaacagccccccttaggaactgcttgtcccttgtgacttgtgagatgccagcaagaatgctggggctgtgagtgctgcttgcaggcaacaggccctgtgggggaccaagggacccggggcagtgggagccacaggggcagtgggaagaacttttagttttttagctgaatggttttatatataaatatatatatttttctatatcttatatatttatatatattaaatatataaaattcaactaataatatataaactattatatatgatagtatacatatattaactattatataatagtataaactattaaccattatatatagtagtgtatattaactattatatataatagtatatataaactatataagatttatatagtttatattatatagtttatatagcttatattatatagtttatattacatataacatatgtgttatatattgtataattcatatgttataaagttatatacaactattataaactaatatatagtttataaaatgttaactattatatgtaatagtatatataaactatagtttatatataatatataatttatgtattataaactattacaactattataaactgatattttgtagtttgtatattaacttatataaaatagttaatatataaactgtatactattacatataactatatattttattaatgatcatatataatagtatgcatagtttattatatagtatatataagtacttaatatatactgttatatataatggttaatataatatacttaatatataatattcatatacatatttaatgtgcattgtagttaatatattaatatataatatatattaatatcagtgggaaatggtgactgtttaaggtatttcacccctggagttgccaaatatataaactgtatatatactattatatataatagctaatatagtatgtatattattatatataatagtttatatatgttagttgatgattaatgattaattatattagctaatatatattatatattatagttatatatatgtgtatatatatatatactaatatcagtgggaaatggtgactgttttaggaatttcacccctagggttgccaaataagttaatttacttgtttctcatataatgtacttattaaaataaacttttagtccattatggaatgtaagtaacaggcctcctgcaggcaaaatagaaaaaaaactcttcaaagtcaagttctatttttttttttttttgagaccctgttttcgggaaccagcattatccatatcattaatcgcttgtgggcctctttttaccaatcatgttactcctttggaattaaaccacacatataaagtatgaaaaatgtacttttttaaacattaaaaaagtaattttctagcataatatccaaaataaggtgccatggagccattagtagcaaattgaattttttggtatgtaatttgtacaaaaactgacaagtgcgagccccttgtcccccatcattagtcattgggtttggcggacacagaggcagtaatctgcaagggaaggcattttgatgtcgacttcaattgcacacttcatttatttggacagggcacaggcggcagcttctgtcacgcggcatcaccgcactattagtgaatttcgccccagggcagctgggacgctgcgctggggcagatgttcttttcagcctattcagtgaccattcttgggggttgtttactgttgccatggtgaccttcatttccatagcagcagagctgctgtttctcagaggaaaatgaatttagttataaaaggataatatttttctctgtctctatataacctgccatctgtcaactggtggatcagtaaggattcagaaacctattaagaattatagcaatggagtgatgagtattttttttttacccatattaaaagcaataatagaagtggaagcaaacattgtgccctcaacatgacaactttacttttttctttatattttaagtgcttttttttaatgccttcaccacatccacaccactgttacaaacacataacctcgtgaaacacaatttacattctgctgacaaatggaaatgaccacatgtcttgtttgtatctcactagatgcaggtgtatttaatgctttcttgatgctgtgagctttccccagttcattaaagattcatatggctgaacttcctattgtcactgactctcctgctcctcaccccacggtaaaagctgtgggggtgcatagatcagcaatttatcaggaacatacagtgcaaattataaaattaacaaaatgagaagaaaccatgcttgtgtgatgaaaaatttactaacatgatccttaaatctcattctagaataccttttcttcttctcaaatcccactgggaagaaagtcgcctttgggatagctcatccagttgctggatattttttttttctctgttgcattcataaactgtaacttgcagggggaaaaacacacacacacaccggccccgttgtaaataatgttatttattggttgatttttccagatcctgacattgatgctgccagtgccatgatgcttttgaatactccccctgagatacaagcaggttgtgagtagatatttctatagcctacagcaccatagtttgtgaacttaaccttctcatttatacaccaggtcataggaagaactaatgctaaagtagaacttcccttatagaatcactttaaaagctacataagtgcatgattacatgcatatgcatataaacatgcagccatgcatatgtatgaatgaatgcataggtgtgtttccaagatgagaaagttcttatataatttcaggacttaagacttggggaaagggaaacagatcctttaatgagtcccagtgaagaggccttccttgctcctgcaggtattgttcctgtgagtttgtagtttctcctagaagaggctacatggggtcaacttaaccctaatggacctgagcagtacccatttttagaaatttctttctcttctgggacctcatcgccaggctgccattttggagaagagtctagtgaaataggcctgttggagcctggaatatctttgaaatgaaaccacgctaccagcttggaccatttctatccagcctcccaggctgccccagatagcagggtagggctgtttagctaagcaggactcccatcctcaccttctttttgttggccttcaacaatgtcaagtttgagacaacatttccttactgagacttctcttctcaccacctgaggtttttaccatctctggagatagtctaccatggttttagaaagatctcttcccaagggatgaagagtgacttcaaacaaagatatctgtcccttccttctccccactcgaggtcagtaccagtgcccacatcccatacccagctagaaccctgttgaacacacagacagctggtttaccaaggtctgctcagcttgttgttaggacattgctgtgttacagcctcttactgatgaaacacggtagtgaggaaatagtgacatgaagcagcagacgccactacaacaccaccgcttaggggctggcactcacctatctccttcttatggctaggccttcagctcattttgggttctggctctctgagggccacatggcttgctgagcagtgggaagtccctgcctttggagtggatgctacttcacacaggaaaacatccatcctcagacccaaaacaggtgccttttgttagtattggactacgtggagttccaggccatccgtcatagcccctctgcttgtcccagccttcctgacaactttaggatatttgactccaacctttcttatttgttcctattttaaaagacccaagaaattcagctgagcattctcagggagacttgttcctctgcctggagctgccattacctgttccgaacagtctagagttctgattctctctttccaaactcagacctccagccattgcaatgttgggctgcctacacctctgacatgcaaacaccactgctaagcagatgtgtcactggcctagctctataactagcagttaacctggagtgtggtttttaaatgatgtttcatatttcagagaaatgtatatgtttttaaatttttttttttaaataaacttccattcttagatggcattgcaggaaaagtacagaccagattgtaatcaagttccaggctgaaaagatttctaaaattaagttgcataactcaacccagtggaaacatactgatttcatcagagccatgtaagattcgagcaccttcctttgcacccagccactacacagtgatcattagtttcacaaaaatacttccagctggttgctgaagttcagagggaaaatgggaccatgaccttctgctagaagaggctatatggggccagcttaaacgtaatggaccggagcagtacccatttttagaaatttctgtctcttctgggacctcatcaccaagctgccattttggagaagagtctggtgaagcaggcctgctggagcctggaatatctttgaaatgaaaccaagccaggcaaggggactgattgatccttcacagatcctcagcagcttccataaacgtccatgattactggattcttgagcataggtaggaaaggaaaaaggcttctcctgatgagttgacaagtgagttgttttcagtgttcgcctcccctctccaactctgtaatactcagactgtaaatacttctttttccagggtagccacggtcctatttacattgaaatgctgaatttgagttttacaagctcagtgttcatgttttgaagctgtaggctcatttttagaaggcttttttttagaaggctattaccgctgtgtgagaaatccagccacagccttcatgaaagccccaggccaagaacggggctccaagacagtggaaggaaagaacccggggtgcctacaaaggtcacagaaggagacgctcatggacaggaataacagagaagtaaatgtgaagactgggcagaaagtagggagtctacctttgcattcaccgtcccatctgaccgccagccctggttcaatgccctggaggtcaagggcaagtacagtcaaggagcaggttgtaaggaccccaaggattggagcagttccttagcaagggagtgaagatgcatggagcgtcttctctgtgcacttgggaagccagctggcccatcctccccataaacccaaccagaggaatgtatctgcagcttgtggttagctctttctggcttcactctttctccgtgccccctacccccgccacctttcttttcattttatattgcataacgttatttgccttgggatttgaggcagtcctttgccttcttaagggagaagcattacaggcagaatgattaggcagtcatcccctgccctgccggcatcgcccaaggcctggaaaaagtgagaggctattcctgtgcaaaaatggttaaaggcaacagccagccagccacagtgatggtgtgtgggcagcctatgtaggggtgtttgtgtgcctgtgtcccagtgtggatatatcccaggtcttctctaggttgaggggtcctgccactgcccatgagtggagagtgtggcttcggagagcaacacatttcctgtctgcgcagagcctgcctgtattcccccgtgggctggtgctatggctgggctctgttgatagagcttcctcgtgcggtgctatttatagccccttgttttcacctcttgggctgctagatgcccctgcttgcatgggggccaccaacctagtctctgctgctgttctgctcccagcagatagaggctggcctggatagctggaaggcttttcctttgtcctcacccttcatagccactccaggtcaccagatggcagccacttagatcttttctcttcctcctacccttgctcagcatctgtaaaggtagctcaaggccggcagactggccacagtccagggtctgaagctgactaggttgcacaaaggaaatggctcagactctggtgagagccccaggcagagcaagcctctttatcattggagggtccgtgttgccccaagggagcccagcacaccatgtcttgcttgggctggagtccctaggggtccctccacctctcatttcagtctaatgcttcacttgcagtgcagcggcagtgtgcacctaataaaaacctcaggctacaacattttgtcctcctggcagcatccgctgtgcatgtgacattagcccttttagactttgcccgtttgcagcataggaaacattctgcaaggagagccaccatgtctcacgcgctctataggatgctgccttcagaacagtcagcatgggacatggctggctcattaccccctggactttggattatgctccagtcaaatccatctgcctaccccaccctctccaccctcaaaatggctatgtagattcattccagcttctagtatctccttcagtacctgctttgcagttcccgtttgacaagccccgtgagtcagctttaaccccaatggaggacttgttagtcaggagaagccagatctccattactcatcttcaaaggcttatataatccctggttggaaggttcccagagacaaactagataataaacaaaacaacaaaatggaacgagggaaggggagggattgggggaaggcgttcctccccctgcctggaactgggatgtatgtcagacacaccaggcacagcagagggaagacaactaggaaataggctgtgtctccccgtgccagccccctccccagtgtgcttccaagtaagcaggtggaaaggctgactttaggaaagggaaggattagcggaatcacctgctgctcagcttatggcctctgagagagttagccagggctgccctccaaaggcagcggcaagagctcagaggttaattttagaagttgtgaaaaaccaaggaagctaagcctcaggaggggagctggggaagtgctgagggacaatgtagcgtggaggagtttgtcttggaccttagacttttttctttttaagattctcaggattgcgttatcccatttagaacatagcatctacaatgagcagtgctgctctgtttggctctcttcttatgtgtgaaggttgccctcttgctagttaaaaccagaaagcttaagagtccctctctaactgcagagaacgtggctgatggcaagtgtggggaagtgtggcgccaatgtccctcatcctgagagcctcaggggtgggtattctctcatctaaaagataaatacgtaactggcctaacctgcaaggatgatgctagaggcctgggccttgtctggagagagccacaaatccgaggaagaagttgactttcaacgtccagcccttttgatgtcttacatagctggaggccagtgcacttcagtacatcaggtgcgtcagattggctgtaaaggttttggtctttcggtgtcttaatatgctctgagggaaacagagtaaaaggaagggaaagagtagatttgctggtagagaaaaggctgaagaatggactcatgttcccaccgagcttcctaatgtagagtagtgaactgtgggcctcagaatgcctttctctaacagagccattttagactggctgtgacttgttcttcagaagccacgttcctgacacttggggatggggacagaaaggagaaagacaggggtatagttaagtgtcacagctggcttctggcagctggtgagcaaacacgagcacatccgccatctctccatggagaagactgccaatgatgaggacggagaagtgccagggttggcagaggcagcatttagttgcagctcatttgagaacaagctgcaggattcagaggaagagctgagtctacatgccaggagtcttgtgaggttcaggaaatagctcagggaaagcctattaatgctgcaagagagctttgtccatgagattctctttgaagtgaatgctgttcattaatcaggaagatgttttaataggtaaatgcagttaggaataactacaaaaagcataatgggctgaaagtatttccccatgtccggacccctttcagccctatccttgtagatcattagtaagaggatgctggagaggtgatataggatggcagaaggatgacggtgacgatgacgatgatgagcttacataacgagccagccactgagctaagccgttgacctagcttatcttatttcatccccagagcaatcctgcaaggtatgtttaagcctccttcaccagtgaggaaatggagacccaggaaggtgaaggcactaggccaaggccacagagccagtaacggggcaaggccaaactgaggctgtgtggctcagagctcacactcttaaccactgcagtatacctcatccctgagggttccgtgagacaaggaacatccaaagaacgtggtctccagtaggaacttggtgacgactggcttcctttcctagttttcctctctgctggccatgcgcctgatgcttacatgttctgagtatttgggcagaggactctgtcatgccacactctccccaggggtgcttttcttccttgattggcagatggcttgacaaccatgctagggttaagaagaacttgcgctccctaacttggatttgctctgctcctgttccagggcttccctcatctttgtccaactttacgtgttttgggtgtttttgctgcaagggtggctctgatatgacatgctatgcacaaggggagcagaagcaccataacagcatctgttgctcttccagcaactctgtcaccaggaagatggctacattcttccagcatggtctggtttctgtcccattctgttccttatgggttttcagctcctctgaagtagagaaagcacaggccgcctcaggattcctctgtggatgttgatcatgttgatgatgacgatattgatgaccaacatgtattttccaaatactcgtgccttccgtaactcagctaagtctccagagaccctgggtaaatatcatttttgtcccccatcttacttaaggagtttaagtagcttgctcaggggacacgatcaataattgacagagatgagatgtagacctaggttggtttgcagagcctggctgtcagctg

SEQ ID NO: 11744 - DNA, 431 bp, Rattus norvegicus
  ref <308>: DATABASE ACCESSION NUMBER: EMBL / AI639395
  ref <309>: DATABASE ENTRY DATE: 2000-03-04
ttaaaaaagaatcacagtgagttttaatagaaacagctggtatagcccctcaatatatcagcaggtccaatgtatccagcatcacaggtaataacaggtgtgactaaagggattaaagagaggtgtcggccagtcattctggcacatattgtcatctcaatatgtgggaggttgacatagaaagatctcaaggtcagtttatcacaggttaaatggcaagtctaagtcagcctgggctatatagtgagcgattgcctcaaacaataataaaaaaaaaaaaaaccacatactaataaaaaggaggtagacacttgcctgatccttggtagttatgtgacttggacatttgtcccagtcataatgtgcccagatgggcctcttggagtctttaatataatttatctaacagacaccttttagatgaagttgtt

SEQ ID NO: 11745 - DNA, 454 bp, Rattus norvegicus; identical to SEQ ID NO: 7448
  ref <308>: DATABASE ACCESSION NUMBER: EMBL / AI639425
  ref <309>: DATABASE ENTRY DATE: 2000-03-04

SEQ ID NO: 11746 - DNA, 693 bp, Homo sapiens; identical to SEQ ID NO: 7449
  ref <308>: DATABASE ACCESSION NUMBER: EMBL / BE792880
  ref <309>: DATABASE ENTRY DATE: 2000-09-21

SEQ ID NO: 11747 - DNA, 555 bp, Rattus norvegicus
  ref <308>: DATABASE ACCESSION NUMBER: EMBL / AI639451
  ref <309>: DATABASE ENTRY DATE: 2000-03-04
ttaaactgagattataatcttttatttttcttgagtcattattgagctaagaaaataacaaggataggtttttaatagaaattccaataagcatcttttccctcaaatcttaagtcccaccaagaaaatacagaacaaaatacgtcaacataatctgtggtggtgttaggataatttaaaaacagagaacgtgatctttagtttaatatcaaaatatgctcaacatttggattgttctattaatgttgaaggaataatttgaaaacttgttattaactgtttctttatagaaaaacaagagttggtaaagttttcatatacccaatttaaagaagataactgtaagaaagtgttttttatgctaagcaacattaaatgtatactatttacaaaacaggtttcagttaaaaaaaaaaaacatactgagttagagttttgtaaatacaactgattttgtccatgtcaacaattaatgaatatacaagtaggaattttgaaagactgcttccaagaaagttaggtagacttggtaggcgactgtgagttcaagtcagc

SEQ ID NO: 11748 - DNA, 3007 bp, Rattus norvegicus
  ref <308>: DATABASE ACCESSION NUMBER: EMBL / AY037763
  ref <309>: DATABASE ENTRY DATE: 2001-09-06
ggagctgaactgcagcgccgcccggagcttcaagcaccatgtatgacccagagcgccgctggagcctgtcgtttgcaggctgcggcttcctgggcttctaccacgtcggggctacgctatgtctgagcgagcgcgccccgcacctcctccgcgatgcgcgcactttctttggctgctcggccggtgcactgcacgcggtcaccttcgtgtgcagtctccctctcggccgtataatggagatcctcatggacctcgtgcggaaagccaggagccgcaacatcggcaccctccacccgttcttcaacattaacaagtgcatcagagacgggctccaggagagcctcccagacaatgtccaccaggtcatttctggcaaggttcacatctcactcaccagggtgtcggatggggagaacgtgctggtgtctgagttccattccaaagacgaagtcgtggatgccctggtgtgttcctgcttcattcccctcttctctggcctaatccctccttccttccgaggcgagcggtacgtggacggaggagtgagcgacaacgtccctgtgctggatgccaaaaccaccatcacggtgtcacctttctacggtgagcatgacatctgccccaaagtcaagtccaccaacttcttccacgtgaatatcaccaacctcagcctccgcctctgcactgggaacctccaacttctgaccagagcgctcttcccgtctgatgtgaaggtgatgggagagctgtgctatcaagggtacctggacgccttccggttcctggaggagaatggcatctgtaacgggccacagcgcagcctgagtctgtccttggtggcgccagaagcctgcttggaaaatggcaaacttgtgggagacaaggtgccagtcagcctatgctttacagatgagaacatctgggagacactgtcccccgagctcagcacagctctgagtgaagcgattaaggacagggagggctacctgagcaaagtctgcaacctcctgcccgtcaggatcctgtcctacatcatgctgccctgcagtctgcccgtggagtcggctatcgctgcagtccacaggctggtgacatggctccctgatatccaggatgatatccagtggctacaatgggcgacatcccaggtttgtgcccgaatgacgatgtgcctgctcccctctaccagatcccgagcatccaaggatgaccatcgaatgctcaagcatggccatcacccatctccccacaagcctcaaggcaactctgctggtttgtaaattgctggtctccgtgcttccagtgaacttggacattcttctcatggttggtccaggagaggccaaagctgagggcaccctgccttccacccccagtccagcttgaccttttatctggagcaacagtgtctagatgatgggtgggtgaggggtgctatactgtctgtccctctgggaagggttctgttacttttggaggcagctaggaagtttctctgtgcagctgccccctggtgctgtgtggtgacctcattgcctgtgaccccaggatcacaggatctgggctaaagtggtagtccatagaaaccaaagacaatgatttggtgtttagaaagctactcttggtctgggtgaagtctggtgcttaagggctatcacaaagagcgtgtcaaaccatctctcagcctgtgagtcagtggggagcccaagggcatcagtgtttggaaactggaatccaaaccgggcaatctcggaaggaaactgtttaggaattgtgatgggacgggccgtggctgtctctgaaaagggcctgccagataacttattacttttaaggacacctttggctcttactactttataaagcattttatataaacacaccagggagtgcatggtgaactacacgtatgatcagttaagtggggctagaattaggtagggagagcatcggacctctgcctcctcaacctcaacttgcttgctttctccactggctccaaatctttgtatagtcatcagccatgaccacctctctccctccccatctactaccagcagcgttaatgggaataagtacccacttctctcaggtgtactatacagctgtgggtgtggtgtgtgtttcctgtaattcacactttagaaaggaaacaagcaaacaaaagaaaccaggtgctgcccatagtcctaagtgtagacagtgaaggtgtgtgtctcccatgcctgagtctcctggaggcctagtgagctccaggttcatgcaagcacatcaggaggaatcatataatctcagcacggttgatccagatgggataagaaaggactctcggagagagaatgtggttctagagacaaagtgtctaggctacacagaagataagactgtcccaaggaaagaaaagaaaccaggaactagggtgcagctcagttgtcagaggaattctctaggcttgaagcccagagtccaatctcagcaccttataaactgtggagtgacaggcagtgacatcggcctgtaatcccaacactcaagcagtagaggcaagaggatcataagttcaaggtcttccttggctatttagggagttggaggttagctctggctacatgagaccctgtctcaaaaaaaaaaaaaaaaaaaaagtagaaacttctgccttgctttgagctgcccctttctggacgtttctcatcagtagagaatattcctgccaccctatcagacaaaactcccactggtttggagtctctccattctcaggaacacctcaggagtcagacagtgagcagcagggagcaattttttgacttgtaagccccttaccaagcctggttcatttgtttattaaaagcaggtgtgggtgaatttatgcaaatgagtatgcaaactagtggaacagcagaaggattgaatggatacaccaaaaataaccacaactgtttaagggaaaagggtccataataaatgtggggaacaaaaaacaaataaatgtgattttttttag

SEQ ID NO: 11749 - protein, 413 aa, Rattus norvegicus; identical to SEQ ID NO: 7503
  ref <308>: DATABASE ACCESSION NUMBER: SWISS-Prot / AAK68636
  ref <309>: DATABASE ENTRY DATE: 2002-10-01

SEQ ID NO: 11750 - DNA, 313 bp, Rattus norvegicus
  misc_feature (1)..(313): n=a, c, g or t
  ref <308>: DATABASE ACCESSION NUMBER: EMBL / H31078
  ref <309>: DATABASE ENTRY DATE: 2000-03-04
agacaggactcttctactttatttgagttatttcaaatgacagttacaaaagcttttaatttttataatactcttcataagaaaataaaatttaaataaaaatacattctcaacaatacaacatggttacacaaattcactatattacgttctgataacttacattttcaaacgaagacactgtaaaanccagtattaactagcaacatattaattcccaagttaaaaatggaagcaggtaacatcaaccatgatcagtcatttaactctggaatgngtctngcatttgtcacagatgtgagggccactggga

SEQ ID NO: 11751 - DNA, 2457 bp, Homo sapiens
  ref <308>: DATABASE ACCESSION NUMBER: EMBL / AK025305
  ref <309>: DATABASE ENTRY DATE: 2000-09-29
taaagatgtaaacaaaactcaagacagaaggaatcagggaatatgtgctattgtgtgcatcttgtttacatttgggatcagtgatggcaaaagaagtaatgagaccactgaaattgttttcattgttttaaataccaggtactcattttcttgatttgaaagtttaacatgacttctaaggacatctcttcaaaaagaaagtaaacagggaatgaaggtggtgggaaaatcacttcacttcacccactatttcatgttgtaataagggccaccataaggatgccctcctcatagtgttcggttctgatcttcctcgagaacagtcacttggcgcactttaataatctggactgctccagatttgactttagatactccatggtatctagtctttatgatcagttgaatgatcagtgtttaagtctaaaaataatgctttcctgaaaatgtttatatttcattgctgtttccttattgcctgctagccaaatggaatttgggcaagcaactctttgaagacttttttaccctagaaatttacttttgtcctaaaaaccctaactgtaaataagcagtcgaagcaagttgccaccttgaagttgagggatacactttgcttcatcagtattaaaaaccatggtactcttattttgtcttttttaattcaaaacattttctaaatgtggtactttgaaccttggagtatttacatgtttctgttcaaaactgtgacttattaatgtaagtctgctagtagtactttttttgtctgagcataagctatatttcaagatatactttgccaattttgttattggtgggtaatcatttttaaattatattgttattaggtaattatttttaaagactactggcatacaatcaaagttgttccataaaagaatataactgagcaatgtatttctctaaatgacttgtaaaaatcaatgaattatgtttaagtctgcattatggtaggttattactcccagctcattttaaagacaagtttgaaagagtcctttaaattttataagcttgtagattccataaactacactgatttatacatttgaaagaatttagccatttaataaatttcttattctcaaattgcatttagattaaaattccttttaagagtgtctgaaatgtctgcctgcgaagaacatgtaaacattgccagataccagtcattattctttagtggctttttagtcctctgcttttttttttaaggcaaaagaaatatgcatctagcatttctaataccaaatccccaattgtgattgttttaaagatcatggtatgatcacagggaccaaggctgtgtgcatatataactctggatttgaaaggaggagagttcagccatctagttcttttcttcacatgacacttttaaacagccagtttgactggaattaaccaacttggcacagcctaaaaaaggagtaatgtgaaattaaattatttttctttgaaagtcttttgaaataagagaccatgtaagtaggaccctaagacaaccaaggaatttgcttccagggccctcattcctctgctgttacttacaaatgttttaatttttactacctgatattctttctctaccttttccacatttgaaaatatacaaggcagctcacttcatcctaaaaacctaaaaactccaggaaggaaagaaaaggatgatatggggaaatttgccataaatgccggttctggttcttagtttagccatttccatcagttgaaattgtggtgtgatctgttgcttgtttcgttgttgttttgtttttgtgtagctttgttttttaatattcatttaataagatgatgggcaatagcaaacatttttactcccaggaatataatttatcaaattgaactattttatttgccaaagaaacttgtttttaatatcacgggtaatgggtaagtgtgaaaactaggcttttttttatgaaacaaaaaaaggtgacgaataatatggcttttgtttctgtttctgaagcctgatttcatttatgccaggttttgaaaaacagatctttttcttaagtgaaagcacctttaatttgctctaacggtacatcctgtaaagacagaattctgcatagccttttaggtgtttttacagtatgtgaaaaatacaagactcattctagagttaaattaccaatcttggttgatattatctgcttccatttttattaatttggaaattaatatgttgctagtaaatattggtttttacagtacccagtttgaaaatgtaagttatcaaaacttaatgtagtgaatttgtgtaaccatgttgtattgttgagaatgtatttttatttaaattttattttcttatcaagagtattataaaaattaacttttgtaactgtcgcttggaaataactcaaataaattacaagaagcctgaaaaaaaaaaaaaaaaaaaaa

SEQ ID NO: 11752 - DNA, 385 bp, Rattus norvegicus
  misc_feature (1)..(385): n=a, c, g or t
  ref <308>: DATABASE ACCESSION NUMBER: EMBL / H31313
  ref <309>: DATABASE ENTRY DATE: 2000-03-04
cacttgggctcattccctgtttatnatcaaagtgattttcacaagtgtttaattacatgcatcgggggaaacatggtagagaaaagctttgaatatctgagcagctggaaggcaaacgaggttatgtggacattggtcactgtgcattaggactgccacccagtgtctggacagactgcgaatgtgtggggcccccgggccgaagactgaggtgcaggagtgcatcggtctcttnagcagagtggatgacttctggatgcacgtgggctctgacttggcgaagttttgtgggtttcttacagatcctggctttaaaaagacccagctgcttccccgttttgtgcctgacaagaccctgtgcttttctcaagggtgcgggggctta

SEQ ID NO: 11753 - DNA, 352 bp, Rattus norvegicus
  misc_feature (1)..(352): n=a, c, g or t
  ref <308>: DATABASE ACCESSION NUMBER: EMBL / H31351
  ref <309>: DATABASE ENTRY DATE: 2000-03-04
acctcaggatgtgactttatttggaaatggccactccagatgaaggtggggctctgctacagtagacagggtgagccccaacccaaagactgggatccttgtacagaaggtaagtttggagaccgacgcagtggagatgaaggcaaagatggagagatgtttgtacaagccctggggtacacacaagtntcagtgaccatcagacccaagaggattcactcttctagcttcggagagaaccagcccactgacaccagaccttggccttgcaaattccataactgtaacaatgccacgtgctgttagaagagcctacgtttagtactagttacttatgtcagtgctaggacta

SEQ ID NO: 11754 - DNA, 312 bp, Rattus norvegicus
  ref <308>: DATABASE ACCESSION NUMBER: EMBL / H31420
  ref <309>: DATABASE ENTRY DATE: 2000-03-04
ctgtatgtggctttattatttctgttttatttctgaaaaccccagaccacgttactttttagtctactccctcctccgtgtcagggtacgtaggggggaggcttctcccctgggaggaagtaggctggtgtgcagggtgaaggggcatgaggatgcccatggctggagtggcactgggagggagactctgtgtcctcaggcagaaagaggtcagcagaggccggtggggcactggagggctgtagtggcagagggtaggaggaacaggttggcacactcatagacggagggcacaagccggtgtaggctagg

SEQ ID NO: 11755 - DNA, 389 bp, Homo sapiens
  ref <308>: DATABASE ACCESSION NUMBER: EMBL / AA845957
  ref <309>: DATABASE ENTRY DATE: 2000-03-03
gctctgtgacggcgctctctgtgtgtctcgcacctgccctgtgtggattcctggctttaactaaacgcagcctctcatcctcagcacgcgtgtcagaggaggaggagctggaggccctctcagtggccagcacctgccagcttgtctgggactctccagcagctgccgggacagtcgatgtgtgtgtcacctgtcactccctggacggcaagtgccagctgaagcgcagagccctcgcccgcctactatgagttcatcggcgtcaggactgccaggacgtgctgcacctgtaccgcctgctctgggcctctgcagttctgaacgtcctgggcctgttcctgggcatcatcaccgccgccgtcctgggggccttcaaggacatggtgcct

SEQ ID NO: 11756 - DNA, 343 bp, Rattus norvegicus; identical to SEQ ID NO: 7532
  misc_feature (1)..(343): n=a, c, g or t
  ref <308>: DATABASE ACCESSION NUMBER: EMBL / H31588
  ref <309>: DATABASE ENTRY DATE: 2000-03-04

SEQ ID NO: 11757 - DNA, 374 bp, Homo sapiens; identical to SEQ ID NO: 7533
  ref <308>: DATABASE ACCESSION NUMBER: EMBL / AA947174
  ref <309>: DATABASE ENTRY DATE: 2000-03-03

SEQ ID NO: 11758 - DNA, 498 bp, Rattus norvegicus; identical to SEQ ID NO: 7534
  misc_feature (1)..(498): n=a, c, g or t
  ref <308>: DATABASE ACCESSION NUMBER: EMBL / H31590
  ref <309>: DATABASE ENTRY DATE: 2000-03-04

SEQ ID NO: 11759 - DNA, 518 bp, Rattus norvegicus; identical to SEQ ID NO: 7537
  misc_feature (1)..(518): n=a, c, g or t
  ref <308>: DATABASE ACCESSION NUMBER: EMBL / H31802
  ref <309>: DATABASE ENTRY DATE: 2000-03-04

SEQ ID NO: 11760 - DNA, 336 bp, Rattus norvegicus
  misc_feature (1)..(336): n=a, c, g or t
  ref <308>: DATABASE ACCESSION NUMBER: EMBL / H31907
  ref <309>: DATABASE ENTRY DATE: 2000-03-04
gcggctctgaaatggtttattgttgagttctgaaaacacatgtgggaacagggcaagtccaaccaagactacccttggtgtaacattnccggtccccaccagcagacatcaacatgttcttctgtgtcaaagaggagattccctgagtaaaggcatttccttaaagaatgtccaggcttcagtggctgtcctgggtggagatggctcttgctggctttcaggctagggcactacccatgacttcagagaaaccacttggtgttacaggcctcacctgctgagcttcctgcagtccaggctggatccctttccaggccagagacttctctaatttgg

SEQ ID NO: 11761 - protein, 471 aa, Rattus norvegicus; identical to SEQ ID NO: 10151
  ref <308>: DATABASE ACCESSION NUMBER: SWISS-Prot / P97834
  ref <309>: DATABASE ENTRY DATE: 2002-06-15

SEQ ID NO: 11762 - DNA, 1866 bp, Homo sapiens; identical to SEQ ID NO: 10152
  ref <308>: DATABASE ACCESSION NUMBER: EMBL / U20285
  ref <309>: DATABASE ENTRY DATE: 1999-08-03

SEQ ID NO: 11763 - protein, 471 aa, Homo sapiens; identical to SEQ ID NO: 10153
  ref <308>: DATABASE ACCESSION NUMBER: SWISS-Prot / Q13098
  ref <309>: DATABASE ENTRY DATE: 2002-06-15

SEQ ID NO: 11764 - DNA, 397 bp, Rattus norvegicus; identical to SEQ ID NO: 7543
  misc_feature (1)..(397): n=a, c, g or t
  ref <308>: DATABASE ACCESSION NUMBER: EMBL / H31914
  ref <309>: DATABASE ENTRY DATE: 2000-03-04

SEQ ID NO: 11765 - protein, 712 aa, Rattus norvegicus; identical to SEQ ID NO: 3693
  ref <308>: DATABASE ACCESSION NUMBER: SWISS-Prot / P13383
  ref <309>: DATABASE ENTRY DATE: 2002-06-15

SEQ ID NO: 11766 - DNA, 10942 bp, Homo sapiens; identical to SEQ ID NO: 7545
  ref <308>: DATABASE ACCESSION NUMBER: EMBL / M60858
  ref <309>: DATABASE ENTRY DATE: 2000-03-04

SEQ ID NO: 11767 - protein, 706 aa, Homo sapiens; identical to SEQ ID NO: 7546
  ref <308>: DATABASE ACCESSION NUMBER: SWISS-Prot / P19338
  ref <309>: DATABASE ENTRY DATE: 2002-06-15

SEQ ID NO: 11768 - DNA, 5742 bp, Rattus norvegicus
  misc_feature (1)..(5742): n=a, c, g or t
  ref <308>: DATABASE ACCESSION NUMBER: EMBL / S79169
  ref <309>: DATABASE ENTRY DATE: 2000-03-04
aattcggcacgagccaaccccaagcacacttctgcctgctactgtctctgagcccagcactacctcagtgcctgtagaatcatcactgttgtctggagttgtcaggtctacgaggccgcctcctacccagcctgtggtccccaggccccacttggacccaaactggaactcacacaacagtcctgttcccagaggatgaggacgatgtattgttattgccactggctgagccagaagtcctgggttggtggaggcagaggatgaaccattgcttgcctgagggactctaggcacaatggtatgatccttggaagtggttcagcttccccactgatctatgtagcacagaaagttagtgtctctccagcagggagagcattcactgtacacaccttctggtatgacaagagacttcaccaccaccctctgcccagcctgctatccaggtggctgtgttacaaaaggtcccacaagggtcacaggcttggacactccgttctttccagctccccacccaaaagtggccttaactactagactggttggctggagacctagccaccaaggggaggatttggccagggtgatggttttgccagcctccatccctgtggtgcctggccacttagaggacacaagtgcttttgccctgtagctgcatcattgtccaggaaatcaagatgacaaaaataaaggaatcataaacttcagcccttggtaaaaaaaaacggcacgaggttacctttactactcgggcacagtcgagctgactggactctccaaggggtcgccatcccgaagctgcggaagcttgggttcccagcctgacgcgaatagagcccgagtcccaatcccagagggaatcgctctccgcagaccagtgggaccccgaaacttgaacgcaaacccccttttcaagcctttgtcacttccccagctttctcccaacgcgttcttttttcccccttcctctccattctctcttctccgaaggacacaaaagtggcttccgctgaaagattaggaggcggtgggagcttttccctttggagagcgattgtgtaggaaggattttcgggaagctgctttttaacaccactgctctttgctttccgagcttccctgtaaccctctgaggtaaaaaccccgtagcttgaaagttcggggtattttgttgggtgctttaggaggagagaagaggaggaccttgtcctcatcctagtagtttggctggacttgtactggccgttggaaacccccaagtacatttccgtgtggaacttttgcaaatatatatttagattttaaatatcagataaaagatatatatgctttttatatatttcccgacgacctgcccctgacagcgcgatgtacaatacggtgtggagtatggaccgcgatgacgcagactggagggaggtgatgatgccctattcgacagaactgatattttatattgaaatggatcctccagctcttccaccaaagccacctaagccaatgactccagcagtcacaaatggaatgaaggacagtttcatttctcttcaagatgcagagtggtactggggagatatttccagggaagaggtaaatgacaaattgcgggacatgccagatggtaccttcttagttcgtgatgcctcaacgaaaatgcagggggattatacattgactttgaggaagggaggaaataataaattaataaagatctatcatcgggatggtaaatatggcttctctgagcccctgacgtttacttctgtggtggagcttattaaccactaccaccacgagtctctcgctcagtacaatcccaaactcgacgtgaagctgacgtacccagtatccagattccaacaggatcagttggtaaaagaagataacattgatgcagtaggtaaaaatctgcaggagttccactctcagtatcaggagaagagcaaagagtatgacaggctgtatgaagagtacacaaggacatcacaggaaatacaaatgaagaggactgccattgaagcctttaatgaaacaattaaaatatttgaggagcagtgtcatacccaagaacaacacagtaaagactatatcgagcgctttcgcagagaggggaatgagaaggagatcgagcgaattatgatgaattatgataaattgaaatcacgtcttggtgagattcatgatagcaaactgcgtcttgagcaggacttgaagaaacaagctttggacaaccgggaaatagataaaaaaatgaatagcatcaaacccgacttgatccagctgcgtaagatccgggatcagcaccttgtatggctcaatcacagaggagtgaggcagaggcgcctgaatgcctggctggggatcaagaatgaggactcagatgaaagctattttatcaatgaggaagatgagaacctgccgcattatgatgagaaaacctggtttgtggaggatatcaaccgagtacaagcagaggacttgctttatgggaaaccagatggtgcattcttaattcgtgagagtagcaagaaaggatgttacgcttgttctgtggttgcagacggggaagtgaagcactgtgtcatctacagcacggctcgaggatatggctttgcagaaccctacaacctgtacagctcactgaaggagctggtgctccattaccagcagacatccctggttcagcacaacgactccctcaacgtcaggctcgcctaccctgtccatgcacagatgcctacgctctgcagataagcagagtggaagagacacactctctagccgtttttttcctatggtttttattagactacgatgagggcattctttcaacgtagactgcttgtttgcacaagtgattctgtgaatgtgaaatggagaggccaagcagtagcttggatttagaaatgaggggcccagggtctctggcctcggctgtgctgctgcactgatggactaagctggaagcagatattggtttcatggggtttgggtttgttgtcaggcacctttaaaagaacagctaaggcttgttgtgggttggggtgggggttttatttggaagtttctgaagagtccacatccctttgtcctcaaccctaagaatgcagcaggtcacagttctgctgggagttgttttgatttgatagtctcttcccctttcccccaaataaagagccgattttggctctgtggtaaagtgggatttggtttggagggaaaaacaaccaaaggaaaatagggaggtatgggattacattttcagaatctaaaccaaggaggcaaaagaccccttcagttgatgttacttcaattttatcaacataatctaggcttcagcatcttcaccaactcctccctctaaagcactgtgttcaaaaaccaacaaagcagcatcgccnagaccaaggtctaaggggaggacagtagtagctgaatgtacacttctgtaccaaaacttgaaagactagaaatgtgagtttcaacaaacactaaaattggtcagtgtatttccttttgccctggccttgtttctcagatgaggaatagaattattttgtggaaatagtaagctttgagtcataatgaagttggtgcttgtgtggtgtttctttaaagaaatgtttgaaacccttgtaagttgttttatgagtaaagaaacagtgcaatccagtgcttttagatggcttgatataccaaataatgatagagaacaacattgttgtgtgcttcctcaagtttaaaagccttgccaaaactatacaaggattaatttgccttcatctccccttccttttttggatagggtttagggagccataggtagctaaaggaggactcgagtttgtggtcagagacctcagtaaatcacaggcacatgaggcctggtatccatggtgaagggtccatcacatgacatgttattcaatactgtggttgaagcgtttgccagaagaggggatgacgtggagttcagactatctggggaaataatccacaggctttcctgcttgccctttttgtgagcctgctgttaaggcagtgcacacagcctgctctcatgcttccgtggctgtggtttaagccttcagctaagtgaagttagatagaggagagggcagccatctatttatggattcacactcatttaagagttcagctgcttcagagtcagttctggagccataacaggctcagtatgactcagctgcttgagcccagtaatgtgcagtcaggcagtttagacaagcagcctgtgcctgggtcatcaggcttacaatcagggaagatgaagtttgggggccaaaataaagatgaatatgactttccctgagcacttcctttggtgacagtgtctagaagaaaccacagtatagagataggtcaaaagttttgaataattgtcacagttgatagggcatgccattgatggctttttcttgttcatgctccagtgtgaaagagaggagattgaccaccctcagccactctgtaaggcctttttcaaaattgccagcttaaaatcttgctcagtttaccaagtaatgccaggctatttgttgattggaatacctgtgactttgtactgatgttgaacttgctgaagcagttatatgctcaagattaggtgtgaggaatccctctgatccagcactaaaattttagtatgtcctgaacgcctttttaaagaaatctcttccaagtaagtcaaaatgataaaatatacagctttagtgttgaataatgtctttaccttgtaggcagacatggaagatatgcaggagaaagcagcatctacacctgggctggacaatggagaaagacaggttttcagtcctatattctttccctttgagtaaccactttgtgggagctgagaccagggatcatttaataaatcggaagctatctttttatttttctgccaagttactacatgatttatctgatcctgagctgtggaaatggcatgaggagcagtctcctaagagtggccctgctgtctgagggagtctggaagcaggtgttggtcttcttctcaaggctagctcaaagttctgtctcatgatctaggccctgggactatctcttttggcatcttaactgtagactcattgactaaagcagaggctagagacagattaggaccataggggcaggcagatcagccagtccccagatcagccagtccccaacaggaaagcagctttgggttggctagatacagtttttaaaataaaaacaaaacaaaacaaagctgtttccacctggcatagttcagcttaggtaggttgtttatgttcttgtcactgctccagcaatagatgaagacatcctacagctccacactactaagacacaagctctctacatttacttcagactcaagcccgagtggcatcttccttgtgtcccttctctgcaaggtaccagcttcacccattctccagaactttaaagaaaaaatgtacttgaacaatttctgatttctaggatgatctctactgccagttagatcttcttgaggtttccatgacatcatacaccagaggtccattcttggtcctttgctgccaactgctcattcttgacttagctctagccatttgtgacaaccacccttgtttccttacaaatcctcgcatgtaactttggtactttgttgtttcttgtgaagaatctattctgttgtctttgatgtaataaaaaaatttcatgtaaaaaaaaaaactcgtgccg

SEQ ID NO: 11769 - protein, 461 aa, Rattus norvegicus; identical to SEQ ID NO: 7578
  ref <308>: DATABASE ACCESSION NUMBER: SWISS-Prot / AAB34938
  ref <309>: DATABASE ENTRY DATE: 2002-06-15

SEQ ID NO: 11770 - DNA, 3371 bp, Homo sapiens; identical to SEQ ID NO: 7579
  ref <308>: DATABASE ACCESSION NUMBER: Refseq / NM_003629
  ref <309>: DATABASE ENTRY DATE: 2002-05-14

SEQ ID NO: 11771 - protein, 461 aa, Homo sapiens; identical to SEQ ID NO: 7580
  ref <308>: DATABASE ACCESSION NUMBER: SWISS-Prot / Q92569
  ref <309>: DATABASE ENTRY DATE: 2001-10-16

SEQ ID NO: 11772 - DNA, 447 bp, Rattus norvegicus; identical to SEQ ID NO: 7581
  misc_feature (1)..(447): n=a, c, g or t
  ref <308>: DATABASE ACCESSION NUMBER: EMBL / H33651
  ref <309>: DATABASE ENTRY DATE: 2000-03-04

SEQ ID NO: 11773 - DNA, 389 bp, Rattus norvegicus; identical to SEQ ID NO: 7586
  misc_feature (1)..(389): n=a, c, g or t
  ref <308>: DATABASE ACCESSION NUMBER: EMBL / H33660
  ref <309>: DATABASE ENTRY DATE: 2000-03-04

SEQ ID NO: 11774 - DNA, 1405 bp, Homo sapiens; identical to SEQ ID NO: 7587
  ref <308>: DATABASE ACCESSION NUMBER: EMBL / AK058044
  ref <309>: DATABASE ENTRY DATE: 2001-10-31

SEQ ID NO: 11775 - protein, 423 aa, Homo sapiens; identical to SEQ ID NO: 7588
  misc_feature (1)..(423): Xaa=Unknown amino acid

SEQ ID NO: 11776 - DNA, 2104 bp, Rattus norvegicus; identical to SEQ ID NO: 7593
  ref <308>: DATABASE ACCESSION NUMBER: EMBL / S45812
  ref <309>: DATABASE ENTRY DATE: 2000-06-09

SEQ ID NO: 11777 - DNA, 1949 bp, Homo sapiens; identical to SEQ ID NO: 7594
  ref <308>: DATABASE ACCESSION NUMBER: EMBL / M68840
  ref <309>: DATABASE ENTRY DATE: 2000-03-04

SEQ ID NO: 11778 - protein, 527 aa, Homo sapiens; identical to SEQ ID NO: 1558
  ref <308>: DATABASE ACCESSION NUMBER: SWISS-Prot / P21397
  ref <309>: DATABASE ENTRY DATE: 2002-06-15

SEQ ID NO: 11779 - DNA, 1093 bp, Rattus norvegicus
  ref <308>: DATABASE ACCESSION NUMBER: EMBL / S48325
  ref <309>: DATABASE ENTRY DATE: 2000-03-04
cggggggacattcctgtgttccaggagtacaagaacaaggggattattttcaataatgggcccacatggaaggatgtgcggaggttttccctaagcattctccgagactggggaatggggaaacagggtaatgaggcccgcatccaaagggaggcgcaattcctggtggaggagctcaaaaagaccaaaggccagccttttgaccccacatttctgattggctgcgcaccctgcaatgtcattgcggatatcctcttcaacaaacgtttcgactacaatgacaagaagtgtctgaggctcatgagtttgttcaatgaaaacttctacctgctgagcaccccctggatccagctttacaataactttgcggattatctacgatacctacctggaagccatagaaaaatcatgaaaaatgtgtctgaaataaaacagtacacacttgaaaaagccaaggaacaccttcagtcactggacatcaactgcgcccgggatgtgactgactgtctcctcatagagatggagaaggaaaaacacagccaagaacccatgtacacaatggaaaatgtttctgtgactttggccgacctgttctttgcaggaactgagaccaccagcacaactctgagatatgggctcctgatcctcatgaaatacccagaaattgaagagaaacttcatgaagaaattgacagggttattgggccaagccgcgtccctgctgtcagagacagactggatatgccctacatggatgctgtggtgcatgagatccagagattcatcaatcttgtcccttccaacctaccccatgaagcaaccagagatactgtgttccaaggatatgtcatccccaagggtacagttgtgattccaactctggactccctcttatatgacagccatgagtttccagatccagagaagtttaaacctgagcatttcctgaatgaaaatgggaagttcaagtacagtgactatttcaaggcattttctgcaggaaagcgtgtgtgtgttggagaaggcctggcccgcatggaattgtttctgctcctgtctgctattctgcagcattttaacctgaagtctctgg

SEQ ID NO: 11780 - protein, 493 aa, Rattus norvegicus
  ref <308>: DATABASE ACCESSION NUMBER: SWISS-Prot / AAB24151
  ref <309>: DATABASE ENTRY DATE: 2002-06-15
MAVLGITIALLVWVATLLVISIWKQIYNSWNLPPGPFPLPILGNIFQLDLKDIPKSFTKLAKRFGPVFTLHLGSRRIVVLHGYKAVKEVLLNHKNEFSGRGDIPVFQEYKNKGIIFNNGPTWKDVRRFSLSILRDWGMGKQGNEARIQREAQFLVEELKKTKGQPFDPTFLIGCAPCNVIADILFNKRFDYNDKKCLRLMSLFNENFYLLSTPWIQLYNNFADYLRYLPGSHRKIMKNVSEIKQYTLEKAKEHLQSLDINCARDVTDCLLIEMEKEKHSQEPMYTMENVSVTLADLFFAGTETTSTTLRYGLLILMKYPEIEEKLHEEIDRVIGPSRVPAVRDRLDMPYMDAVVHEIQRFINLVPSNLPHEATRDTVFQGYVIPKGTVVIPTLDSLLYDSHEFPDPEKFKPEHFLNENGKFKYSDYFKAFSAGKRVCVGEGLARMELFLLLSAILQHFNLKSLVDPKDIDLSPVTVGFGSIPPQFKLCVIPRS

SEQ ID NO: 11781 - DNA, 1667 bp, Homo sapiens
ctcccgggctggcagcagggccccagcggcaccatgtctgccctcggagtcaccgtggccctgctggtgtgggcggccttcctcctgctggtgtccatgtggaggcaggtgcacagcagctggaatctgcccccaggccctttcccgcttcccatcatcgggaacctcttccagttggaattgaagaatattcccaagtccttcacccggttggcccagcgcttcgggccggtgttcacgctgtacgtgggctcgcagcgcatggtggtgatgcacggctacaaggcggtgaaggaagcgctgctggactacaaggacgagttctcgggcagaggcgacctccccgcgttccatgcgcacagggacaggggaatcatttttaataatggacctacctggaaggacatccggcggttttccctgaccaccctccggaactatgggatggggaaacagggcaatgagagccggatccagagggaggcccacttcctgctggaagcactcaggaagacccaaggccagcctttcgaccccaccttcctcatcggctgcgcgccctgcaacgtcatagccgacatcctcttccgcaagcattttgactacaatgatgagaagtttctaaggctgatgtatttgtttaatgagaacttccacctactcagcactccctggctccagctttacaataattttcccagctttctacactacttgcctggaagccacagaaaagtcataaaaaatgtggctgaagtaaaagagtatgtgtctgaaagggtgaaggagcaccatcaatctctggaccccaactgtccccgggacctcaccgactgcctgctcgtggaaatggagaaggaaaagcacagtgcagagcgcttgtacacaatggacggtatcaccgtgactgtggccgacctgttctttgcggggacagagaccaccagcacaactctgagatatgggctcctgattctcatgaaataccctgagattgaagagaagctccatgaagaaattgacagggtgattgggccaagccgaatccctgccatcaaggataggcaagagatgccctacatggatgctgtggtgcatgagattcagcggttcatcaccctcgtgccctccaacctgccccatgaagcaacccgagacaccattttcagaggatacctcatccccaagggcacagtcgtagtgccaactctggactctgttttgtatgacaaccaagaatttcctgatccagaaaagtttaagccagaacacttcctgaatgaaaatggaaagtttaagtacagtgactatttcaagccattttccacaggaaaacgagtgtgtgctggagaaggcctggctcgcatggagttgtttcttttgttgtgtgccattttgcagcattttaatttgaagcctctcgttgacccaaaggatatcgacctcagccctatacatattgggtttggctgtatcccaccacgttacaaactctgtgtcattccccgctcatgagtgtgtggaggacaccctgaaccccccgctttcaaacaagttttcaaattgtttgaggtcaggatttctcaaactgattcctttctttgcatatgagtatttgaaaataaatattttcccagaatataaataaatcatcacatgattatttt

SEQ ID NO: 11782 - protein, 493 aa, Homo sapiens
MSALGVTVALLVWAAFLLLVSMWRQVHSSWNLPPGPFPLPIIGNLFQLELKNIPKSFTRLAQRFGPVFTLYVGSQRMVVMHGYKAVKEALLDYKDEFSGRGDLPAFHAHRDRGIIFNNGPTWKDIRRFSLTTLRNYGMGKQGNESRIQREAHFLLEALRKTQGQPFDPTFLIGCAPCNVIADILFRKHFDYNDEKFLRLMYLFNENFHLLSTPWLQLYNNFPSFLHYLPGSHRKVIKNVAEVKEYVSERVKEHHQSLDPNCPRDLTDCLLVEMEKEKHSAERLYTMDGITVTVADLFFAGTETTSTTLRYGLLILMKYPEIEEKLHEEIDRVIGPSRIPAIKDRQEMPYMDAVVHEIQRFITLVPSNLPHEATRDTIFRGYLIPKGTVVVPTLDSVLYDNQEFPDPEKFKPEHFLNENGKFKYSDYFKPFSTGKRVCAGEGLARMELFLLLCAILQHFNLKPLVDPKDIDLSPIHIGFGCIPPRYKLCVIPRS

SEQ ID NO: 11783 - DNA, 3043 bp, Rattus norvegicus
  ref <308>: DATABASE ACCESSION NUMBER: EMBL / S49760
  ref <309>: DATABASE ENTRY DATE: 2000-03-04
ggaagacagaagcgtgggagtggagaaagtggcacaaaccagagccctggagatactctggaaacgcggagcagattgtgttggaaagctggcaacagcggtggtctcgggcgcggcgggagggcaggctgggtcgggggcgggcagtgtgtcgtcaggagctgggcggccccgcggcggccgcgtcttcctagcccatcccctcaagcccagctcgggctccggcgccccagctccgaccgtgcgctctcctgggtcaagttagagcccaccgagagccccgcgccactcgcgcactctcgcacccgggcagaaggactgcggaaggggccgccccacgggctgggtgagggctgcagcgtccagagaaggaagcgttgacagctggagccggctgctggaagggtttgcgccgggacgcgggggttgccgtagcgctacgcaagacggggcttaccctctgaaaagcaaacataagaggctgtacaaccaggttatctctgcgatcagcctcaagcagagaagaaagatggccaaagacaagggcctcatcagcccagaagactttgcccagctgcaaaagtacatagactactccaccaaaagtgtcagcgatgtgctgaaggtctttgagatgaacaaatattgccaaggagatgagattgggtacctgggatttgaacagttcctgaaaatgtatctggaagtggaggaggttccccatcacctatgctggactctgttttggtccttccatagcagtcaagacttggatgaggagactgagtcaaaagccaatgtgatctgtctcagtgacgtctactgctacttcaccctcctggaaggcggcagtccggaagacaagctagagttcaccttcaagctgtacgacatggacagaaatgggatcctagacagcacagaagtagaaaaaatcatcctgcaaatgatgagagtggctgaatatctggactgggatgtgtctgagctgagaccgatccttcaggagatgatgaaagagatggaccgggatggcagtggctgtgtctccctagctgagtgggtccgggctggggctaccactgtgcccctgcttgtccttctggggatagacatgactatgaaagatgatggacaccatatatggagacccaagagattctccagaccggtctactgcaacctgtgcgagttgagcattggcctcggcaaacaaggcctgagctgtaacctctgtaagtacattgttcatgaccactgtgccatgaaggcccagccttgtgaagtcagcacctatgccaagtctcggaaagacattggtgtccagccacacgtatgggttcgaggaggctgtcattctggacgctgcgaccgctgtcagaaaaagatccggacctaccacagcctaacgggactgcactgcgtgtggtgccacctggagatccacgatgactgtctgcaggctgttggtcccgagtgtgactgtggactgctccgtgatcatatcctgcctccgtgttctatctaccccagggtcctggtatctggacaggagtgcaaacagaagaccacagatgttacgagcctgtgcacccctgaggcttttcggattgaacctgtttctaacacccacccccttctggtcttcatcaatcctaagagcggaggcaagcaggggcagagcgtgctttggaagttccagtacattctgaaccctcggcaggtgtttaacctgaaggatggtccggagccagggctcaggtttttcaaagacgttcctcagttccgggtgttggtgtgtggtggagacggcaccgtaggctggattctagagaccattgacaaagccaactttcccattgtgcctccagtcgctgtgttgcccctgggcactggaaatgacctggctcggtgcctaagatggggaagaggttatgaaggtgagaacttgagaaagattctcaaggatatagagataagtaaggtggtatatctcgatcgatggctcctggaagtgataccccaacaaaacggagaaaagagtgatccagttccctctcaaatcatcaataactacttctccattggtgtggatgcttccattgctcaccggttccatctcatgagagagaaataccctgagaagttcaatagcagaatgaagaacaagctttggtacttggagtttgccacatcggagtccatcttctcaacgtgcaaaaagctggaagagtcagtgaccgtcgagatatgtgggaagctgctggatctgagtgacctgtccctcgaaggcattgcggtattgaatatcccgagcatgcatggtggctccaatctctggggtgacaccaagagacctcacggggatacgtgtgggatcaaccaggcactgggcagtgtggccaaaataatcacagaccccgatattctcaaaacctgtgtgccagacatgagtgacaagcggctggaagtcgtaggaatagagggtgtgattgagatgggtcagatctataccaggctcaagagtgctggacaccggctggccaagtgctccgagatcacgttccagaccacaaaaaccctccctatgcaagttgatggagaaccctggatgcaagcaccctgtacaatcaagatcacccataagaaccagatgcctatgctaatgggtccggctcccagttcctccaatttctttggcttttggagctgaggatggatgccatctgccttgagcccacctccctgttcctggagatttcccactatctagatgctgccacaccttcctgccagcccagaaggatgttccatcaccttcacagtatttattatcctccgccacctcactgctcccacacagacatccttacacaaccagcgatgcgtaaccttgaaaatgcctcatctaataaagtgactttttccatcactgggatatctgttaaaatgagcgacacatctctttttacaccttcacccctctacagacagatttaaaagcagacagaacaaataaatgaacaaagaaagcctaaaaaaa

SEQ ID NO: 11784 - protein, 728 aa, Rattus norvegicus
  misc_feature (1)..(728): Xaa=Unknown amino acid
MAKDKGLISPEDFAQLQKYIDYSTKSVSDVLKVFEMNKYCQGDEIGYLGFEQFLKMYLEVEEVPHHLCWTLFWSFHSSQDLDEETESKANVICLSDVYCYFTLLEGGSPEDKLEFTFKLYDMDRNGILDSTEVEKIILQMMRVAEYLDWDVSELRPILQEMMKEMDRDGSGCVSLAEWVRAGATTVPLLVLLGIDMTMKDDGHHIWRPKRFSRPVYCNLCELSIGLGKQGLSCNLCKYIVHDHCAMKAQPCEVSTYAKSRKDIGVQPHVWVRGGCHSGRCDRCQKKIRTYHSLTGLHCVWCHLEIHDDCLQAVGPECDCGLLRDHILPPCSIYPRVLVSGQECKQKTTDVTSLCTPEAFRIEPVSNTHPLLVFINPKSGGKQGQSVLWKFQYILNPRQVFNLKDGPEPGLRFFKDVPQFRVLVCGGDGTVGWILETIDKANFPIVPPVAVLPLGTGNDLARCLRWGRGYEGENLRKILKDIEISKVVYLDRWLLEVIPQQNGEKSDPVPSQIINNYFSIGVDASIAHRFHLMREKYPEKFNSRMKNKLWYLEFATSESIFSTCKKLEESVTVEICGKLLDLSDLSLEGIAVLNIPSMHGGSNLWGDTKRPHGDTCGINQALGSVAKIITDPDILKTCVPDMSDKRLEVVGIEGVIEMGQIYTRLKSAGHRLAKCSEITFQTTKTLPMQVDGEPWMQAPCTIKITHKNQMPMLMGPAPSSSNFFGFWSX

SEQ ID NO: 11785 - DNA, 3490 bp, Homo sapiens; identical to SEQ ID NO: 2167
  ref <308>: DATABASE ACCESSION NUMBER: EMBL / U51477
  ref <309>: DATABASE ENTRY DATE: 1999-06-30

SEQ ID NO: 11786 - protein, 1117 aa, Homo sapiens [sequence omitted]

SEQ ID NO: 11787 - DNA, 361 bp, Rattus norvegicus
  ref <308>: DATABASE ACCESSION NUMBER: EMBL / S57478
  ref <309>: DATABASE ENTRY DATE: 2000-03-04
ttctctttttgcaccaacaggatgaaaccaaaggagactatgaaaaaatcctggtggctctgtgtggaggaaactaaacatcccaactgctctgtaagattccgaggagaacatctcttagccgttgttttcttcctattgcaaggcttaagtaggaaagttgctttgtcagtaagtctaattaccttctttgaataatgtagcctataaatatgttttagatcattcctctgtacaatagagaaatacttgttttgttaattatgtttatcccaaattataaatccctgtaagcaagtcatttggtaccattcctgagaaagaagtttacatagactaaaataaaacaattttataagac

SEQ ID NO: 11788 - protein, 345 aa, Rattus norvegicus; identical to SEQ ID NO: 6014
  ref <308>: DATABASE ACCESSION NUMBER: SWISS-Prot / LURT1
  ref <309>: DATABASE ENTRY DATE: 2002-06-15

SEQ ID NO: 11789 - DNA, 1399 bp, Homo sapiens
  ref <308>: DATABASE ACCESSION NUMBER: EMBL / X05908
  ref <309>: DATABASE ENTRY DATE: 1993-09-12
agtgtgaaatcttcagagaagaatttctctttagttctttgcaagaaggtagagataaagacactttttcaaaaatggcaatggtatcagaattcctcaagcaggcctggtttattgaaaatgaagagcaggaatatgttcaaactgtgaagtcatccaaaggtggtcccggatcagcggtgagcccctatcctaccttcaatccatcctcggatgtcgctgccttgcataaggccataatggttaaaggtgtggatgaagcaaccatcattgacattctaactaagcgaaacaatgcacagcgtcaacagatcaaagcagcatatctccaggaaacaggaaagcccctggatgaaacacttaagaaagcccttacaggtcaccttgaggaggttgttttagctctgctaaaaactccagcgcaatttgatgctgatgaacttcgtgctgccatgaagggccttggaactgatgaagatactctaattgagattttggcatcaagaactaacaaagaaatcagagacattaacagggtctacagagaggaactgaagagagatctggccaaagacataacctcagacacatctggagattttcggaacgctttgctttctcttgctaagggtgaccgatctgaggactttggtgtgaatgaagacttggctgattcagatgccagggccttgtatgaagcaggagaaaggagaaaggggacagacgtaaacgtgttcaataccatccttaccaccagaagctatccacaacttcgcagagtgtttcagaaatacaccaagtacagtaagcatgacatgaacaaagttctggacctggagttgaaaggtgacattgagaaatgcctcacagctatcgtgaagtgcgccacaagcaaaccagctttctttgcagagaagcttcatcaagccatgaaaggtgttggaactcgccataaggcattgatcaggattatggtttcccgttctgaaattgacatgaatgatatcaaagcattctatcagaagatgtatggtatctccctttgccaagccatcctggatgaaaccaaaggagattatgagaaaatcctggtggctctttgtggaggaaactaaacattcccttgatggtctcaagctatgatcagaagactttaattatatattttcatcctataagcttaaataggaaagtttcttcaacaggattacagtgtagctacctacatgctgaaaaatatagcctttaaatcatttttatattataactctgtataatagagataagtccattttttaaaaatgttttccccaaaccataaaaccctatacaagttgttctagtaacaatacatgagaaagatgtctatgtagctgaaaataaaatgacgtcacaagac

SEQ ID NO: 11790 - protein, 345 aa, Homo sapiens
  ref <308>: DATABASE ACCESSION NUMBER: SWISS-Prot / P04083
  ref <309>: DATABASE ENTRY DATE: 2002-06-15
AMVSEFLKQAWFIENEEQEYVQTVKSSKGGPGSAVSPYPTFNPSSDVAALHKAIMVKGVDEATIIDILTKRNNAQRQQIKAAYLQETGKPLDETLKKALTGHLEEVVLALLKTPAQFDADELRAAMKGLGTDEDTLIEILASRTNKEIRDINRVYREELKRDLAKDITSDTSGDFRNALLSLAKGDRSEDFGVNEDLADSDARALYEAGERRKGTDVNVFNTILTTRSYPQLRRVFQKYTKYSKHDMNKVLDLELKGDIEKCLTAIVKCATSKPAFFAEKLHQAMKGVGTRHKALIRIMVSRSEIDMNDIKAFYQKMYGISLCQAILDETKGDYEKILVALCGGN

SEQ ID NO: 11791 - DNA, 2256 bp, Rattus norvegicus; identical to SEQ ID NO: 7638
  ref <308>: DATABASE ACCESSION NUMBER: EMBL / S59525
  ref <309>: DATABASE ENTRY DATE: 2000-03-04

SEQ ID NO: 11792 - protein, 327 aa, Rattus norvegicus; identical to SEQ ID NO: 7639
  ref <308>: DATABASE ACCESSION NUMBER: SWISS-Prot / AAB26420
  ref <309>: DATABASE ENTRY DATE: 2000-05-30

SEQ ID NO: 11793 - DNA, 2735 bp, Homo sapiens; identical to SEQ ID NO: 7640
  ref <308>: DATABASE ACCESSION NUMBER: Refseq / NM_000406
  ref <309>: DATABASE ENTRY DATE: 2002-11-05

SEQ ID NO: 11794 - protein, 328 aa, Homo sapiens; identical to SEQ ID NO: 7641
  ref <308>: DATABASE ACCESSION NUMBER: SWISS-Prot / P30968
  ref <309>: DATABASE ENTRY DATE: 2002-06-15

SEQ ID NO: 11795 - DNA, 3591 bp, Rattus norvegicus
  ref <308>: DATABASE ACCESSION NUMBER: EMBL / S67900
  ref <309>: DATABASE ENTRY DATE: 2000-03-04
gcctcactcgggtggtggcagtgttcaagaggactaactcttgtcatccggattccagttcgattcctcggatccaattaggaagacactccatcatgcgattggagtcctcgtcgtggcccagagatagaagacggacggggaaggggagacctaaccagatagctaggtgcctcctgaagaactaccatgtctgagaatagtacattttccacagaagacagcagcagcagcagctataaaccccacgcctcaaacctccgaagggcagggaagaaatgctcatgggcttcctacatgaccaactccccaacactcattgttatgattggcttgccagcccggggtaagacttatgtgtccaagaaattaacacgctacctgaactggattggagtacctaccaaagtgtttaatcttggtgtatatcgacgggaagcagtcaagtcctataagtcctatgacttctttcgacatgacaatgaagaggccatgaagatccgcaaacagtgtgccctggtggcactggaagatgtgaaggcctactttactgaagagagtgggcagatcgcggtgtttgatgccaccaataccactcgggagaggagggacatgattttgaactttgccaagcagaatgccttcaaggtattctttgtggaatctgtgtgtgatgatcctgatgtcattgctgccaatattctggaggtaaaagtgtcaagccctgactaccccgaaaggaatagggagaatgtgatggaggacttcctgaagagaattgagtgctacaaggtcacttaccagccccttgacccagacaactatgataaggacctctcgttcataaaggtgatgaatgtaggccagaggtttctggtcaacagagttcaggactacatccagagtaagattgtctactacctgatgaacatccatgtccatcctcgcaccatctatctgtgccggcacggagagagcgaattcaatcttttgggaaagattgggggtgactctggcctttcgttgcgaggaaagcagtttgctcaggctctgaagaagtttctggaggaacaggagatccaggacctcaaagtgtggacaagccagttgaagaggacaattcagactgctgagtctcttggggtgacctatgagcaatggaagatcctaaatgagattgatgctggcgtgtgtgaggagatgacttattcggagatcgaacaacggtatccagaggaatttgcacttcgagatcaagagaagtatctgtatcgatatcctggtggggagtcataccaggacctggtgcagcggctggagcctgtgatcatggagctggagcggcaaggcaacgtcctcgttatctctcaccaggctgtcatgcgctgcctcctggcctacttcttggataaaggcgcagatgagttgccgtacttgaggtgccccctccacatcatcttcaaacttactcctgtggcctatggttgcaaagtggaaacaattacactgaatgtggaagctgtggacacacatcgtgacaagccaactgaagtggagaatgtgctggctaagcatagacgcccctcaatggcatccctcactttgctctcctgatgtgaggctgaggccagacctctccgaggaactggatctaccaaaaagcttggcatgccagcatccctgaggctagaacaggaagttaagtgggaacgtctcatttgaggctaccaacagtaaggcgtgggaaaccttcactgcatttctacccctcatgcccaacaggaacattactacattgtgcctcaaaaagtcgtcaacagcctgagcaagttagttcttgtctcttttgaaccaaatttgcaaatgccattctaacagaggcattcagcattctacctgtggccgactgactgcatccttagctggagatttgcctaatgtgtgaatgcactgcttcagaattggtttctagatgagggtgaacttcaggaagccttttctgctccatgagagctgctcttttcaccggacggaggagagcagggtgaagtgcagtctgagtgctagtggtcgcctcctgcagtgtgggagatgagacagagcaccaggtgaatggagggcgtcggaaactaagctcgcaagtgctcttctctggtagcagaagagtagtgtccatggttcccttcccacatagagaagttttccttgttccatatcctttggtgcagggtctggctgctggacttccccaaaggaccaacccttacattctctcgtagctactgttttctctctgaggcttgtaactcacacagatagacaggactgaaccagtgcctcctgaggagttgggactgaagggaccatctccaacccatgaagaaatagagatggcttctttttttttttaaatttcaaaataggcagaagcagccatgcccctgtgtctagttgatgtcgtctgtggaaagctgtgcctgtgcctgcgggagcagtgggcctatgctcggtgcctgttgacgctgtcactcctgtgatcagcaggtctcccacagcacgtggcagatgcggcaaagccgtggggcatctatgagtgagtgtctccttcagaagaatccgattgctgtccgcaggtcactgagtgtctgatgcatactcactattaccatgagggcacccctagtgttacttctgaagaagaatgcagaagccacaaagtgtactgtacctcaccagtgttactgtggttctttgttccatttcactgaagctgcacacttgttgggcagaaagataagtagcaagaaaagtaataaaatgtgctttttctaaatgttctttcatactgtagacaatactggagactgttacccaaggaggatgtgatgagctgctggcagttcactgactcccaggctgctgcttgctttctatgtatgcatgtccctggagagaggctccctcctccctctgcctgggacaggcgtttccccgtggctgatgcagcatactgtacacagggttttttttcttgtggtataggatgctctctgcattgaagtgcacccctttctgatgatcagatggtatttttatgaagctatttattttgtgtgagtttgcatgtatttatcagaatgtcatttctgttctcagtgttctgctagcattgtaggcggcttgaacgctgagcctaatgtctatagtattaccttaagttaaatgtgtagagcgtaaatgtttgtatatgtcaaagaatggtaactgttatgactgtagatttttcaattttttttcttattgattttattataaaccaagaaatgtatttctctggaaaacaggttctctcttagataagtaaaaccatgctaaaatatctcaacaacatatactgcttttgtaataagaaaataaagttatttttaattaaaaggtacaatgaaattttcaattcgcatgcaaaaacacatcatttgatacattacatatgcacaaaatattaacattttccaaaatgtacttgaaagtttattaaggatgtttgaaattattaaatggtatctgtttccaaaaaaaaaaaaaaaaaaa

SEQ ID NO: 11796 - protein, 557 aa, Rattus norvegicus
  ref <308>: DATABASE ACCESSION NUMBER: SWISS-Prot / AAB29678
  ref <309>: DATABASE ENTRY DATE: 2002-06-15
MSENSTFSTEDSSSSSYKPHASNLRRAGKKCSWASYMTNSPTLIVMIGLPARGKTYVSKKLTRYLNWIGVPTKVFNLGVYRREAVKSYKSYDFFRHDNEEAMKIRKQCALVALEDVKAYFTEESGQIAVFDATNTTRERRDMILNFAKQNAFKVFFVESVCDDPDVIAANILEVKVSSPDYPERNRENVMEDFLKRIECYKVTYQPLDPDNYDKDLSFIKVMNVGQRFLVNRVQDYIQSKIVYYLMNIHVHPRTIYLCRHGESEFNLLGKIGGDSGLSLRGKQFAQALKKFLEEQEIQDLKVWTSQLKRTIQTAESLGVTYEQWKILNEIDAGVCEEMTYSEIEQRYPEEFALRDQEKYLYRYPGGESYQDLVQRLEPVIMELERQGNVLVISHQAVMRCLLAYFLDKGADELPYLRCPLHIIFKLTPVAYGCKVETITLNVEAVDTHRDKPTHNFPKSQTPVRMRRNSFTPLSSSNTIRRPRNYSVGSRPLKPLSPLRALDMQEGADQPKTQVQQGSAQATEHLQKALEFANGHREVENVLAKHRRPSMASLTLLS

SEQ ID NO: 11797 - DNA, 746 bp, Rattus norvegicus
  ref <308>: DATABASE ACCESSION NUMBER: EMBL / S71021
  ref <309>: DATABASE ENTRY DATE: 2000-07-30
ccatgtattccagaaaggccttgtacaaaaggaaatactctgctgccaagacaaaggttgagaagaagaagaagaaagaaaaggtccttgctaccgtcacaaaaacagttggtggggacaagaacggtggcacccgggtggtgaagcttcgaaaaatgcctaggtattaccctactgaagacgtgcctcggaagctgctgagccacggcaagaagcccttcagccagcacgtgaggaggctgcgctccagcatcactcccgggactgtcctgatcatcctcactgggcgccacaggggcaagagagtggttttcctcaagcagctgggcagtggcttgctacctgtgactggacctcttgcctcaacagagttcctctgcgtaggacacaccagaagtttgtcatcgccacctctacaaaagttgatatcagcaaggttaaaattccaacacctgactgatgcttacttcaagaagaagccacttcgcaagcccaggcatcaggagggtgagatcttcgacacagagaaggagaaatacgaaattacagagcagcgaaaggctgatcagaaagctgtgactcgcagattttgccaaagatcaaagctgtcccccagctcgagggcctacctgcggtctcagttctccctgacgaacggcatgtaccctcacaaactggtgttctaattgttaacaacctaataaaactgcttcataaagaaaaaaaaaaaaaaaaaaaaaaaaaaa

SEQ ID NO: 11798 - protein, 296 aa, Rattus norvegicus; identical to SEQ ID NO: 4444
  ref <308>: DATABASE ACCESSION NUMBER: SWISS-Prot / AAB30818
  ref <309>: DATABASE ENTRY DATE: 2001-10-16

SEQ ID NO: 11799 - DNA, 926 bp, Homo sapiens
  ref <308>: DATABASE ACCESSION NUMBER: EMBL / X69391
  ref <309>: DATABASE ENTRY DATE: 1993-03-31
cttaattctctttcccatcttgcaagatggcgggtgaaaaagttgagaagccagatactaaagagaagaaacccgaagccaagaaggttgatgctggtggcaaggtgaaaaagggtaacctcaaagctaaaaagcccaagaaggggaagcccccattgcagccgcaaccctgtccttctcagaggaattggcaggtattcccgatctgccatgtatccagaaaggccatgtacaagaggaagtactcagccgctaaatccaaggttgaaaagaaaaagaaggagaaggttctcgcaactgttacaaaaccagttggtggtgacaagaacggcggtacccgggtggttaaacttcgcaaaatgcctagatattatcctactgaagatgtgcctcgaaagctgttgagccacggcaaaaaacccttcagtcagcacgtgagaaaactgcgagccagcattacccccgggaccattctgatcatcctcactggacgccacaggggcaagagggtggttttcctgaagcagctggctagtggcttattacttgtgactgacctctggtcctcaatcgaggttcctctacgaagaacacaccagaaatttgtcattgccacttcaaccaaaatcgatatcagcaatgtaaaaatcccaaaacatcttactgatgcttacttcaagaagaagaagctgcggaagcccagacaccaggaaggtgagatcttcgacacagaaaaagagaaatatgagattacggagcagcgcaagattgatcagaaagctgtggactcacaaattttaccaaaaatcaaagctattcctcagctccagggctacctgcgatctgtgtttgctctgacgaatggaatttatcctcacaaattggtgttctaaatgtcttaagaacctaattaaatagctgactac

SEQ ID NO: 11800 - protein, 287 aa, Homo sapiens
  ref <308>: DATABASE ACCESSION NUMBER: SWISS-Prot / Q02878
  ref <309>: DATABASE ENTRY DATE: 2002-06-15
AGEKVEKPDTKEKKPEAKKVDAGGKVKKGNLKAKKPKKGKPHCSRNPVLVRGIGRYSRSAMYSRKAMYKRKYSAAKSKVEKKKKEKVLATVTKPVGGDKNGGTRVVKLRKMPRYYPTEDVPRKLLSHGKKPFSQHVRKLRASITPGTILIILTGRHRGKRVVFLKQLASGLLLVTGPLVLNRVPLRRTHQKFVIATSTKIDISNVKIPKHLTDAYFKKKKLRKPRHQEGEIFDTEKEKYEITEQRKIDQKAVDSQILPKIKAIPQLQGYLRSVFALTNGIYPHKLVF

SEQ ID NO: 11801 - DNA, 491 bp, Rattus norvegicus
  ref <308>: DATABASE ACCESSION NUMBER: EMBL / S79214
  ref <309>: DATABASE ENTRY DATE: 2000-08-16
cccggccaagcagtcatgcctgatggcttcacaaagagcggacagagacccaggctttctgggatgcctcttgtcagtgctaaccagggggtaacaggcatgccggtgtccgcttttactgtgattctttccaaagcttacccagcggtagggtgctcccatcccatttatgagatcttgtacaacaggcagcagcactatgacccaagatctggaatctttacctgtaagatcccaggcatatactatttctcctatcacatccatgtgaaagggactcacgtttgggtaggcctgtataagaacggcacgcctacaatgtacacgtatgatgagtacagcaaaggctaccttggttcagcttcagggagtgcaatcatggagctcacggaaaatgaccaggtgtggctccagttgcccaatgcggaatcgaacggcctctactcctctgagtatgtccactcgtccttctcaggattcctagtggctcc

SEQ ID NO: 11802 - DNA, 3226 bp, Homo sapiens
  ref <308>: DATABASE ACCESSION NUMBER: EMBL / X60382
  ref <309>: DATABASE ENTRY DATE: 1993-03-11
aatccatctgagaatatgctgccacaaataccctttttgctgctagtatccttgaacttggttcatggagtgttttacgctgaacgataccaaacgcccacaggcataaaaggcccactacccaacaccaagacacagttcttcattccctacaccataaagagtaaaggtatagcagtaagaggagagcaaggtactcctggtccaccaggccctgctggacctcgagggcacccaggtccttctggaccaccaggaaaaccaggctacggaagtcctggactccaaggagagccagggttgccaggaccaccgggaccatcagctgtagggaaaccaggtgtgccaggactcccaggaaaaccaggagagagaggaccatatggaccaaaaggagatgttggaccagctggcctaccaggaccccggggcccaccaggaccacctggaatccctggaccggctggaatttctgtgccaggaaaacctggacaacagggacccacaggagccccaggacccaggggctttcctggagaaaagggtgcaccaggagtccctggtatgaatggacagaaaggggaaatgggatatggtgctcctggtcgtccaggtgagaggggtcttccaggccctcagggtcccacaggaccatctggccctcctggagtgggaaaaagaggtgaaaatggggttccaggacagccaggcatcaaaggtgatagaggttttccgggagaaatgggaccaattggcccaccaggtccccaaggccctcctggggaacgagggccagaaggcattggaaagccaggagctgctggagccccaggccagccagggattccaggaacaaaaggtctccctggggctccaggaatagctgggcccccagggcctcctggctttgggaaaccaggcttgccaggcctgaagggagaaagaggacctgctggccttcctgggggtccaggtgccaaaggggaacaagggccagcaggtcttcctgggaagccaggtctgactggaccccctgggaatatgggaccccaaggaccaaaaggcatcccgggtagccatggtctcccaggccctaaaggtgagacagggccagctgggcctgcaggataccctggggctaagggtgaaaggggttcccctgggtcagatggaaaaccagggtacccaggaaaaccaggtctcgatggtcctaagggtaacccagggttaccaggtccaaaaggtgatcctggagttggaggacctcctggtctcccaggccctgtgggcccagcaggagcaaagggaatgcccggacacaatggagaggctggcccaagaggtgcccctggaataccaggtactagaggccctattgggccaccaggcattccaggattccctgggtctaaaggggatccaggaagtcccggtcctcctggcccagctggcatagcaactaagggcctcaatggacccaccgggccaccagggcctccaggtccaagaggcccctctggagagcctggtcttccagggccccctgggcctccaggcccaccaggtcaagcagtcatgcctgagggttttataaaggcaggccaaaggcccagtctttctgggacccctcttgttagtgccaaccagggggtaacaggaatgcctgtgtctgcttttactgttattctctccaaagcttacccagcaataggaactcccataccatttgataaaattttgtataacaggcaacagcattatgacccaaggactggaatctttacttgtcagataccaggaatatactatttttcataccacgtgcatgtgaaagggactcatgtttgggtaggcctgtataagaatggcacccctgtaatgtacacctatgatgaatacaccaaaggctacctggatcaggcttcagggagtgccatcatcgatctcacagaaaatgaccaggtgtggctccagcttcccaatgccgagtcaaatggcctatactcctctgagtatgtccactcctctttctcaggattcctagtggctccaatgtgagtacaccccacagagctaatctaaatcttgtgctagaaaaagcattctctaactctaccccaccctacaaaatgcatatggaggtaggctgaaaagaatgtaatttttattttctgaaatacagatttgagctatcagaccaacaaaccttccccctgaaaagtgagcagcaacgtaaaaacgtatgtgaagcctctcttgaatttctagttagcaatcttaaggctctttaaggttttctccaatattaaaaaatatcaccaaagaagtcctgctatgttaaaaacaaacaacaaaaaacaaagcaacaaaaaaaaaaattaaaaaaaaaaacagaaatagagctctaagttatgtgaaatttgatttgagaaactcggcatttcctttttaaaaaagcctgtttctaactatgaatatgagaacttctaggaaacatccaggaggtatcatataactttgtagaacttaaatacttgaatattcaaatttaaaagacactgtatcccctaaaatatttctgatggtgcactactctgaggcctgtatggcccctttcatcaatatctattcaaatatacaggtgcatatatacttgttaaagctcttatataaaaaagccccaaaatattgaagttcatctgaaatgcaaggtgctttcatcaatgaaccttttcaaaacttttctatgattgcagagaagctttttatatacccagcataacttggaaacaggtatctgacctattcttatttagttaacacaagtgtgattaatttgatttctttaattccttattgaatcttatgtgatatgattttctggatttacagaacattagcacatgtaccttgtgcctcccattcaagtgaagttataatttacactgagggtttcaaaattcgactagaagtggagatatattatttatttatgcactgtactgtatttttatattgctgtttaaaacttttaagctgtgcctcacttattaaagcacaaaatgttttacctactccttatttacgacacaataaaataacatcaatagatttttaggctgaattaatttgaaagcagcaatttgctgttctcaaccattctttcaaggcttttcattcgacacaataaaataacatcaatagatttttagggatgggtggcttt

SEQ ID NO: 11803 - protein, 680 aa, Homo sapiens
  ref <308>: DATABASE ACCESSION NUMBER: SWISS-Prot / Q03692
  ref <309>: DATABASE ENTRY DATE: 2001-10-16
MLPQIPFLLLVSLNLVHGVFYAERYQMPTGIKGPLPNTKTQFFIPYTIKSKGIAVRGEQGTPGPPGPAGPRGHPGPSGPPGKPGYGSPGLQGEPGLPGPPGPSAVGKPGVPGLPGKPGERGPYGPKGDVGPAGLPGPRGPPGPPGIPGPAGISVPGKPGQQGPTGAPGPRGFPGEKGAPGVPGMNGQKGEMGYGAPGRPGERGLPGPQGPTGPSGPPGVGKRGENGVPGQPGIKGDRGFPGEMGPIGPPGPQGPPGERGPEGIGKPGAAGAPGQPGIPGTKGLPGAPGIAGPPGPPGFGKPGLPGLKGERGPAGLPGGPGAKGEQGPAGLPGKPGLTGPPGNMGPQGPKGIPGSHGLPGPKGETGPAGPAGYPGAKGERGSPGSDGKPGYPGKPGLDGPKGNPGLPGPKGDPGVGGPPGLPGPVGPAGAKGMPGHNGEAGPRGAPGIPGTRGPIGPPGIPGFPGSKGDPGSPGPPGPAGIATKGLNGPTGPPGPPGPRGHSGEPGLPGPPGPPGPPGQAVMPEGFIKAGQRPSLSGTPLVSANQGVTGMPVSAFTVILSKAYPAIGTPIPFDKILYNRQQHYDPRTGIFTCQIPGIYYFSYHVHVKGTHVWVGLYKNGTPVMYTYDEYTKGYLDQASGSAIIDLTENDQVWLQLPNAESNGLYSSEYVHSSFSGFLVAPM

SEQ ID NO: 11804 - DNA, 185 bp, Rattus norvegicus
  ref <308>: DATABASE ACCESSION NUMBER: EMBL / S82579
  ref <309>: DATABASE ENTRY DATE: 2002-01-28
aataaaatatgtgtcatccattctttttgagtaaggtgatatttattgattctctgttgacaaaacctaaatatttctctacttgtacagagtgttaatcttctcactttcttctacagtagtttctatcatatgttttattaatagcatcagaaaatcatgggctggtgggatggttcttccaa

SEQ ID NO: 11805 - DNA, 2533 bp, Rattus norvegicus; identical to SEQ ID NO: 7927
  ref <308>: DATABASE ACCESSION NUMBER: EMBL / U01344
  ref <309>: DATABASE ENTRY DATE: 2000-03-04

SEQ ID NO: 11806 - protein, 290 aa, Rattus norvegicus; identical to SEQ ID NO: 7928
  ref <308>: DATABASE ACCESSION NUMBER: SWISS-Prot / P50297
  ref <309>: DATABASE ENTRY DATE: 2001-10-16

SEQ ID NO: 11807 - DNA, 1606 bp, Homo sapiens; identical to SEQ ID NO: 7929
  ref <308>: DATABASE ACCESSION NUMBER: EMBL / U80835
  ref <309>: DATABASE ENTRY DATE: 1999-07-05

SEQ ID NO: 11808 - protein, 291 aa, Homo sapiens; identical to SEQ ID NO: 7930
  misc_feature (1)..(291): Xaa=Unknown amino acid

SEQ ID NO: 11809 - DNA, 607 bp, Rattus norvegicus
  ref <308>: DATABASE ACCESSION NUMBER: EMBL / U04835
  ref <309>: DATABASE ENTRY DATE: 2000-03-04
ggatccgtatgaccatggaaacagttgaatcacagcaggatcgaagtgtaacacattctgtggcagagcatagctccttgcatatgcagactggccaaatttctgtccctactctagctcaggatgaggagactgaccttgccccaagtcacatggctgctgccacaggtgacatgccaacttaccagatccgagctcctactactgctttgccacaaggtgtggtgatggctgcctcaccagggagtctgtacagtccccagcaactagcagaagaagcaactcgaaagcgggagctgaggctgatgaaaaacagggaagctgcccgggagtgtcgcaggaagaagaaagaatatgtcaaatgtcttgaaaatcgtgtggctgtgcttgaaaatcaaaacaagaccctcattgaggaactcaaggccctcaaagacctttattgccataaagcagagtaactgtgtttgacttggacctggttgactgtgaactctaatcggggcaggcgatgcagcatcctcgtaatggccatatggacttgtagatgggtctcttaacccttgcttaagaatacagtctgctgtagagtgtgaattgggaattc

SEQ ID NO: 11810 - protein, 151 aa, Rattus norvegicus
  misc_feature (1)..(151): Xaa=Unknown amino acid
MTMETVESQQDRSVTHSVAEHSSLHMQTGQISVPTLAQDEETDLAPSHMAAATGDMPTYQIRAPTTALPQGVVMAASPGSLYSPQQLAEEATRKRELRLMKNREAARECRRKKKEYVKCLENRVAVLENQNKTLIEELKALKDLYCHKAEX

SEQ ID NO: 11811 - DNA, 1199 bp, Homo sapiens
  ref <308>: DATABASE ACCESSION NUMBER: EMBL / D14826
  ref <309>: DATABASE ENTRY DATE: 1999-01-21
tggaacactttatgttgaactgtggtagaggaaacaagacagttctgtctgcagaagcccattatggctgtaactggagatgacacagatgaggaaactgaacttgccccaagtcacatggctgctgccactggtgacatgccaacttaccagatccgagctcctactgctgctttgccacagggagtggtgatggctgcatcgcccggaagtttgcgcagtccccagcagctggcagaagaagcaacacgcaaacgagagctgaggctaatgaaaaacagggaagctgcccgggagtgtcgcaggaagaagaaagaatatgtcaaatgtcttgaaaatcgtgtggctgtgcttgaaaaccaaaacaagactctcattgaggaactcaaggccctcaaagatctttattgccataaagtagagtaactgtctttgacttggaccttgtttactctaactaaggcaggagatgcagcagtcctacttattgccatgtggacttgtgggaaggacacgtgtgacctaagaatccagtttggattagtgtttgaaattgaattgggaatgttgttccaggatgtggaatgcagccgtgatcacacttaccgagcttactttgatctgtttgtcaatagcatgcaaaaaagctttgtttgccctttgcttctgctttttttcagggaagctgccaaagaatgtcgacgtcgaaagaaagaatatgtaaaatgtctggagagccgagttgcagtgctggaagtccagaacaagaagctgatagaggaacttgaaaccttgaaagacatttgttctcccaaaacagattactagaaattatttaactatgaactgaaggcagcatgtatagttgcttttgaaggaatacaatatatagctggcaagaatggtggcttcttttctttgtatcattcatcttcttctttaatcattcatcttcttctttaatcacttaacattcctaaaaatgcttcactgtacgtagttaagtcgtagctataacttcaaattttttaaaagggacaaactgtaaaaaatgtgtgtattcttaaaatgcaatatttgtaaggcttgttccaatgccacatacttgcagctcccattctatgtgtcatcaatagtgtcctatgcaataaattatttgcaggtctttaaatcattttaggaaggatgacaaaataagt

SEQ ID NO: 11812 - protein, 121 aa, Homo sapiens
  misc_feature (1)..(121): Xaa=Unknown amino acid
MAVTGDDTDEETELAPSHMAAATGDMPTYQIRAPTAALPQGVVMAASPGSLRSPQQLAEEATRKRELRLMKNREAARECRRKKKEYVKCLENRVAVLENQNKTLIEELKALKDLYCHKVEX

SEQ ID NO: 11813 - DNA, 1589 bp, Rattus norvegicus; identical to SEQ ID NO: 7992
  ref <308>: DATABASE ACCESSION NUMBER: EMBL / U06230
  ref <309>: DATABASE ENTRY DATE: 2000-03-04

SEQ ID NO: 11814 - DNA, 3309 bp, Homo sapiens; identical to SEQ ID NO: 7993
  ref <308>: DATABASE ACCESSION NUMBER: EMBL / M15036
  ref <309>: DATABASE ENTRY DATE: 2000-03-04

SEQ ID NO: 11815 - protein, 676 aa, Homo sapiens; identical to SEQ ID NO: 7994
  ref <308>: DATABASE ACCESSION NUMBER: SWISS-Prot / P07225
  ref <309>: DATABASE ENTRY DATE: 2002-06-15

SEQ ID NO: 11816 - DNA, 4964 bp, Rattus norvegicus; identical to SEQ ID NO: 8041
  ref <308>: DATABASE ACCESSION NUMBER: EMBL / U09540
  ref <309>: DATABASE ENTRY DATE: 2000-03-04

SEQ ID NO: 11817 - protein, 543 aa, Rattus norvegicus; identical to SEQ ID NO: 7047
  ref <308>: DATABASE ACCESSION NUMBER: SWISS-Prot / Q64678
  ref <309>: DATABASE ENTRY DATE: 2002-06-15

SEQ ID NO: 11818 - DNA, 5102 bp, Homo sapiens; identical to SEQ ID NO: 7048
  ref <308>: DATABASE ACCESSION NUMBER: EMBL / U03688
  ref <309>: DATABASE ENTRY DATE: 2000-03-04

SEQ ID NO: 11819 - protein, 543 aa, Homo sapiens; identical to SEQ ID NO: 7049
  ref <308>: DATABASE ACCESSION NUMBER: SWISS-Prot / Q16678
  ref <309>: DATABASE ENTRY DATE: 2002-06-15

SEQ ID NO: 11820 - DNA, 1723 bp, Rattus norvegicus; identical to SEQ ID NO: 8102
  ref <308>: DATABASE ACCESSION NUMBER: EMBL / U11685
  ref <309>: DATABASE ENTRY DATE: 2000-03-04

SEQ ID NO: 11821 - protein, 445 aa, Rattus norvegicus; identical to SEQ ID NO: 8103
  ref <308>: DATABASE ACCESSION NUMBER: SWISS-Prot / Q62685
  ref <309>: DATABASE ENTRY DATE: 2001-10-16

SEQ ID NO: 11822 - DNA, 1524 bp, Homo sapiens; identical to SEQ ID NO: 8104
  ref <308>: DATABASE ACCESSION NUMBER: EMBL / BC008819
  ref <309>: DATABASE ENTRY DATE: 2001-07-13

SEQ ID NO: 11823 - protein, 447 aa, Homo sapiens; identical to SEQ ID NO: 8105
  ref <308>: DATABASE ACCESSION NUMBER: SWISS-Prot / Q13133
  ref <309>: DATABASE ENTRY DATE: 2002-06-15

SEQ ID NO: 11824 - DNA, 1421 bp, Rattus norvegicus
  ref <308>: DATABASE ACCESSION NUMBER: EMBL / U12187
  ref <309>: DATABASE ENTRY DATE: 2000-03-04
aaggttgcagacgtgacagagacaaggctccgagtctgaacaggggtctgcgagtgggtctatctgattccccagtggtctgtgccgcagcgctgatcaagtgctgatagcatctgtgcaagagtcgacggcgattccgacacgatgaccctgaatggaggcagcggagcgggcggcagccgtagcgcgggccgggagcgcgaccgtcgtcgaggcagcaccccatggggcccggcacccccactgcaccgcaggagcatgccggtggacgagcgagaccttcaggcggcgctaaccccgggctccctggcagcgactgcagctggaactcggacacaggggcagaggctggactggcctgaaggctcctccgattcgctcagttctggagacagcggctcagaggatggcgtttacaaggtgcatgctgctggggcgcctggtgtgggcaagagtgctctggcgcgcatctttggtggagtagaagacggacctgaagcagaagctgcagggcacacatatgaccgttctatcactgtggatggagaagaagcatcactaatggtctatgacatttgggaacaggatggaggctgctggctgcctggccactgcatggccatgggggatgcatatgtcattgtgtactcaataacggacaagggcagctttgagaaagcctcagaactccgggtccagctgcgcgcacgcagacagacagatgtgcccatcatcctagtgggcaacaagagcgatcttgtgcgctctcgtgaggtctctgtggatgagggccgggcttgcgcagaggtcttcgactgcaagttcatcgagacctccgcagcactgcatcacaacgtccaggcactgttcgagggtgttgtgcgtcagatacgcctgcgcagggacagcaaagaggataatgctcgtcgacaagctggcactcgacgacgggagagccttggcaagaaggccaaactctttctgggccgcatagtagctcgcaacagccgcaagatggcctttctggccaagtccaagtcctgccatgacctctctgttctctaagcccaacggcccccttgtttgtgggtcagcagatggatggaaggctgcccagccaactgctctaaatgtctcagagttggcccaccctccggtatttctcagaactgtcaactatgcacagcctgtctcacggtcatggacagatagtgctgaccagggaggcaactccaaacgccatcgagcctgggcctatggagatgcatgtgcaggcccacgtgcataccgagcagcctgaaccctgctcttggacaggactctgcctttctccatgtgggtgtctgcctggagggaggctgttctatatgcttgctgtttgtttacatgcagctttttgtaataaagactatttcctgaca

SEQ ID NO: 11825 - protein, 268 aa, Rattus norvegicus
  ref <308>: DATABASE ACCESSION NUMBER: SWISS-Prot / P55043
  ref <309>: DATABASE ENTRY DATE: 1996-10-01
MPVDERDLQAALTPGSLAATAAGTRTQGQRLDWPEGSSDSLSSGDSGSEDGVYKVHAAGAPGVGKSALARIFGGVEDGPEAEAAGHTYDRSITVDGEEASLMVYDIWEQDGGCWLPGHCMAMGDAYVIVYSITDKGSFEKASELRVQLRARRQTDVPIILVGNKSDLVRSREVSVDEGRACAEVFDCKFIETSAALHHNVQALFEGVVRQIRLRRDSKEDNARRQAGTRRRESLGKKAKLFLGRIVARNSRKMAFLAKSKSCHDLSVL

SEQ ID NO: 11826 - DNA, 1443 bp, Homo sapiens
  ref <308>: DATABASE ACCESSION NUMBER: EMBL / L24564
  ref <309>: DATABASE ENTRY DATE: 1999-07-02
gtggctgcagcagcagcggcggcggaaaccctaaagtccgagtccggactacgagtgcgtggcctcctaatccggatcctagtcctgagcgtgtctgtgtgcgagtggacggtcccggacgcgatgaccctgaacggcggcggcagcggagcgggcgggagccgcggtgggggccaggagcgcgagcgccgtcggggcagcacaccctggggccccgccccgccgctgcaccgccgcagcatgccggtggacgagcgcgacctgcaggcggcgctgaccccgggtgccctgacggcggccgcggccgggacggggacccagggtcccaggctggactggcccgaggactccgaggactcgctcagctcagggggcagcgactcagacgagagcgtttacaaggtgctgctgctgggggcgcccggcgtgggcaagagcgccctggcgcgcatcttcggcggtgtggaggacgggcctgaagcagaggcagcagggcacacctatgatcgctccattgtagtggacggagaagaggcatcactcatggtctacgacatttgggagcaggacgggggccgctggttgcccggccactgcatggccatgggggatgcctatgtcattgtgtactcagtgacggacaagggcagcttcgagaaggcctcagaactgcgggtccagctgcggcgtgcacggcaaacagatgatgtgcccatcatcctcgtgggcaacaagagcgacctggtgcgctctcgtgaggtctcggtggatgagggccgggcctgcgcggtggtctttgactgcaagttcattgagacatcagcggcattgcaccacaatgtccaggcgctgtttgaaggtgtcgtgcgccagatacgcctgcgcagggacagcaaagaagccaacgcacgacggcaagcaggcacccggaggcgagagagccttggcaaaaaggcgaagcgcttcttgggccgcatcgtagctcgtaacagccgcaagatggcctttcgcgccaaatccaagtcctgccacgacctctcggttctctaggtcccacccgctcccactatggtgggagacgaacggaagggttggtgggctggcccagccaactgccccgggtgcctcagagcaggctcagactctgggtccctcggagctgccagccgggcacccccaacctcatggtcatggacagatagacagtgctgccctgcgaagtggctctcaggggccagtgagggctgggcccacagagatgcatgcgcaggctcatatgcgtcccaagcagccgcagcgcagccgccgggcaggcctgcgtgccgggagaggactctgccttttttcacagcccgggtgtgcctgccctggagggaggctcttcagtgcggtagctacttgtttacatgcagatttttgtaataaaggctatttcctgataaa

SEQ ID NO: 11827 - protein, 269 aa, Homo sapiens [sequence omitted]

SEQ ID NO: 11828 - DNA, 2060 bp, Rattus norvegicus; identical to SEQ ID NO: 8130
  ref <308>: DATABASE ACCESSION NUMBER: EMBL / U14398
  ref <309>: DATABASE ENTRY DATE: 2000-03-04

SEQ ID NO: 11829 - protein, 425 aa, Rattus norvegicus; identical to SEQ ID NO: 8131
  ref <308>: DATABASE ACCESSION NUMBER: SWISS-Prot / P50232
  ref <309>: DATABASE ENTRY DATE: 2001-10-16

SEQ ID NO: 11830 - DNA, 6471 bp, Homo sapiens; identical to SEQ ID NO: 8132
  misc_feature (1)..(6471): n=a, c, g or t
  ref <308>: DATABASE ACCESSION NUMBER: EMBL / X96783
  ref <309>: DATABASE ENTRY DATE: 1997-06-02

SEQ ID NO: 11831 - protein, 386 aa, Homo sapiens; identical to SEQ ID NO: 8133
  misc_feature (1)..(386): Xaa=Unknown amino acid
  ref <308>: DATABASE ACCESSION NUMBER: SWISS-Prot / O00445
  ref <309>: DATABASE ENTRY DATE: 2002-06-15

SEQ ID NO: 11832 - DNA, 4300 bp, Rattus norvegicus
  ref <308>: DATABASE ACCESSION NUMBER: EMBL / U15138
  ref <309>: DATABASE ENTRY DATE: 2000-03-04
gcaagatggcgccggtgggggtggagaagaagctgctgctgggtcccaacgggcccgcagtggcggctgccggcgacctgaccagtgaagaggaggaaggccagagtctatggtcttcgatcttgagcgaagtgtccacccgcgccaggtccaagctgccgtccggcaagaacattctggtgttcggtgaagatggttctggtaaaacaactctcatgaccaaactccaaggagcagagcacggcaaaaaaggaagaggcttagagtatctttacctcagcgttcatgatgaggaccgtgatgatcacacgcgctgcaatgtatggattttggatggagacctttaccacaaaggcctgctgaaatttgcagtttccgcggagtctttgcgggagaccctggtcatttttgttgcagacatgtctagaccttggactataatggaatctctacagaaatgggctagtgttttacgggagcacattgacaagatgaaaattccaccagaggaaatgagggatctggaacggaagtttatgaaagattttcaagattatatcgagcctgaagaaggttgtcagggttccccacagagaagagggcctctgacctcaggctcagatgaagacaatgttgccctccctctgggtgacaatgtgctgactcataacctggggatcccagtgttggttgtgtgcacaaagtgtgatgcagtgagcatcttggagaaggagcacgattaccgagacgagcacctggacttcatccaggcgcatctgcggggattctgcctccagtatggagctgccttgatttacacctcagtgaaggaagagaaaaaccttgacttgctgtataagtacattgttcataaaacatacggcttccacttcaccatacccgccttagttgtggaaaaggacgcagtttttatacctgcaggatgggacaatgaaaagaaaatagctattttacatgaaaattttacaaccgtgaagccagaagatgcatatgaagattttattgtaaagcctcctgtgagaaagctggtccatgacaaagagttggcagctgaggatgagcaggtgttcctgatgaaacaacaggaatcccctgccagaggaccctctggctctccaaggacgcagggtcggggtggaccagctagtgtaccaagcgcctccccaggaacatcagtaaagaagccagatccaaacatcaaaaataatgcagcaagtgaaggggtattggccagcttcttcaatagtctgttgagtaaaaagacaggctctcctggaagtcccagtgctggtggagtgcagagcacagccaagaagtcaggtacagaaggagagccccagagcttcagatccttaacagaacagtgctgtcaaacaggacaaaagactgtgttgtcaaacgttcaggaagaactggatagaatgactcgaaaaccagactccatggtaacgaactcttcaacagaaaacgaagcctgaccctcctttgaaagtgcatatgtcaaatgaccaaatacctatgtatattcatctgataagaccaggatttttctgatatggcacatgctatcagtttttggggtaggggagatgaactttaaaaaaatacatatacttcattggcttgtccgagtgtgaagtgcacatttaggacggttttgtgtcaggccccttgttagggacgtcccttggactcttgggctgcgattctcttgtgggaagtaagcgcagctgggcttgtagagtggagagaggaggcccactttctgtcagagtggagcgaacgagactaggaagtcagatggatggtttgaccagttgcgtgttagcaaattcacttgttcttgggaagcaggttaagtagcagaaagtcaggaaagagaaaggttcaagaaggacaagagaagtgcttgtggggaagctgatggttgaaggagatggaggaaagaagtgagtgagcgagagagcagcattaatgagtacgtacatgcacagtagaaaccaaatagcatcagttaagacctaacaattagaaacatttccaagctaagcactaaacagaatgggaactggacttgttctgattgcatctttaagttatgggaaatgtgttttatttgtggtgcctcaggaaggtgggctgactcgagtggtgaagcccgcagctacccaggacccacatgcttggcccaggccatgtcccttgtccttgaaaagatgctgggctctatgcacaggtaacctggggcaggcggtcactgtgttatgttcaaagtcagcagatacaaaattagatattttaaatagttcctgttctgttttgtttaattgttactttaactaccacaggctggcaactaatagaaatgggtggttgattgctcattggaccggtattggcaatgtcctatagcaagtttgggggaagtatttactgtcactgtattctggctatttggcttgtgccagttgctgccttagagcctgtggtaactttccctgatacagaaaggttctttctgtagctccctggtcgaatcgttgctgacagaccgaaaagtgggtgctttacgtggagaatggaaggggtaggcttgtgtttgtcataaactgtagcgcttctcttacaggcgtgtgagttttacgtgtcttccattaggggcatgttcatgaacactgtcaagtcacaccaccatgctgaggataacctctgtagattggagacagcactttgagttttctgtgtgacacagcacatgtaaatgcaaacactaccatgactttaatgtataaaatatttgtcatccaaaccaaggggaaaaaccacagttcacttccgtggagtttacttttttatatgaatgtttgttgttgtgtctcggcataatgttcctaatgtcattacatacatgccagatttgactaaccactaacgtagttctgggcgtaagttaacatctcgttatgtgacgaggctcctcgactgggagtcactttgtaaaggtcggaacactgttaaggaggaagcagcgtgctaacttgcctctctaacaacaaaaagatgtttcttgtgccggttttactattgaaatatattttttccttttttaattcagtttttttgttgttattttgtttttatttttttaaacatgcattgtggcttcaaatgaccaggttgtccaggcgatgacaggaagctggctggagtagaaactgtggtaaaggatcacctgatctctgtagcagccagggcaaaatgagtgacctcagaaactaggaattcttgcaaagacatgtgcctaatagtgtgacttttaaattttgatacatttaaagtgtatcatttgaacggctaggcacttttggtgttggtgtcagttgtgctctaatcaacatgactcttctagaggagactgatgcatgttactgtgtgctcaggagttgccaaagtcaccagctttgggaagcttccaggttctttaggggtttgaggagatgaggtgatttttattattttaggattctcaagcattggaaccaaaggccaaataataaacagcctttactttttaaagtaaaattaattttatttgcaagaatacacttgtatggtagactataacagacaattttatgactatttatacacattataatgattacctctgtttgtctttaagtggataactttaagagcccaacctaaaaattatagcccaaatgagggctatgaattggtctttcctaaaaatccaacagatatgctgctagattattttgttttatttgcacttttttttttcttaaataacagagagggtttctttgtattgccctggctgtcctggaactcattctgtagaccaggctgccctccagagatccgcctgcttttgcctcccaagtgctgggattggcttgtgctactgtgcacagctgcaccttttttctcttttactttttttttaattggcgttttaaaaacagtattgaaactgaaaagactgtcttctgaacttggtgaaggtgaaagtgacctctgtacatcgtgaccttaacaatgctgatgctgtaagtgaaagttcactgttgtctctctgctaagttcattggtgtttttaacctaaaattaggactgcagatgatcgcccactagccttagtccaggatgtggctctgtctgggtgcagtatgcagtcatgtggaaccttgctttctagtgctgggggaaaagatgtctaactactggcttcaataaacaagaatccagactgcta

SEQ ID NO: 11833 - protein, 497 aa, Rattus norvegicus; identical to SEQ ID NO: 5382
  ref <308>: DATABASE ACCESSION NUMBER: SWISS-Prot / Q62698
  ref <309>: DATABASE ENTRY DATE: 2001-10-16

SEQ ID NO: 11834 - DNA, 1622 bp, Homo sapiens; identical to SEQ ID NO: 5383
  ref <308>: DATABASE ACCESSION NUMBER: EMBL / AF035812
  ref <309>: DATABASE ENTRY DATE: 2000-03-03

SEQ ID NO: 11835 - protein, 492 aa, Homo sapiens; identical to SEQ ID NO: 5384
  ref <308>: DATABASE ACCESSION NUMBER: SWISS-Prot / O43237
  ref <309>: DATABASE ENTRY DATE: 2001-10-16

SEQ ID NO: 11836 - DNA, 2488 bp, Rattus norvegicus; identical to SEQ ID NO: 8178
  ref <308>: DATABASE ACCESSION NUMBER: EMBL / U17254
  ref <309>: DATABASE ENTRY DATE: 2000-03-04

SEQ ID NO: 11837 - protein, 597 aa, Rattus norvegicus; identical to SEQ ID NO: 8179
  ref <308>: DATABASE ACCESSION NUMBER: SWISS-Prot / P22829
  ref <309>: DATABASE ENTRY DATE: 2000-05-30

SEQ ID NO: 11838 - DNA, 2481 bp, Homo sapiens; identical to SEQ ID NO: 8180
  ref <308>: DATABASE ACCESSION NUMBER: EMBL / D49728
  ref <309>: DATABASE ENTRY DATE: 1999-01-21

SEQ ID NO: 11839 - protein, 598 aa, Homo sapiens; identical to SEQ ID NO: 8181
  ref <308>: DATABASE ACCESSION NUMBER: SWISS-Prot / P22736
  ref <309>: DATABASE ENTRY DATE: 2001-10-16

SEQ ID NO: 11840 - DNA, 2452 bp, Rattus norvegicus
  ref <308>: DATABASE ACCESSION NUMBER: EMBL / U17901
  ref <309>: DATABASE ENTRY DATE: 2000-03-04
tgagctgctcgctaccgggccacgaactggacgtgaggggcctggtgtgctgcctctacccaccgggagcctttgtgtctgtgtcccgggatcgtaccacccgcctctgggctccagacagtcctaacaggggctttacagaaatgcactgtatgagcggccactctaattttgtgtcttgtgtgtgcatcataccctcaagtgacatatatcctcatggactaattgccactggaggaaatgaccacaatatttgcattttctcgctggacagtccgatgccactttatattttaaagggtcacaaagatactgtttgtagtctttcttctggaaaatttgggacattacttagtggctcatgggacaccactgctaaagtctggctgaatgacaaatgcatgatgacattacagggtcacacagctgcagtatgggcagtaaagattttacctgaacagggcttaatgttaactggatcagcagacaaaacaattaaactatggaaggccggaagatgtgagaggactttttcagggcatgaagactgtgtaagaggtttggcaattttgagtgaaacagaatttctttcctgtgcaaatgatgctagtattagaaggtggcagataactggcgagtgtcttggagtatactacggacatacaaattatatttatagcatatctgtctttccaaattgtagagattttgtgacaactgcagaagacagatctctaagaatatggaaacatggtgaatgtgcccaaacaatccgacttccagctcagtctatatggtgctgctgcgtactggacaatggtgacattgtggttggtgcgagtgatggtattattagagtgtttacagaggcagacgagcggacagccagtgccgaggaaatcaaggcttttgagagagagctctctcaggcaactatagactccaaaactggcgacttgggggacattaatgctgagcagcttcctgggagggaacatctgaatgagccaggtactagagaaggacagactcgtctaatcagagatggagagagagttgaagcctatcaatggagtgttagtgatggcaggtggataaaaattggtgatgttgttggctcatctggtgctaatcagcaaacatctggaaaagttttatatgaagggaaagaatttgattatgttttctccatcgatgtgaatgaaggcggaccatcatataaattaccatataatgtcagtgacgacccctggctggttgcatacaacttcttgcagaaaaatgatttgaatcccatgtttctggatcaggtggctaaatttattattgataacacaaaaggtcaaacactgggacttggaaataccagtttttcagacccatttacaggtggtggtcgctatgttccaggaacttcagggccttccaacacagtgcagacagcagatcctttcacaggtgctggtcgttatatgccagggtctgcagggatggataccaccatggctggagttgatccatttacaggaaatagtgcctaccgatcagctgcgtttaaaacagtgaatatttatttccccaaaaaagaagctcttaccttcgaccaagcaaaccctacacaaatattaggaaaactgaaggaacttaatggaagtgcacctgaagagaagaagctaactgaagatgacttggtacttctggaaaagatactgtccctgatttgtggtaatgcttcagaaaagccgacggcccagcagcttcaggttctgtggaaagccatcaactggcctgaagacattgtctttcccgcacttgacattcttcggctatcaattaagcatcccagtgtgaatgagaatttctgcaatgaaaaagaaggagaccagttcagcagccaccttatcaaccttctgaaccctaaaggaaagccagcaaaccagctgcttgctcttaggactttttgcaattgctttgttagtcaggcaggacaaaagctcatgatgtcccagagggagtcattgatgtcacatgcaatagaactgaaatccgggagcaataagaacatcatattgctctggctacactgaccttgaactattctgtttgtttccataaagaccataacattgaagggaaagcccaatgcttgtcagtgattagcacaatcttggaagttgtacaagacctagaagccacatttagactccttgtggctcttgggacacttatcagtgatgattcaaatgctatacaattagccaaatctttaggtgttgattctcaaataaaaaagtatgcttctgtatcagagccagctaaagtaagtgaatgctgtagacttgtcttaaatttgctgtagcagtggggaaaggaagctgaggggttttcttttttttgttttgttttgttttgtttttttccacattttacatgactgattggagatgattta

SEQ ID NO: 11841 - protein, 647 aa, Rattus norvegicus
  ref <308>: DATABASE ACCESSION NUMBER: SWISS-Prot / P54319
  ref <309>: DATABASE ENTRY DATE: 2001-10-16
MHCMSGHSNFVSCVCIIPSSDIYPHGLIATGGNDHNICIFSLDSPMPLYILKGHKDTVCSLSSGKFGTLLSGSWDTTAKVWLNDKCMMTLQGHTAAVWAVKILPEQGLMLTGSADKTIKLWKAGRCERTFSGHEDCVRGLAILSETEFLSCANDASIRRWQITGECLGVYYGHTNYIYSISVFPNCRDFVTTAEDRSLRIWKHGECAQTIRLPAQSIWCCCVLDNGDIVVGASDGIIRVFTEADERTASAEEIKAFERELSQATIDSKTGDLGDINAEQLPGREHLNEPGTREGQTRLIRDGERVEAYQWSVSDGRWIKIGDVVGSSGANQQTSGKVLYEGKEFDYVFSIDVNEGGPSYKLPYNVSDDPWLVAYNFLQKNDLNPMFLDQVAKFIIDNTKGQTLGLGNTSFSDPFTGGGRYVPGTSGPSNTVQTADPFTGAGRYMPGSAGMDTTMAGVDPFTGNSAYRSAAFKTVNIYFPKKEALTFDQANPTQILGKLKELNGSAPEEKKLTEDDLVLLEKILSLICGNASEKPTAQQLQVLWKAINWPEDIVFPALDILRLSIKHPSVNENFCNEKEGDQFSSHLINLLNPKGKPANQLLALRTFCNCFVSQAGQKLMMSQRESLMSHAIELKSGSNKNIILLWLH

SEQ ID NO: 11842 - DNA, 593 bp, Homo sapiens
  ref <308>: DATABASE ACCESSION NUMBER: EMBL / AV720153
  ref <309>: DATABASE ENTRY DATE: 2000-10-05
tttgctcttgttgcccaggctggagtgcaatggtgcaatcttggctcactgcaacctccgcttccgaggcacaagtgattctcctgcctcaacctcccacgtagcttggattacatgcatgcgccaccatgcccggctaatttttttgtatttagtagagacagggtttcattatctttttaaatgtattagatattaactcatcagaaaaattacattaactcaaattaatagcttaaatatactaatgtttttcaaatattttcatgcttgtaaacttctgagaaaaaaaatctgagcaaataaaaagcaatgatattataaaacttgtctaccctgatcttacctgaaaaagtcctctcacatcttccagccttccacagtttaacagtcttgtctgctgatccagtcaacattaagccctgttcaggtaagatctttaccgcccacactgcagctgtatgaccctgtgagtaaaatgagtatcaatttaagttgccacagaatcattcaacttaattattctttagaatatttacacagaactactgtacctgcaaggtcatcatgcacttgtcattcagccagacttt

SEQ ID NO: 11843 - DNA, 3204 bp, Rattus norvegicus
  ref <308>: DATABASE ACCESSION NUMBER: EMBL / U22830
  ref <309>: DATABASE ENTRY DATE: 2000-03-04
gaattcgccgccgcctgacttcatggactgcgagcggggtgaagggtagctccagggtccgcggccaagagctctcccaaggctgagtgcgggctgagaatgcggccggaagaagagtcgcggcgtccccggtgacggtccggagttgcaaggtagggagtaggcagatggccaggcaaagttgatcggagcgaggaggtggttggcctgcgccttcggccgctgagaaccgcggagctacttggacttgaccctactcgccccagcgctttgagcagcgcctatctgtcgccctggcgggagcgcacttgcaaacttggtggaggtgccctgcgcgtcctgttgtgtaacctccgtgccgccagctggaccgggaagttgcccgcccgtccttcagcttggatcggtcgcagccccgggcgaatttcatggccccgcgacaaacgcgcggccagagccggtgtgggcgagcccccgcgcgctccgacccgtagggaactcccgcacgcggtccctgcccctggcccgcgcctccgatgcgcgctgagcctctcgccagcagctgccctctcgtcgcggtctgtcctttcgagtagctgcctgagttggaaagaagaggatgaccgaggtgccttggtcggctgtccccaacgggacagatgctgccttcctggctggcctgggctccctttggggaaacagtacaatcgcctcgactgcagcagtttcctcttcattccgatgtgccctgatcaagaccggcttccagttctactacctgcctgcggtctacatcttagtgttcatcataggcttccttggcaacagcgtggcaatctggatgtttgttttccacatgaagccttggagcggcatctcggtgtacatgttcaatttggctctggccgactttttgtatgtgctcaccctaccagctctcatcttctactacttcaacaagactgactggatcttcggggatgttatgtgcaagctgcagaggttcatcttccatgtaaacctctatggcagcatcttgttcctcacctgcatcagtgcacacaggtacagtggcgtggtgtaccctctcaagtctctgggcaggctcaagaagaagaatgccatttatgtcagtgtgctggtatggctcattgtggtggtggccatctcccccattctcttctactctggcactgggattcggaaaaacaaaactgtcacctgctacgactccacgtcagatgagtacctgcgaagttatttcatctacagtatgtgcacgactgtggccatgttctgcatccccctggtgctgatcttgggctgttatggattaattgttagagctttgatctacaaagatctggacaactctcctctccggaggaaatccatttacctggtgataattgtcctgacggtgtttgctgtgtcttacatccctttccatgtgatgaaaacgatgaatttgagggcacggctggatttccagaccccagaaatgtgtgatttcaacgacagggtttatgccacctatcaggtaacaagaggtctagcaagtctcaacagctgtgtggaccccattctttatttcttggctggagatacattcagaaggagactgtcccgagccaccaggaaagcttccaggaggagtgaggccaatttacaatccaagagtgaagaaatgactctcaacattttgtctgagttcaagcagaacggagacacaagtttgtgaaggcaggagatccaagctcctcagtttgtaacatggtcacaagaagtccctgagatgacctgatgcacaggtcaagaagaagcaacattctattggccaaaagaccagtttgtgccacatgagtaggtgttttcatataatgacagttatgttgacattttgttgaaagacacctgaaactgtaagatgtagcaagtgactcttcacactacaaagatgtcttcattccaagctcaagggtttgttttccttgttgctatctgctgtttattccttacaaagtactgtctcggactctttgatggttgctttgaacctgtattgaacggaaatgataaattaagaagaaacttagcacacaagacagaattcaaaattaaaaccgtgatgtgaccactgagaagacatttggaagcccattcttcatgaacagaaaaaggcgacaggacaccaactgttgatgccataggtgctgtggtaagtcttgaaaagcagtgagaactgtttggaatctgcttctgtgcttcctaggtctctccagtctagtccttggagaaagttctcaatctccaccgactgtggaacggacaagttgaaacctgtaaatctctgctcacccaaccaggacactaatccatcttgatatgacaaatatcagtactcagtagcaactagaattcaattagtgacaggacatagacagtgtgatactagtaaatgtgtattgaagcttttcttccattggtcgaatgtaattattgaaatagtatttattagaagaggtttataggccttcagatgtacagattgtaaaacttccttgaagatacaacatactggtgtaaactctatttattgaccagtgcataatgcttcaaatgatcacatgtatattttacagtatatatagctagataaaaatgagaattatatttaagagttttttttccagatattagtatctttgaacctttaggaccagtttgtatttgaatctgaaaagatgaaaatgtgttttctaacaagggttttaattttccctagatttgaatttgcatgctttcctttgtgtgggtttattgctacccagatatgatttggctgttagaccatggtaagatttataacaagcataggatattttagacaggttatgtatatgtacattatatatgtttatacaatagaaagtttgtgttgtcttttcagaaagtttagagtattgccctaactatgatgcagcttccactgccaaaggctaatggcttatctcctattcaaaattgatttagatgtctagtggggttgggtagtgtagatacaatgtgagaatgtaaaagacaatctttagtgatgcagggtgataaagatgcagctgatagttttctgccagatcttgaagctttacaatgtatttttttcttaaggccacatagtacaatcttctttgcggccgcgaattc

SEQ ID NO: 11844 - protein, 373 aa, Rattus norvegicus
  ref <308>: DATABASE ACCESSION NUMBER: SWISS-Prot / P49651
  ref <309>: DATABASE ENTRY DATE: 1996-02-01
MTEVPWSAVPNGTDAAFLAGLGSLWGNSTIASTAAVSSSFRCALIKTGFQFYYLPAVYILVFIIGFLGNSVAIWMFVFHMKPWSGISVYMFNLALADFLYVLTLPALIFYYFNKTDWIFGDVMCKLQRFIFHVNLYGSILFLTCISAHRYSGVVYPLKSLGRLKKKNAIYVSVLVWLIVVVAISPILFYSGTGIRKNKTVTCYDSTSDEYLRSYFIYSMCTTVAMFCIPLVLILGCYGLIVRALIYKDLDNSPLRRKSIYLVIIVLTVFAVSYIPFHVMKTMNLRARLDFQTPEMCDFNDRVYATYQVTRGLASLNSCVDPILYFLAGDTFRRRLSRATRKASRRSEANLQSKSEEMTLNILSEFKQNGDTSL

SEQ ID NO: 11845 - DNA, 1295 bp, Homo sapiens
  ref <308>: DATABASE ACCESSION NUMBER: EMBL / AF018284
  ref <309>: DATABASE ENTRY DATE: 2000-10-28
ctggccgacttcttgtacgtgctgactctgccagccctgatcttctactacttcaataaaacagactggatcttcggggatgccatgtgtaaactgcagaggttcatctttcatgtgaacctctatggcagcatcttgtttctgacatgcatcagtgcccaccggtacagcggtgtggtgtaccccctcaagtccctgggccggctcaaaaagaagaatgcgatctgtatcagcgtgctggtgtggctcattgtggtggtggcgatctcccccatcctcttctactcaggtaccggggtccgcaaaaacaaaaccatcacctgttacgacaccacctcagacgagtacctgcgaagttatttcatctacagcatgtgcacgaccgtggccatgttctgtgtccccttggtgctgattctgggctgttacggattaattgtgagagctttgatttacaaagatctggacaactctcctctgaggagaaaatcgatttacctggtaatcattgtactgactgtttttgctgtgtcttacatccctttccatgtgatgaaaacgatgaacttgagggcccggcttgattttcagaccccagcaatgtgtgctttcaatgacagggtttatgccacgtatcaggtgacaagaggtctagcaagtctcaacagttgtgtggaccccattctctatttcttggcgggagatactttcagaaggagactctcccgagccacaaggaaagcttctagaagaagtgaggcaaatttgcaatccaagagtgaagacatgaccctcaatattttacctgagttcaagcagaatggagatacaagcctgtgaaggcacaagaatctccaaacacctctctgttgtaatatggtaggatgcttaacagaatcaagtacttttcccctctttaactttctagtttagaaaaaaatcaaaccaagaaaatagtgagttaaaaaaataatagaagtagaaatgcccacatccacacttagcttgtttgggtttgctttcacagtctctcttccttctgactagaagtatgtataataaaacaatactacctagttaaacatttactttctcttttgcctttaaaatgtgcaggcttttctgtttaaagtgtgtgtgcacatgagtactggggctgtttttgatattagtaatttctctaagaaaactagccccctgcaacttgagtttgtggtttatctagcctttattgtttttttaaaatccacagtaggaataaaaaatctatattctcagaaaaaaaaaaaaaaaaa

SEQ ID NO: 11846 - protein, 373 aa, Homo sapiens
  ref <308>: DATABASE ACCESSION NUMBER: SWISS-Prot / P47900
  ref <309>: DATABASE ENTRY DATE: 2002-06-15
MTEVLWPAVPNGTDAAFLAGPGSSWGNSTVASTAAVSSSFKCALTKTGFQFYYLPAVYILVFIIGFLGNSVAIWMFVFHMKPWSGISVYMFNLALADFLYVLTLPALIFYYFNKTDWIFGDAMCKLQRFIFHVNLYGSILFLTCISAHRYSGVVYPLKSLGRLKKKNAICISVLVWLIVVVAISPILFYSGTGVRKNKTITCYDTTSDEYLRSYFIYSMCTTVAMFCVPLVLILGCYGLIVRALIYKDLDNSPLRRKSIYLVIIVLTVFAVSYIPFHVMKTMNLRARLDFQTPAMCAFNDRVYATYQVTRGLASLNSCVDPILYFLAGDTFRRRLSRATRKASRRSEANLQSKSEDMTLNILPEFKQNGDTSL

SEQ ID NO: 11847 - DNA, 678 bp, Rattus norvegicus
  ref <308>: DATABASE ACCESSION NUMBER: EMBL / U23056
  ref <309>: DATABASE ENTRY DATE: 2000-03-04
ccagagcagccaggcttggcaggcagccgtgttggagccaaatctcttccccaagagaagaacctagcaggcagcagagactatggagctagcctcggctcgtctcctcagagggcagattccctggaggggactactgctcacagcctcacttttaacctactggagccctctcaccactgcccaagtcaccgtagacgctgtgccacccaacgttgttgaggagaacagcgttcttttactcgctcacaatatgccgcaggagttccaagtcttttactggtacaagggaaccactccgaatctagacagtgaaattgcacgatatataagatccgataatgtgcatcaaacaggacctgcatacagcggcagagagacaatatacagcaatggatccttgttcttccaaaatgtcaccaagaaggacgagggagcctacacactaactgtgatagatcaacaatttaatcctatacaaacgtctgtgcaatttcgtgtatacccctaaaagtatcacttgcatttaattctcctttgattgctcttcctaactgggaccaagttctgggaaagaaggctgatgttcactcgtgaaccccagagatttcatcggctgatggtgtcccgcttcacctccctccgccagcaataaagtcagcaaaacttctacaaaca

SEQ ID NO: 11848 - protein, 519 aa, Rattus norvegicus
  ref <308>: DATABASE ACCESSION NUMBER: SWISS-Prot / P16573
  ref <309>: DATABASE ENTRY DATE: 2002-06-15
MELASARLLRGQIPWRGLLLTASLLTYWSPLTTAQVTVDAVPPNVVEESSVLLLTHNLPQEFQVFYWYKVTTTGLNSEIARYIRSSNTSQTEPAYSGRVTIYSNGSLFFQNVNKTDEGPYTLSVIDKQFNPIQTSVQFRVYPALQKPNVTGNNSNPMEGEPFVSLMCEPYTNNTSYLWSRNGESLSEGDRVTFSEGNRTLTLLNVRRTDKGYYECEARNPATFNRSDPFNLDVIYGPDAPVISPPDIYLHQGSNLNLSCHADSNPPAQYFWLINEKLQTSSQELFISNITTNNSGTYACFVNNTVTGLSRTTVKNITVFEPVTQPSIQITNTTVKELGSVTLTCFSKDTGVSVRWLFNSQSLQLTDRMTLSQDNSTLRIDPIKREDAGDYQCEISNPVSFRISHPIKLDVIPDPTQGNSGLSEGAIAGIVIGSVAGVALIAALAYFLYSRKTGGGSDHRDLTEHKPSTSSHNLGPSDDSPNKVDDVSYSVLNFNAQQSKRPTSASSSPTETVYSVVKKK

SEQ ID NO: 11849 - DNA, 2974 bp, Homo sapiens
  ref <308>: DATABASE ACCESSION NUMBER: EMBL / M29540
  ref <309>: DATABASE ENTRY DATE: 2000-03-04
ctcagggcagagggaggaaggacagcagaccagacagtcacagcagccttgacaaaacgttcctggaactcaagctcttctccacagaggaggacagagcagacagcagagaccatggagtctccctcggcccctccccacagatggtgcatcccctggcagaggctcctgctcacagcctcacttctaaccttctggaacccgcccaccactgccaagctcactattgaatccacgccgttcaatgtcgcagaggggaaggaggtgcttctacttgtccacaatctgccccagcatctttttggctacagctggtacaaaggtgaaagagtggatggcaaccgtcaaattataggatatgtaataggaactcaacaagctaccccagggcccgcatacagtggtcgagagataatataccccaatgcatccctgctgatccagaacatcatccagaatgacacaggattctacaccctacacgtcataaagtcagatcttgtgaatgaagaagcaactggccagttccgggtatacccggagctgcccaagccctccatctccagcaacaactccaaacccgtggaggacaaggatgctgtggccttcacctgtgaacctgagactcaggacgcaacctacctgtggtgggtaaacaatcagagcctcccggtcagtcccaggctgcagctgtccaatggcaacaggaccctcactctattcaatgtcacaagaaatgacacagcaagctacaaatgtgaaacccagaacccagtgagtgccaggcgcagtgattcagtcatcctgaatgtcctctatggcccggatgcccccaccatttcccctctaaacacatcttacagatcaggggaaaatctgaacctctcctgccacgcagcctctaacccacctgcacagtactcttggtttgtcaatgggactttccagcaatccacccaagagctctttatccccaacatcactgtgaataatagtggatcctatacgtgccaagcccataactcagacactggcctcaataggaccacagtcacgacgatcacagtctatgcagagccacccaaacccttcatcaccagcaacaactccaaccccgtggaggatgaggatgctgtagccttaacctgtgaacctgagattcagaacacaacctacctgtggtgggtaaataatcagagcctcccggtcagtcccaggctgcagctgtccaatgacaacaggaccctcactctactcagtgtcacaaggaatgatgtaggaccctatgagtgtggaatccagaacgaattaagtgttgaccacagcgacccagtcatcctgaatgtcctctatggcccagacgaccccaccatttccccctcatacacctattaccgtccaggggtgaacctcagcctctcctgccatgcagcctctaacccacctgcacagtattcttggctgattgatgggaacatccagcaacacacacaagagctctttatctccaacatcactgagaagaacagcggactctatacctgccaggccaataactcagccagtggccacagcaggactacagtcaagacaatcacagtctctgcggagctgcccaagccctccatctccagcaacaactccaaacccgtggaggacaaggatgctgtggccttcacctgtgaacctgaggctcagaacacaacctacctgtggtgggtaaatggtcagagcctcccagtcagtcccaggctgcagctgtccaatggcaacaggaccctcactctattcaatgtcacaagaaatgacgcaagagcctatgtatgtggaatccagaactcagtgagtgcaaaccgcagtgacccagtcaccctggatgtcctctatgggccggacacccccatcatttcccccccagactcgtcttacctttcgggagcgaacctcaacctctcctgccactcggcctctaacccatccccgcagtattcttggcgtatcaatgggataccgcagcaacacacacaagttctctttatcgccaaaatcacgccaaataataacgggacctatgcctgttttgtctctaacttggctactggccgcaataattccatagtcaagagcatcacagtctctgcatctggaacttctcctggtctctcagctggggccactgtcggcatcatgattggagtgctggttggggttgctctgatatagcagccctggtgtagtttcttcatttcaggaagactgacagttgttttgcttcttccttaaagcatttgcaacagctacagtctaaaattgcttctttaccaaggatatttacagaaaagactctgaccagagatcgagaccatcctagccaacatcgtgaaaccccatctctactaaaaatacaaaaatgagctgggcttggtggcgcgcacctgtagtcccagttactcgggaggctgaggcaggagaatcgcttgaacccgggaggtggagattgcagtgagcccagatcgcaccactgcactccagtctggcaacagagcaagactccatctcaaaaagaaaagaaaagaagactctgacctgtactcttgaatacaagtttctgataccactgcactgtctgagaatttccaaaactttaatgaactaactgacagcttcatgaaactgtccaccaagatcaagcagagaaaataattaatttcatgggactaaatgaactaatgaggattgctgattctttaaatgtcttgtttcccagatttcaggaaactttttttcttttaagctatccactcttacagcaatttgataaaatatacttttgtgaacaaaaattgagacatttacattttctccctatgtggtcgctccagacttgggaaactattcatgaatatttatattgtatggtaatatagttattgcacaagttcaataaaaatctgctctttgtataacagaaaaa

SEQ ID NO: 11850 - protein, 702 aa, Homo sapiens
  ref <308>: DATABASE ACCESSION NUMBER: SWISS-Prot / P06731
  ref <309>: DATABASE ENTRY DATE: 2001-10-16
MESPSAPPHRWCIPWQRLLLTASLLTFWNPPTTAKLTIESTPFNVAEGKEVLLLVHNLPQHLFGYSWYKGERVDGNRQIIGYVIGTQQATPGPAYSGREIIYPNASLLIQNIIQNDTGFYTLHVIKSDLVNEEATGQFRVYPELPKPSISSNNSKPVEDKDAVAFTCEPETQDATYLWWVNNQSLPVSPRLQLSNGNRTLTLFNVTRNDTASYKCETQNPVSARRSDSVILNVLYGPDAPTISPLNTSYRSGENLNLSCHAASNPPAQYSWFVNGTFQQSTQELFIPNITVNNSGSYTCQAHNSDTGLNRTTVTTITVYAEPPKPFITSNNSNPVEDEDAVALTCEPEIQNTTYLWWVNNQSLPVSPRLQLSNDNRTLTLLSVTRNDVGPYECGIQNELSVDHSDPVILNVLYGPDDPTISPSYTYYRPGVNLSLSCHAASNPPAQYSWLIDGNIQQHTQELFISNITEKNSGLYTCQANNSASGHSRTTVKTITVSAELPKPSISSNNSKPVEDKDAVAFTCEPEAQNTTYLWWVNGQSLPVSPRLQLSNGNRTLTLFNVTRNDARAYVCGIQNSVSANRSDPVTLDVLYGPDTPIISPPDSSYLSGANLNLSCHSASNPSPQYSWRINGIPQQHTQVLFIAKITPNNNGTYACFVSNLATGRNNSIVKSITVSASGTSPGLSAGATVGIMIGVLVGVALI

SEQ ID NO: 11851 - DNA, 1392 bp, Rattus norvegicus; identical to SEQ ID NO: 8260
  ref <308>: DATABASE ACCESSION NUMBER: EMBL / U23769
  ref <309>: DATABASE ENTRY DATE: 2000-03-04

SEQ ID NO: 11852 - protein, 327 aa, Rattus norvegicus; identical to SEQ ID NO: 8261
  ref <308>: DATABASE ACCESSION NUMBER: SWISS-Prot / P52944
  ref <309>: DATABASE ENTRY DATE: 2001-10-16

SEQ ID NO: 11853 - DNA, 1462 bp, Homo sapiens; identical to SEQ ID NO: 8262
  ref <308>: DATABASE ACCESSION NUMBER: EMBL / BC000915
  ref <309>: DATABASE ENTRY DATE: 2002-09-02

SEQ ID NO: 11854 - protein, 329 aa, Homo sapiens; identical to SEQ ID NO: 8263
  ref <308>: DATABASE ACCESSION NUMBER: SWISS-Prot / O00151
  ref <309>: DATABASE ENTRY DATE: 2002-06-15

SEQ ID NO: 11855 - DNA, 793 bp, Rattus norvegicus; identical to SEQ ID NO: 8264
  ref <308>: DATABASE ACCESSION NUMBER: EMBL / U24489
  ref <309>: DATABASE ENTRY DATE: 2000-03-04

SEQ ID NO: 11856 - DNA, 4042 bp, Homo sapiens; identical to SEQ ID NO: 8265
  ref <308>: DATABASE ACCESSION NUMBER: EMBL / M26856
  ref <309>: DATABASE ENTRY DATE: 2000-03-04

SEQ ID NO: 11857 - DNA, 643 bp, Rattus norvegicus; identical to SEQ ID NO: 8297
  ref <308>: DATABASE ACCESSION NUMBER: EMBL / U26310
  ref <309>: DATABASE ENTRY DATE: 2000-03-04

SEQ ID NO: 11858 - protein, 107 aa, Rattus norvegicus; identical to SEQ ID NO: 8298
  ref <308>: DATABASE ACCESSION NUMBER: SWISS-Prot / AAA67648
  ref <309>: DATABASE ENTRY DATE: 2003-02-01

SEQ ID NO: 11859 - DNA, 7267 bp, Homo sapiens; identical to SEQ ID NO: 8299
  ref <308>: DATABASE ACCESSION NUMBER: Refseq / NM_022648
  ref <309>: DATABASE ENTRY DATE: 2001-12-26

SEQ ID NO: 11860 - protein, 1735 aa, Homo sapiens; identical to SEQ ID NO: 8300
  ref <308>: DATABASE ACCESSION NUMBER: Refseq / NP_072174
  ref <309>: DATABASE ENTRY DATE: 2001-12-26

SEQ ID NO: 11861 - DNA, 1686 bp, Rattus norvegicus; identical to SEQ ID NO: 8301
  ref <308>: DATABASE ACCESSION NUMBER: EMBL / U26356
  ref <309>: DATABASE ENTRY DATE: 2001-11-22

SEQ ID NO: 11862 - DNA, 5350 bp, Rattus norvegicus; identical to SEQ ID NO: 8310
  ref <308>: DATABASE ACCESSION NUMBER: EMBL / U27319
  ref <309>: DATABASE ENTRY DATE: 2000-03-04

SEQ ID NO: 11863 - protein, 918 aa, Rattus norvegicus; identical to SEQ ID NO: 8311
  ref <308>: DATABASE ACCESSION NUMBER: SWISS-Prot / AAC52945
  ref <309>: DATABASE ENTRY DATE: 2002-06-15

SEQ ID NO: 11864 - DNA, 3580 bp, Homo sapiens; identical to SEQ ID NO: 8312
  ref <308>: DATABASE ACCESSION NUMBER: Refseq / NM_000188
  ref <309>: DATABASE ENTRY DATE: 2001-10-10

SEQ ID NO: 11865 - protein, 917 aa, Homo sapiens; identical to SEQ ID NO: 8313
  ref <308>: DATABASE ACCESSION NUMBER: SWISS-Prot / P19367
  ref <309>: DATABASE ENTRY DATE: 2002-06-15

SEQ ID NO: 11866 - DNA, 1947 bp, Rattus norvegicus
  ref <308>: DATABASE ACCESSION NUMBER: EMBL / U27518
  ref <309>: DATABASE ENTRY DATE: 2000-03-04
ggcacgagaggactttgatcttcaggatgcctcagaagtggatttctgctctgctcctactgcagataagtttctgcttcagatctgggaactgtgggaaagtgttggtgtggccattggaatacagtcactggatgaatttaaagataatactggatgaacttgtacagaggggacatgaagtcactgttctcagaccttcatcttccgtctctcttgatcccaaaaaagcatctggtcttgtatatgaaacatctcctacaacttccaataatgatgaagtagaaaagtctttttacccagtgggtgatatgtggacatacgatgtgccaaaatatacatgtttgagatactacccatctttgaacaaaatgttcgggcaattttctgatttgtggttacagctttgtagagaagttgtttcaaacaaggaacttatagcaaaactaaaggaatcccagtttgatgtggttctttcagatgctgttggtccctgtggtgagctgatagctgagatactgcagttaccatttgtgtacagtcttcgctttgccaccgcccctggaatagaaaagtacagtgcaggacaacccttccctccctcttatgtacctattattttgtcaggatttagtggtcaaatgacattcatggagagagtggaaaatatgctatgtttactttattttgattcctggttcgagtcatttcctgctaaggattgggatccatttttcagcgaaattttaggaagacccactacaatggttgacacaatgaagaaagcagaaatatggctcattcggtcctactgggacttggagtttccccgcccatccttgccaaacattgagtttgttggaggacttcactgccaacctgccaaaccattacctaaggaaatggaagactttgcacagagctcaggagaacatggtgtgtgggtgttttctctggggtcgatgatcaggaacataacacaagaaagggctaacacaattgcatcagccctggcacaaattccacaaaaggttttttggagatttgagggcaagaaaccagacaccttaggacccaatactcgggtgttcaagtggataccccagaatgaccttcttggtcatccaaaaactaaggcttttgtaactcatggtggagccaatggcatctatgagtcaatccattatgggatcccccccatggttggcatccctttatttgcagaacaacgtgataacgttgctcacatggtagccaaaggagcagctgtttctatagattttcatacaatgtccagttcagatttgctcaacgcactgaaggcagtcatcaataacccctcctataaaaagaaagtgatgtggttgtcagccattcaccatgaccagcctctgaagcctctggacagagcagtcttctggattgagtttgtcatgcgtcacaaaggggccaagcatctgagaccacttgcacataaccttgccctggtatcagtacactctctggatgtgattggattcctgcttgcctgtgtgctggccattgttttacttgctgtaaaatgctgtctgtttctttaccgattttttgtaaaggtggcaaagaataaaagggactagggttctttaagaaggaaggctgtgatctgtggtcgtgatgggcatgactactccctttattgctggaactatatatcagatgctccttgttttagaagacattgagctaattgatttatctatagatgtcacactataggttaagaaagtaaccgttttaaatctttattttctcaaatccaccgttttcatattgattctcgatgtgatagtgctgaggataatgataatccctgaaacaccaacttgcttatgggcaaagatataggaagcctaaactttttactgtgaattttcagatatttataaaataaaattgaataaaatt

SEQ ID NO: 11867 - protein, 530 aa, Rattus norvegicus
  ref <308>: DATABASE ACCESSION NUMBER: SWISS-Prot / Q62789
  ref <309>: DATABASE ENTRY DATE: 2001-10-16
MPQKWISALLLLQISFCFRSGNCGKVLVWPLEYSHWMNLKIILDELVQRGHEVTVLRPSSSVSLDPKKASGLVYETSPTTSNNDEVEKSFYPVGDMWTYDVPKYTCLRYYPSLNKMFGQFSDLWLQLCREVVSNKELIAKLKESQFDVVLSDAVGPCGELIAEILQLPFVYSLRFATAPGIEKYSAGQPFPPSYVPIILSGFSGQMTFMERVENMLCLLYFDSWFESFPAKDWDPFFSEILGRPTTMVDTMKKAEIWLIRSYWDLEFPRPSLPNIEFVGGLHCQPAKPLPKEMEDFAQSSGEHGVWVFSLGSMIRNITQERANTIASALAQIPQKVFWRFEGKKPDTLGPNTRVFKWIPQNDLLGHPKTKAFVTHGGANGIYESIHYGIPPMVGIPLFAEQRDNVAHMVAKGAAVSIDFHTMSSSDLLNALKAVINNPSYKKKVMWLSAIHHDQPLKPLDRAVFWIEFVMRHKGAKHLRPLAHNLALVSVHSLDVIGFLLACVLAIVLLAVKCCLFLYRFFVKVAKNKRD

SEQ ID NO: 11868 - DNA, 669 bp, Homo sapiens
  ref <308>: DATABASE ACCESSION NUMBER: EMBL / BG203058
  ref <309>: DATABASE ENTRY DATE: 2001-04-26
tttttttttttttttttttttttaattaaaacattttattatattatttcaagtttattcttcctttcttctatggattcatgttaaaattttaagaaatgtattttttatattatctataccattttaaaattatttttgtttagaaaattgcttcactaactggttactcattagatgtatgggattcaaacacaatttttaaataatagatgataaaaacaaagcagatttcagattggttatatcatttaaattctttcaagattactctcttataaaaaggatgaaactcatgctcactattgacaagagaagctgtccacaaataccacctagtgaaaaacattgttctactcacaaaggatcattaattactgtcttcagtgcattcagcaggtctgtactcgacattgtgttgaagtccaatctaacagcggctcccttggcctttatgtgagcaatgttatcaggttgatcaaaaaacaatggaatgcccaccatagggatcccacggtagattgcctcataaatgccattggctccaccatgagttataaaagctctggtttttggatgacctagaaggtcattctgggggtattcacttgtacagccgaatttttgaaaccctaaggctttggtttattccctgtaaatcttcacaga

SEQ ID NO: 11869 - DNA, 4871 bp, Rattus norvegicus; identical to SEQ ID NO: 8322
  ref <308>: DATABASE ACCESSION NUMBER: EMBL / U28938
  ref <309>: DATABASE ENTRY DATE: 2000-03-04

SEQ ID NO: 11870 - protein, 1217 aa, Rattus norvegicus; identical to SEQ ID NO: 8323
  misc_feature (1)..(1217): Xaa=Unknown amino acid

SEQ ID NO: 11871 - DNA, 3979 bp, Homo sapiens; identical to SEQ ID NO: 8324
  ref <308>: DATABASE ACCESSION NUMBER: EMBL / AF187042
  ref <309>: DATABASE ENTRY DATE: 2000-03-03

SEQ ID NO: 11872 - protein, 378 aa, Homo sapiens; identical to SEQ ID NO: 8325
  misc_feature (1)..(378): Xaa=Unknown amino acid

SEQ ID NO: 11873 - DNA, 1496 bp, Rattus norvegicus; identical to SEQ ID NO: 8335
  ref <308>: DATABASE ACCESSION NUMBER: EMBL / U31668
  ref <309>: DATABASE ENTRY DATE: 1996-05-18

SEQ ID NO: 11874 - protein, 300 aa, Rattus norvegicus; identical to SEQ ID NO: 8336
  ref <308>: DATABASE ACCESSION NUMBER: SWISS-Prot / Q62814
  ref <309>: DATABASE ENTRY DATE: 2000-05-30

SEQ ID NO: 11875 - DNA, 1697 bp, Homo sapiens; identical to SEQ ID NO: 8337
  ref <308>: DATABASE ACCESSION NUMBER: EMBL / Z78409
  ref <309>: DATABASE ENTRY DATE: 1998-04-09

SEQ ID NO: 11876 - protein, 346 aa, Homo sapiens; identical to SEQ ID NO: 8338
  ref <308>: DATABASE ACCESSION NUMBER: SWISS-Prot / Q15329
  ref <309>: DATABASE ENTRY DATE: 2002-06-15

SEQ ID NO: 11877 - DNA, 2657 bp, Rattus norvegicus; identical to SEQ ID NO: 8339
  ref <308>: DATABASE ACCESSION NUMBER: EMBL / U31866
  ref <309>: DATABASE ENTRY DATE: 2000-03-04

SEQ ID NO: 11878 - DNA, 2036 bp, Homo sapiens; identical to SEQ ID NO: 8340
  ref <308>: DATABASE ACCESSION NUMBER: EMBL / AK021725
  ref <309>: DATABASE ENTRY DATE: 2002-08-06

SEQ ID NO: 11879 - DNA, 1474 bp, Rattus norvegicus
  ref <308>: DATABASE ACCESSION NUMBER: EMBL / U31880
  ref <309>: DATABASE ENTRY DATE: 2000-03-04
tggctggcagttgaggcttctgcaagtccagggactgtagtggagatgccgggtgccgcggcgaagggctcggagttgtccgagaggatcgagagcttcgtggaaactctgaagcgaggtggcgggcggcgcacgtcggaggacatggctcgggagaccctggggctgctgcgccggctcatcacggaccaccactggaacaacgccggggacctaatggatttgatccgcagagagggtaggaggatgacagccgctcaccctcctgagaccaccgtgggaaacatggtgcggagagtcctcaaaatcatacgggaggagtatggcagactgcatgggcgcagtgatgagagcgatcagcaggagtccctgcacaaactcttgacatccggaggcctgagcgaggatttcagcttccattatgccccacttaagtccaacatcattgaggcgattaatgagctgctagtggaactggaaggcacaacggagaacattgcagcccaagctctggagcacatccactccaacgaggtgatcatgaccattggcttctctaggacagtcgaggctttccttagagaggcagcccagaagaggaagttccatgtcattgctgcagagtgtgctcctttctgccagggacatgaaatggccgtcaatttgtccgaagcaggtatcgagacaactgtcatgaccgatgctgccatttttgctgttatgtcaagagtcaacaaggtgatcattggtacgaagactatcctggccaatggttccctgagggctgtggcaggaactcacactctggcactggcagccaaacaccactccacgcctctcatcgtctgcgcacccatgttcaagctctctcctcagttccccagtgaagaagattcatttcacaagtttgtggctcctgaagaagtccttcctttcacagaaggagacattctggagaaggtcagtgtccactgtcctgtgtttgactacgtgccccctgacctcattaccctctttatctccaacattggtgggaatgcaccgtcctacgtctaccgcctgatgagcgagctctaccatcctgacgaccatgtcctctgacacggcctgtcctatgcggaaccagcttagacccggagtggagtggagacacagtgttgctgctgcagtggggactggagagtcagcctgaaccctcagtgcctgtcacctgccttcctactcatgcccagtgaggagtggtccaggactgctcctgccttctgggcttatctgagcagcaggccttgcttccctggcattttggggccactttgtgactaggctgtgtttgtttcaggaacttcaacctcctggctctgtggtgtgttacacatacataccataactacttttgctgggtcggtgtttgctcagaaatgccttccagaccttttcctaatctgtgtcaataaaagctactggaagctcaaaa

SEQ ID NO: 11880 - protein, 351 aa, Rattus norvegicus
  ref <308>: DATABASE ACCESSION NUMBER: SWISS-Prot / Q62818
  ref <309>: DATABASE ENTRY DATE: 1999-07-15
MPGAAAKGSELSERIESFVETLKRGGGRRTSEDMARETLGLLRRLITDHHWNNAGDLMDLIRREGRRMTAAHPPETTVGNMVRRVLKIIREEYGRLHGRSDESDQQESLHKLLTSGGLSEDFSFHYAPLKSNIIEAINELLVELEGTTENIAAQALEHIHSNEVIMTIGFSRTVEAFLREAAQKRKFHVIAAECAPFCQGHEMAVNLSEAGIETTVMTDAAIFAVMSRVNKVIIGTKTILANGSLRAVAGTHTLALAAKHHSTPLIVCAPMFKLSPQFPSEEDSFHKFVAPEEVLPFTEGDILEKVSVHCPVFDYVPPDLITLFISNIGGNAPSYVYRLMSELYHPDDHVL

SEQ ID NO: 11881 - DNA, 1522 bp, Homo sapiens
  ref <308>: DATABASE ACCESSION NUMBER: EMBL / AF035280
  ref <309>: DATABASE ENTRY DATE: 2000-07-10
caggtgtggattccgccggtgaaggctgaaggcagctaccttaaagatgccgggatccgcagcgaagggctcggagttgtcagagaggatcgagagcttcgtggagaccctgaagcggggtggtgggccgcgcagctccgaggaaatggctcgggagaccctagggttgctgcgccagatcatcacggaccaccgctggagcaacgcgggggagctgatggagctgatccgcagagagggcaggaggatgacggccgctcagccctccgagaccaccgtgggcaacatggtgcggagagtgctcaagattatccgggaggagtatggcagactccatggacgcagcgacgagagtgatcagcaggagtccctgcacaaactgttgacatccggaggcctaaacgaggatttcagcttccattatgcccaactccagtccaacatcattgaggcgattaatgagctgctagtggagctggaagggacaatggagaacattgcagcccaggctctggagcacattcactccaatgaggtgatcatgaccattggcttctcccgaacagtagaggccttcctcaaagaggctgcccgaaagaggaaattccatgtcattgtagcagagtgtgctcctttctgccagggtcatgaaatggctgtgaatttgtccaaagcaggtattgagacaactgtcatgactgatgctgccatttttgccgttatgtcaagagtcaacaaggtgatcattggcacgaagaccatcctggccaatggggccctgagagctgtgacaggaactcacactctggcactggcagcaaaacaccattccaccccactcatcgtctgtgcacctatgttcaaactttctccacagttccccaatgaagaagactcatttcataagtttgtggctcctgaagaagtcctgccattcacagaaggggacattctggagaaggtcagcgtgcattgccctgtgtttgactacgttcccccagagctcattaccctctttatctccaacattggtgggaatgcaccttcctacatctaccgcctgatgagtgaactctaccatcctgatgatcatgttttatgaccgaccacacgtgtcctaagcagattgcttaggcagatacagaatgaagaggagacttgagtgttgctgctgaagcacatccttgcaatgtgggagtgcacaggagtccacctaaaaaaaaaatccttgatactgttgcctgcctttttagtcaccccgtaacaagggcacacatccagcactgtgtcttgcctttcagatcttaacagagcagcagggcttaacttgttgattttggagcctcttagtgacctggttgcgtctgtgtcaggaacttaaactttctggttcagtagtgtgttaaacataacactgaataccttactgggatacagatttttgctcagaaatggctatgacactttttctaggctctaccaataaaagccacttgaaggttcaaaaaaaaaaaaaaaaaaa

SEQ ID NO: 11882 - protein, 351 aa, Homo sapiens
  ref <308>: DATABASE ACCESSION NUMBER: SWISS-Prot / P49770
  ref <309>: DATABASE ENTRY DATE: 2002-06-15
MPGSAAKGSELSERIESFVETLKRGGGPRSSEEMARETLGLLRQIITDHRWSNAGELMELIRREGRRMTAAQPSETTVGNMVRRVLKIIREEYGRLHGRSDESDQQESLHKLLTSGGLNEDFSFHYAQLQSNIIEAINELLVELEGTMENIAAQALEHIHSNEVIMTIGFSRTVEAFLKEAARKRKFHVIVAECAPFCQGHEMAVNLSKAGIETTVMTDAAIFAVMSRVNKVIIGTKTILANGALRAVTGTHTLALAAKHHSTPLIVCAPMFKLSPQFPNEEDSFHKFVAPEEVLPFTEGDILEKVSVHCPVFDYVPPELITLFISNIGGNAPSYIYRLMSELYHPDDHVL

SEQ ID NO: 11883 - DNA, 4344 bp, Rattus norvegicus; identical to SEQ ID NO: 8371
  ref <308>: DATABASE ACCESSION NUMBER: EMBL / U32681
  ref <309>: DATABASE ENTRY DATE: 2000-03-04

SEQ ID NO: 11884 - protein, 1291 aa, Rattus norvegicus; identical to SEQ ID NO: 8372
  misc_feature (1)..(1291): Xaa=Unknown amino acid

SEQ ID NO: 11885 - DNA, 7683 bp, Homo sapiens; identical to SEQ ID NO: 8373
  ref <308>: DATABASE ACCESSION NUMBER: EMBL / AJ243212
  ref <309>: DATABASE ENTRY DATE: 1999-09-17

SEQ ID NO: 11886 - protein, 2413 aa, Homo sapiens; identical to SEQ ID NO: 8374
  misc_feature (1)..(2413): Xaa=Unknown amino acid

SEQ ID NO: 11887 - DNA, 2107 bp, Rattus norvegicus; identical to SEQ ID NO: 8379
  ref <308>: DATABASE ACCESSION NUMBER: Refseq / NM_019284
  ref <309>: DATABASE ENTRY DATE: 2002-11-05

SEQ ID NO: 11888 - protein, 544 aa, Rattus norvegicus; identical to SEQ ID NO: 8380
  ref <308>: DATABASE ACCESSION NUMBER: Refseq / NP_062157
  ref <309>: DATABASE ENTRY DATE: 2002-11-05

SEQ ID NO: 11889 - DNA, 1728 bp, Homo sapiens; identical to SEQ ID NO: 8381
  ref <308>: DATABASE ACCESSION NUMBER: EMBL / AF059274
  ref <309>: DATABASE ENTRY DATE: 2001-09-04

SEQ ID NO: 11890 - protein, 539 aa, Homo sapiens; identical to SEQ ID NO: 8382
  ref <308>: DATABASE ACCESSION NUMBER: Refseq / NP_006565
  ref <309>: DATABASE ENTRY DATE: 2002-03-22

SEQ ID NO: 11891 - DNA, 1683 bp, Rattus norvegicus; identical to SEQ ID NO: 8387
  ref <308>: DATABASE ACCESSION NUMBER: EMBL / U34843
  ref <309>: DATABASE ENTRY DATE: 2000-03-04

SEQ ID NO: 11892 - protein, 337 aa, Rattus norvegicus; identical to SEQ ID NO: 8388
  misc_feature (1)..(337): Xaa=Unknown amino acid

SEQ ID NO: 11893 - DNA, 1321 bp, Homo sapiens; identical to SEQ ID NO: 8389
  ref <308>: DATABASE ACCESSION NUMBER: EMBL / U27112
  ref <309>: DATABASE ENTRY DATE: 1998-09-09

SEQ ID NO: 11894 - protein, 337 aa, Homo sapiens; identical to SEQ ID NO: 8390
  misc_feature (1)..(337): Xaa=Unknown amino acid

SEQ ID NO: 11895 - DNA, 4609 bp, Rattus norvegicus
  ref <308>: DATABASE ACCESSION NUMBER: EMBL / U35371
  ref <309>: DATABASE ENTRY DATE: 2000-03-04
cagagcactaggttcataaccaggattggtcgcaagtagggagcttttgccactccgctgggaccttcggacgctggctgtgttgcaagcccagttctcctaagcgctgtgccgggcgtcttggattcatattgtgttgtcggcacttctcccaggtggatttcagctagagctcacttggaaatgtctgcagcttggtgtgagagaataggattcttcttgctgaactaaaggaagcaaccttcatacgttcctactgaaaagaaaggggatttttgacacagagtaaatccatagtatatgcctctccgaactgtcctgaaagattaaaggttgcacaaagcttaaaaggaacagaagcagcagttctattcacttgttattggacttgaaactcctttgacctcggaagctgaagatgaggttgccatgggaactgctagtgctgcaatcattcatgttgtgccttgcagatgactacacactacatggcccagtttttgttcaagagccaagtcatgtcatgtttcctttggattctgaggagaaaaaagtgaaactgagttgcgaagttaaagggaatccaaagcctcacatcaggtggaagttaaatggaacagatgttgacattggtatggatttccgctacagtgttgttgaaggcagcttgttgatcaataaccccaataaaacccaagattctggaacgtaccaatgcatagcaacaaactcgtttggaacaattgtaagcagagaagcaaagcttcagtttgcatatcttgaaaactttaagacaagaacaagaagcacagtgtcagttcgtcgaggtcagggaatggtcctcctgtgcggcccgccaccccattctggagagctgagctacgcctggatcttcaatgaacacccttcctatcaggataaccgccgctttgtttctcaagagactggcaatctgtatattgccaaggtggaaaaagctgacgttggtaattatacgtgtgtggttaccaatactgtgaccagccaccaggtcctgggaccgcctacaccactaatcctgagaaatgatggggtgatgggtgaatatgaacccaaaatagaagtacagtttccagaaactgtcccagctgagaaaggatcaacagtcaagctggaatgctttgccttaggaaacccagtcccaactattctatggagaagagctgatgggaagccgatagcaaggaaagccagaagacacaagtccagtggaattctggaaattcccaattttcagcaggaagatgctggttcctatgaatgtgtggccgaaaactccagaggcaaaaacatagcaaagggacaggtgactttctatgctcaacctaactgggttcaaataataaatgatatccacgtggccatggaagagagtgtcttctgggaatgtaaagcaaatgggaggcccaagcctacctataggtggcttaaaaatggtgacccactgttaacacgggagagaatacagatcgagcaaggaacactcaacataacaatagtgaatctctcagatgccggcatgtaccagtgtgtggcagagaataaacatggagttatctatgccagcgctgaacttagtgtaatagctgaaagtccagatttttcgagaacactcttaaaaagagtaacacttgtcaaagtgggtggtgaagttgtcattgagtgcaagccgaaagcatccccaagacctgtctacacctggagaaagggaagagaaatattaagagaaaatgaaagaattaccatttctgaagatggaaacctcagaatcatcaatgtcactaagtctgacgctggaagttatacctgcatagccactaaccattttggcactgccagcagcactgggaatgtggttgtgaaagacccaacaaaggtgatggttcccccttccagcatggatgtcactgtgggagaaagcattgttcttccatgccaggtgacacatgatcactcactggacattgtctttacttggacatttaatggacacttgatagactttgacaaagatggagaccactttgaaagagttggagggcaggattcagctggtgatttgatgatccgaaacatccaactgaagcatgctgggaaatatgtctgcatggtccaaacaagtgtggacaaactctctgctgctgcggacctgattgtaagaggtcctccaggtcctcctgaggctgtgaccatagacgaaatcacagacaccactgctcagctgtcctggagacctggacctgacaaccacagccccatcaccatgtatgtcatccaagctaggactccattctccgtgggctggcaagcagtcagtacagttccagaactcgttgatgggaagacattcacagcaactgtggtgggtttgaacccctgggttgaatatgaattccgcactgttgcagctaatgtgattggcattggggaacccagcaggccctcagagaaacggaggactgaagaggctctccccgaagtcaccccggctaacgtcagtggtggtggaggcagcaagtctgaactggttataacctgggagacagtccctgaggaattacagaatggcagaggctttggttacgtggtagccttccggccacatggcaaaatgatctggatgctgacagtgctggcttcagctgatgcctccagatacgtgttcaggaatgaaagcgtgcgtccattctctccctttgaggttaaagtgggtgtcttcaataacaaaggggaaggccctttcagtcccaccaccctggtgtattctgctgaagaagaacccaccaagccaccagccagtatctttgccaggagtctttctgccacagatatcgaagttttctgggcctcccctattgggaagaacaggggacggattcaaggttatgaggtaaaatattggagacatgatgataaggaagaaaatgctagaaaaatacgaacagttggaaaccagacatctacgaaaatcaccaacttgaaagggaatgctctgtaccacctatctgtcaaggcttataactcagctgggacaggaccctccagtgcagcagtcaatgtcacgaccagaaagccaccaccaagccaaccccctggaaacatcatatggaattcatcggactccaaaattatcctgaactgggatcaagtgaaggccctggataatgagtcagaagtaaaaggatacaaagtcttgtaccgatggaacaggcaaagcagcacatctgtcattgaaacgaacaaaacgtcagtggagctttctctacctttcgatgaagactacatcatagagatcaagccattcagtgacggaggagacggcagcagcagtgagcagatccgaatcccaaagatatcaaattcctatgcaagaggatctggggcttctacctccaatgcgtgtacactgtcagccatcagtacaataatgatttctctcacagccaggtctagtttatgacaaaagttatctaaaggactcactatttataatataagcaacatttagctagttgttttgaagacacccagtactaagtaatattgttgttcaagtacatcttattactggaaaaaatgttttttgcttcgttaggaatggcattatacagtacttcctcaaagcaaatctagctttgtctgaagtttctttggaaactctgcaactgcactgaagacatctgtaatatgatgttaccaaagcagtttacatatgtccttatatgcatattttttattatatatttagtgttttatagaattttttaaagttaacatataatgtagatattgtttttttttcttcctctgctgtaaaatgctctgggcaacacaaccacacaattatgatttgagacagtttcctttaaggacagagtttgaaaatcatctcagatagtgaattacaattgacttgtacagttttacaaggatccggtgtcaaaacatctagagactgggtctgtaactcaaggctgctgtatataaattattccttgaatggttaatgcattgaatcgagtccccttgacatatgtgatatgttttcccaccctgttgtgaatttttgttgctcaacacaatttgaaatggtttcaggagctacacatccccaaaagctaaacttcccagcccatgaggcaccttgtcaatcctcccatccctgaacttagcattgtctggtaagactttatttgagcaccgtccttgtggtagcattatcttaggcattgaatttgaagttacatatcctgtagtaacatagatgaaaagttactatagtcaaatgagtctttcatggcataaaaggtaattttactctttagacatatctgttttgaatgtaaattttttaaaactcctgtcgatgcatttataatttcaagatttcttagataccatgtataattgtaatgatagagtccttcttttgaatgacaataacatatgtaatttgaaaactttttcctactttagcagatagctgctacaaagaattttacatataactctctaaactatcagtagtccatgtgcattggaccttgatgtctctcccattttgcagtag

SEQ ID NO: 11896 - protein, 1027 aa, Rattus norvegicus
  misc_feature (1)..(1027): Xaa=Unknown amino acid
MRLPWELLVLQSFMLCLADDYTLHGPVFVQEPSHVMFPLDSEEKKVKLSCEVKGNPKPHIRWKLNGTDVDIGMDFRYSVVEGSLLINNPNKTQDSGTYQCIATNSFGTIVSREAKLQFAYLENFKTRTRSTVSVRRGQGMVLLCGPPPHSGELSYAWIFNEHPSYQDNRRFVSQETGNLYIAKVEKADVGNYTCVVTNTVTSHQVLGPPTPLILRNDGVMGEYEPKIEVQFPETVPAEKGSTVKLECFALGNPVPTILWRRADGKPIARKARRHKSSGILEIPNFQQEDAGSYECVAENSRGKNIAKGQVTFYAQPNWVQIINDIHVAMEESVFWECKANGRPKPTYRWLKNGDPLLTRERIQIEQGTLNITIVNLSDAGMYQCVAENKHGVIYASAELSVIAESPDFSRTLLKRVTLVKVGGEVVIECKPKASPRPVYTWRKGREILRENERITISEDGNLRIINVTKSDAGSYTCIATNHFGTASSTGNVVVKDPTKVMVPPSSMDVTVGESIVLPCQVTHDHSLDIVFTWTFNGHLIDFDKDGDHFERVGGQDSAGDLMIRNIQLKHAGKYVCMVQTSVDKLSAAADLIVRGPPGPPEAVTIDEITDTTAQLSWRPGPDNHSPITMYVIQARTPFSVGWQAVSTVPELVDGKTFTATVVGLNPWVEYEFRTVAANVIGIGEPSRPSEKRRTEEALPEVTPANVSGGGGSKSELVITWETVPEELQNGRGFGYVVAFRPHGKMIWMLTVLASADASRYVFRNESVRPFSPFEVKVGVFNNKGEGPFSPTTLVYSAEEEPTKPPASIFARSLSATDIEVFWASPIGKNRGRIQGYEVKYWRHDDKEENARKIRTVGNQTSTKITNLKGNALYHLSVKAYNSAGTGPSSAAVNVTTRKPPPSQPPGNIIWNSSDSKIILNWDQVKALDNESEVKGYKVLYRWNRQSSTSVIETNKTSVELSLPFDEDYIIEIKPFSDGGDGSSSEQIRIPKISNSYARGSGASTSNACTLSAISTIMISLTARSSLX

SEQ ID NO: 11897 - DNA, 701 bp, Homo sapiens
  misc_feature (1)..(701): n=a, c, g or t
  ref <308>: DATABASE ACCESSION NUMBER: EMBL / AV724042
  ref <309>: DATABASE ENTRY DATE: 2000-10-05
cagcgaccgtggtgggtttgaacccttgggttgaatatgaattccgcacagttgcagccaacgtgattgggattggggagcccagccgcccctcagagaaacggagaacagaagaagctctccaatataagccatctgaactactgcgaacctgacctgagggtcacgtcggtggttacgggttttaacaacttgccggacagatttaaagactttctgctgtatttgagatgccgcaattattcactgcttatagatcagccggataagtgtgcaaagaaacctttcttgttgctggcgattaagtccctcactccacattttgccagaaggcaagcaatccgggaatcctggggccaagaaagcaacgcagggaaccaaacggtggtgcgagtcttcctgctgggccagacacccncagaggacaaccaccccgaccttttagatatgctgaaatttgagagtgagaagcaccaagacattcttatgtgggactacagagacactttcttcaacttgnctctgaaggaagtgctgtttctcaggtgggtaagtactttctggccagacactgagttngttttcaagggcgatgacnatgtttttgtgacacccttacaatccggattacttgataggttattcaagaccgccaagatctttcataggtgatgtgatcacaatgttggacctattggtng

SEQ ID NO: 11898 - protein, 398 aa, Homo sapiens
  ref <308>: DATABASE ACCESSION NUMBER: SWISS-Prot / Q9NY97
  ref <309>: DATABASE ENTRY DATE: 2002-06-15
MSVGRRRIKLLLGILMMANVFIYFIMEVSKSSSQEKNGKGEVIIPKEKFWKISTPPEAYWNREQEKLNRQYNPILSMLTNQTGEAGRLSNISHLNYCEPDLRVTSVVTGFNNLPDRFKDFLLYLRCRNYSLLIDQPDKCAKKPFLLLAIKSLTPHFARRQAIRESWGQESNAGNQTVVRVFLLGQTPPEDNHPDLSDMLKFESEKHQDILMWNYRDTFFNLSLKEVLFLRWVSTSCPDTEFVFKGDDDVFVNTHHILNYLNSLSKTKAKDLFIGDVIHNAGPHRDKKLKYYIPEVVYSGLYPPYAGGGGFLYSGHLALRLYHITDQVHLYPIDDVYTGMCLQKLGLVPEKHKGFRTFDIEEKNKNNICSYVDLMLVHSRKPQEMIDIWSQLQSAHLKC

SEQ ID NO: 11899 - DNA, 2246 bp, Rattus norvegicus; identical to SEQ ID NO: 8443
  ref <308>: DATABASE ACCESSION NUMBER: EMBL / U35775
  ref <309>: DATABASE ENTRY DATE: 2000-03-04

SEQ ID NO: 11900 - protein, 705 aa, Rattus norvegicus; identical to SEQ ID NO: 6899
  ref <308>: DATABASE ACCESSION NUMBER: SWISS-Prot / Q62847
  ref <309>: DATABASE ENTRY DATE: 2001-10-16

SEQ ID NO: 11901 - DNA, 2920 bp, Homo sapiens; identical to SEQ ID NO: 8445
  ref <308>: DATABASE ACCESSION NUMBER: EMBL / D67031
  ref <309>: DATABASE ENTRY DATE: 1997-12-10

SEQ ID NO: 11902 - protein, 706 aa, Homo sapiens; identical to SEQ ID NO: 6901
  ref <308>: DATABASE ACCESSION NUMBER: SWISS-Prot / Q9UEY8
  ref <309>: DATABASE ENTRY DATE: 2001-10-16

SEQ ID NO: 11903 - DNA, 1778 bp, Rattus norvegicus
  ref <308>: DATABASE ACCESSION NUMBER: EMBL / U39943
  ref <309>: DATABASE ENTRY DATE: 2001-03-10
atatcagccatgcttgtcacagcgggttccctactaggggccatttggaccgtgctccatctccggattttgctgctggctgctgtcacctttctgttcctggctgatttcctcaaacaccggcgccccaagaactacccgccagggccttggcgcctgcccttagtgggttgcttgttccatttggatcctaaacagccacacctatcccttcagcagtttgtgaagaaatatgggaatgttttaagcctggattttgctaacattccttcagtggttgtaactggcatgcccttaatcaaagaaatctttactcaaatggagcacaattttttgaatcgccctgtcactcttctccgaaaacatctctttaacaaaaatggattgatcttctccagtggccagacatggaaggagcaaaggaggtttgccctgatgactctgaggaactttggactaggaaagaagagcttagagcagcgaatacaagaggaagcctaccaccttgtggaggccataaaagatgagggaggactgccttttgaccctcacttcaatatcaacaaagcagtctctaatatcatttgctctgtcacctttggggagcgctttgagtaccatgacagtcagtttcaggagatgctgaggctactggatgaggccatgtgtttggagtcatcaatgatgtgccagctctacaatatctttccaaggatacttcagtatcttcctggatcacaccaaacacttttcagcaactggagaaaactgaagttgtttatttctgatattattaagaatcaccggagagactgggatccagatgagccaagggacttcattgatgctttcctcaaggaaatggcaaagtacccagacaagactactacaagtttcaatgaagaaaacctcatctgcagtactttggatcttttctttgctggtacagagacaacatccactacactgcgctgggctctgctctgcatggccctgtacccagaagtccaagaaaaaatgcaggctgagattgacagagtgattggccaaggaagacagccaaacctggcagaccgagactccatgccctacaccaacgccgtcattcacgaggtgcagagaataggcaacatcatcccctttaatgttcccagggaagtggcagttgacacctatttggctggatttaacttgccaaagggtactatgattctaaccaacttaactgcactgcacagggaccctaaagagtgggccaccccggacaccttcaacccagagcactttttggagaatggacagtttaagaagagagaatcctttctgcctttctcaatgggaaagcgagcatgtcttggagaacaactggccaggtccgagctgttcatttttatcacttctcttatccaaaaatttaccttcaagcccccggtcaacgagaagcttagtctgcaattcagaatgtccgtcaccatttccccagtcagtcaccgcctttgcgcaattcctaggctgtgatgtcgaagaggaaagtatgaagaaatggcatctgcatggaggacactggtgtctgctcacattgaggggatagaattaaagatgactgagggagtgtgtgcaatgagactaaggaaattgaatcaagttatgggttcattaagtagaaagccacttgtgagctcaatggtacagcttcacgactgacatcttgcagagaaaaatgattcttccagaaaagaaaatgattacgggaccatggagaatggaagccgaattcc

SEQ ID NO: 11904 - protein, 502 aa, Rattus norvegicus
  ref <308>: DATABASE ACCESSION NUMBER: SWISS-Prot / P51590
  ref <309>: DATABASE ENTRY DATE: 2002-06-15
MLVTAGSLLGAIWTVLHLRILLLAAVTFLFLADFLKHRRPKNYPPGPWRLPLVGCLFHLDPKQPHLSLQQFVKKYGNVLSLDFANIPSVVVTGMPLIKEIFTQMEHNFLNRPVTLLRKHLFNKNGLIFSSGQTWKEQRRFALMTLRNFGLGKKSLEQRIQEEAYHLVEAIKDEGGLPFDPHFNINKAVSNIICSVTFGERFEYHDSQFQEMLRLLDEAMCLESSMMCQLYNIFPRILQYLPGSHQTLFSNWRKLKLFISDIIKNHRRDWDPDEPRDFIDAFLKEMAKYPDKTTTSFNEENLICSTLDLFFAGTETTSTTLRWALLCMALYPEVQEKMQAEIDRVIGQGRQPNLADRDSMPYTNAVIHEVQRIGNIIPFNVPREVAVDTYLAGFNLPKGTMILTNLTALHRDPKEWATPDTFNPEHFLENGQFKKRESFLPFSMGKRACLGEQLARSELFIFITSLIQKFTFKPPVNEKLSLQFRMSVTISPVSHRLCAIPRL

SEQ ID NO: 11905 - DNA, 1876 bp, Homo sapiens
  ref <308>: DATABASE ACCESSION NUMBER: EMBL / U37143
  ref <309>: DATABASE ENTRY DATE: 2002-01-30
gagccatgctcgcggcgatgggctctctggcggctgccctctgggcagtggtccatcctcggactctcctactgggcactgtcgcctttctgctcgctgctgactttctcaaaagacggcgcccaaagaactacccgccggggccctggcgcctgcccttccttggcaacttcttccttgtggacttcgagcagtcgcacctggaggttcagctgtttgtgaagaaatatgggaacctttttagcttggagcttggtgacatatctgcagttcttattactggcttgcccttaatcaaagaagcccttatccacatggaccaaaactttgggaaccgccccgtgacccctatgcgagaacatatctttaagaaaaatggattgattatgtcaagtggccaggcatggaaggagcaaagaaggttcactctgacagcactaaggaactttggtttaggaaagaagagcttagaggaacgcattcaggaggaggcccaacacctcactgaagcaataaaagaggagaacggacagccttttgaccctcatttcaagatcaacaatgcagtttccaatatcatttgctccatcaccttcggagaacgctttgagtaccaggatagttggtttcagcagctgctgaagttactagatgaagtcacatacttggaggcttcaaagacatgccagctctacaatgtctttccatggataatgaaattcctgcctggaccccaccaaactctcttcagcaactggaaaaaactgaaattgtttgtttctcatatgattgacaaacacagaaaggattggaatcctgcagaaacaagagactttattgatgcttaccttaaagaaatgtcaaagcacacaggcaatcctacttcaagtttccatgaagaaaacctcatctgcagcaccctggacctcttctttgccggaaccgagacaacttccacaactctgcgatgggctctgctttatatggccctctacccagaaatccaagaaaaagtacaagctgagattgacagagtgattggccaggggcagcagccgagcacagccgcccgggagtccatgccctacaccaatgctgtcatccatgaggtgcagagaatgggcaacatcatccccctgaacgttcccagggaagtgacagttgataccactttggctgggtaccacctgcccaagggtaccatgatcctgaccaatttgacggcgctgcacagggaccccacagagtgggccacccctgacacattcaatccggaccattttctggagaatggacagtttaagaaaagggaagcctttatgcctttctcaataggaaagcgggcatgcctcggagaacagttggccaggactgagctgtttattttcttcacttcccttatgcaaaaatttaccttcaggcccccaaacaatgagaagctgagcctgaagtttagaatgggtatcaccatttccccagtcagtcaccgcctctgcgctgttcctcaggtgtaatattgttaagaaagaaaggggcaaggaaagtaagaagacatggcacgtgttctgaaaccactggtgtctgctcagatgtgttgggacaaaatgaaagtgactttcaagaaagatcagaggaatttgactcagagaaaactagatccaaatcccagctctactgtctcgtccgaattagccttgggaaaatcatttatatgctaaataatttacctttttatctaggagatgaaaagaggataatgtttccttccataaagaaagttcttgtaagaatcaaaagaaatggtgagctttaagtggtttgtaaaccataaaacacatcataaaagttctatctataaaaaaaaaaaaaaaaaaaa

SEQ ID NO: 11906 - protein, 502 aa, Homo sapiens
  ref <308>: DATABASE ACCESSION NUMBER: SWISS-Prot / P51589
  ref <309>: DATABASE ENTRY DATE: 2002-06-15
MLAAMGSLAAALWAVVHPRTLLLGTVAFLLAADFLKRRRPKNYPPGPWRLPFLGNFFLVDFEQSHLEVQLFVKKYGNLFSLELGDISAVLITGLPLIKEALIHMDQNFGNRPVTPMREHIFKKNGLIMSSGQAWKEQRRFTLTALRNFGLGKKSLEERIQEEAQHLTEAIKEENGQPFDPHFKINNAVSNIICSITFGERFEYQDSWFQQLLKLLDEVTYLEASKTCQLYNVFPWIMKFLPGPHQTLFSNWKKLKLFVSHMIDKHRKDWNPAETRDFIDAYLKEMSKHTGNPTSSFHEENLICSTLDLFFAGTETTSTTLRWALLYMALYPEIQEKVQAEIDRVIGQGQQPSTAARESMPYTNAVIHEVQRMGNIIPLNVPREVTVDTTLAGYHLPKGTMILTNLTALHRDPTEWATPDTFNPDHFLENGQFKKREAFMPFSIGKRACLGEQLARTELFIFFTSLMQKFTFRPPNNEKLSLKFRMGITISPVSHRLCAVPQV

SEQ ID NO: 11907 - DNA, 847 bp, Rattus norvegicus; identical to SEQ ID NO: 8565
  ref <308>: DATABASE ACCESSION NUMBER: EMBL / U44948
  ref <309>: DATABASE ENTRY DATE: 1996-05-20

SEQ ID NO: 11908 - protein, 192 aa, Rattus norvegicus; identical to SEQ ID NO: 8566
  ref <308>: DATABASE ACCESSION NUMBER: SWISS-Prot / Q62908
  ref <309>: DATABASE ENTRY DATE: 2002-06-15

SEQ ID NO: 11909 - DNA, 741 bp, Homo sapiens; identical to SEQ ID NO: 8567
  ref <308>: DATABASE ACCESSION NUMBER: EMBL / U46006
  ref <309>: DATABASE ENTRY DATE: 2000-03-04

SEQ ID NO: 11910 - protein, 192 aa, Homo sapiens; identical to SEQ ID NO: 8568
  ref <308>: DATABASE ACCESSION NUMBER: SWISS-Prot / Q16527
  ref <309>: DATABASE ENTRY DATE: 2002-06-15

SEQ ID NO: 11911 - DNA, 4794 bp, Rattus norvegicus
  ref <308>: DATABASE ACCESSION NUMBER: EMBL / U49055
  ref <309>: DATABASE ENTRY DATE: 2000-03-04
cccgtgggaggaagaggaaggaggagaagggggtggagagtggagggggccgaagcttgagtgtggagtccgcttccgagcggggcggagaaacagagaaggcgccgcgccagcccctcccccaccaccgacccgccccgacggcctcggtcctgctcgctgcgcccgccccgcgaccatgccgggacctcacgggcgctgaggagcgtctccagctagccgtgctccgcggccttctgggcccgtcgcccgcccttccgcacgcaacgcgcccagccgccgcctcttccttcgccgggccccgggcctctgcgcagacaacatggaggccgtgaagaccttcaacagcgagttgtattcgctgaatgactataagccacccatttctaaagcaaaaatgacccagattacaaaggcagccatcaaagctattaagttctataaacatgtggtacagagcgttgagaaattcattcagaaatgtaaaccagaatacaaggtacccggactgtatgttattgactccattgtgcgacaatcccggcatcaggttggtcaagaaaaggatgtgtgtgcacccagatttagtaataacatcattagcactttccagaatttatatcggtgcccgggggatgacaagagtaaaatagtgagagtattaaacttatggcagaagaataatgtttttaagagcgagattatccagcctctcctggatatggcggcagggattcctcccccagttgtcaccccggttttggccagcaccactgtagccatgagcaacactccaggaacacctgtgacacctgttactccagccaatgtggttcaaggcctacctgatccatgggtatcgcagataacaaacacagacacactggcagctgttgcccagatcctacaaagtcctcaaggtcaacagcttcagcaactaatacagaccttacagatacaacagcagaagccccagccctctatccttcaggctttggatgctggccttgtggttcagttgcaggcactcactgcacagcttacagctgcagctgctgcagccaacacacttactcccttggaccagggagtctctttcaacaagaagttgatggatagatttgattttggggaagattctgagcatagtgaagaatccaaaaaggaaattcctactcctcaactctctcacgtttctgagtctgtgaacaactccatcttccatcagatagcagaacagctgcagcagcagaacctggagcagttgcggcagcagctcctggagcagcagcagcctcagaaggtaactcctcaggacagccaggagggagcatttggctctgagcactcagcttcaccctcacaagggagtagccaacagcattttctggaacctgaagcaaatttagatgattccatagacattcagcaacaggatatggatattgatgaagggcaagatgttgttgaagaggagatctttgaaccagaagctaagaaagtagctgttcgctcaagatcaagaactcattcacgatctcgatcaaggtcaccaagaaaacggaggtccaggtcacgctctgggtcccgaaagcgaaagcataggaagaggtctcgctcccgctccagagagagaaagagaaaatcctcacgttcctattcaagtgaacgcagagccagggaaagggagaaagaacgccaaaaaaagggcttgcctcctgtcagatcgaaaacgctaagtgtatgcagcactactctctgggttggccaagtggacaagaaggctacacagcaagatttaaccaacctttttgaggagtttgggcaaatcgaatccattaatatgattccacccaggggctgtgcatatgtctgtatggttcatcgacaagattcatttcgggctctccagaaactgagttcaggatcctataaaattggttccaaggtcattaagattgcctgggctttgaacaaaggtgtaaagacagaatacaaacagttctgggacgtggatcttggagtcacatatataccctgggaaaaagttaaagtagatgacttggatggctttgcagagggaggcatgattgatcaggaaactgtaaatgctgaatgggaaactgtgaaaacctcagaacccgttaaagagactgtccagacgacacagagtccagctgcagttgagaaggagacagtggtcacaacgcagtcagaggttttccctcctcctgtcaccatgctgcagattcctgtagcaccaaccgttcctgcagttagcttagttccaccagcgtttcctgtgtcgatgcctgtcccccctcctggattcagccccatccctccacctccttttctacgagcaagttttaacccttcacaaccacctcctggttttatgccacctccagttcccccacctgtggtacctccccctgcaatcccacccgtagtaccaacatctttagtgcaaccaccattgtctatgaccccagaaactgtgaaagatgttggatttggcagccttgttttaccaggtggttctgttgctggcaatcttgctccttcaactctaccagctggaaatgtttttaatcctcccagtaaagcagagcctgaagaaaaagtacctcaccttacagaacaccagattccttctggtgagaataccagaccagtgattccaagtgatattccaagcagtgctccaatgttagcacagccgcctggggcctcaaacacctctgggatcctgtgcgtgcagagaccaaacgtatcaagcaattctgaaattctgggggttcgtccagccaatgtttccaacagtgctgcgattatgggagcccagccaccaaatatgctcaataactctggaattttgggcatacagccaccaaatgtgtccagtggctctggacttcttggggtactgcctccaaacttgcctaacaactctggacttgtaggactacagccaccaaatgttacaaatcctgctggacttttgggaacacagccaccaattggacctcaaaacttaccccctttaaccatccctgctcaaaggatgcctgcgttgccaatgttagacattcgtccgggactgatagcacaggctcctgggccaagattccctttactacagcctggaattccaccacaacggggtatccctcccccatcggtacttgacgcagctcttcatccaccaccccgtggaccttttcctccaggggatctttttagtcagccagaaagaccttttctggctcctggaagaccaaatatagacagtgttcctaacccagataaaagaataccacttgggaatgacaatatccagcaggaaggggatagagattaccgctttcctcctatagaaaccagggagggcattaatagacctcctccagtggatgttagggatgtggttggacgacctatagatcccagagaaggccctggtaggcctccgttagatggtagggatcattttggaagacctccagtggacatgagagagactcttgtgaggccaggtctagaccaccttggccgaagagaccactttggctttcccccagaaaagccttgggggcctagagatttcgatgagagagagcaccgagttctgcctgtctttggtggtccaaagggcttacatgaagaaagaggcagatttcgggctggaaattatcgatttgatcctagaagtggtccttggaacagaggatttggacaagaagttcacagagattttgatgaccgcagaagaccctgggagaggcagagggatagggatgacagagattttgatttctgcagagaaattaatgggaatcgtcttggacgagatagaattcaaaacacttgggttccccctcctcatgctcgggtttttgattatttcgaaggggccacttctcaacggaaaggtgagaatgtgcctcaagttaatggtggaaatacagagagacatgctccgccaccgcctttgccagtgcagaaggaccctgaactctatgagaagctggcgtcttcaggagacgcagacaaggaggagagcggcacagctgctggtgtagagagtgaagcggtggtagaaagcacagagactgaggggacataacatcgctcagtaggtaaaagaaaccttttgtacagttgtcatctctgtaagaggttaatggctgactgcaccacagttgttcacgtttatctaccagaactaagttaatctgatgtacgtgttcacctttctcttaaaataattgtacaactgacttgtatagacattgttcttaatatgaacatggtaggtaaacatttttttatttttctgataaagtataaatgttgccccagattcttttaacgtcaaggagatgctaacagcttgtcgagacttcctatggaagagaaggttttagacacagtcattgggatgggtatggcaatgacatatttcagaacagcaaggtgtggcacatctccatatctctaggctgctgcagggttttaaggtgacagacaaagctgtgatattttatgcaaggactggctctagattcttgaggagcataatacagagattttaaaaagtgattttgtaaaaatctccactatggtctctgttactccaaagtaagtgtgtgtgatttgttcctcatactgcagtaagtaaaaaagaaaagaagcaaacaacataaacattcaaatacgttttaatgttgggtgaattttgtttttagatgccaataaaacttatttgtttgaaaaaaaaaaaaaaaaaaa

SEQ ID NO: 11912 - protein, 1269 aa, Rattus norvegicus
  misc_feature (1)..(1269): Xaa=Unknown amino acid
MEAVKTFNSELYSLNDYKPPISKAKMTQITKAAIKAIKFYKHVVQSVEKFIQKCKPEYKVPGLYVIDSIVRQSRHQVGQEKDVCAPRFSNNIISTFQNLYRCPGDDKSKIVRVLNLWQKNNVFKSEIIQPLLDMAAGIPPPVVTPVLASTTVAMSNTPGTPVTPVTPANVVQGLPDPWVSQITNTDTLAAVAQILQSPQGQQLQQLIQTLQIQQQKPQPSILQALDAGLVVQLQALTAQLTAAAAAANTLTPLDQGVSFNKKLMDRFDFGEDSEHSEESKKEIPTPQLSHVSESVNNSIFHQIAEQLQQQNLEQLRQQLLEQQQPQKVTPQDSQEGAFGSEHSASPSQGSSQQHFLEPEANLDDSIDIQQQDMDIDEGQDVVEEEIFEPEAKKVAVRSRSRTHSRSRSRSPRKRRSRSRSGSRKRKHRKRSRSRSRERKRKSSRSYSSERRAREREKERQKKGLPPVRSKTLSVCSTTLWVGQVDKKATQQDLTNLFEEFGQIESINMIPPRGCAYVCMVHRQDSFRALQKLSSGSYKIGSKVIKIAWALNKGVKTEYKQFWDVDLGVTYIPWEKVKVDDLDGFAEGGMIDQETVNAEWETVKTSEPVKETVQTTQSPAAVEKETVVTTQSEVFPPPVTMLQIPVAPTVPAVSLVPPAFPVSMPVPPPGFSPIPPPPFLRASFNPSQPPPGFMPPPVPPPVVPPPAIPPVVPTSLVQPPLSMTPETVKDVGFGSLVLPGGSVAGNLAPSTLPAGNVFNPPSKAEPEEKVPHLTEHQIPSGENTRPVIPSDIPSSAPMLAQPPGASNTSGILCVQRPNVSSNSEILGVRPANVSNSAAIMGAQPPNMLNNSGILGIQPPNVSSGSGLLGVLPPNLPNNSGLVGLQPPNVTNPAGLLGTQPPIGPQNLPPLTIPAQRMPALPMLDIRPGLIAQAPGPRFPLLQPGIPPQRGIPPPSVLDAALHPPPRGPFPPGDLFSQPERPFLAPGRPNIDSVPNPDKRIPLGNDNIQQEGDRDYRFPPIETREGINRPPPVDVRDVVGRPIDPREGPGRPPLDGRDHFGRPPVDMRETLVRPGLDHLGRRDHFGFPPEKPWGPRDFDEREHRVLPVFGGPKGLHEERGRFRAGNYRFDPRSGPWNRGFGQEVHRDFDDRRRPWERQRDRDDRDFDFCREINGNRLGRDRIQNTWVPPPHARVFDYFEGATSQRKGENVPQVNGGNTERHAPPPPLPVQKDPELYEKLASSGDADKEESGTAAGVESEAVVESTETEGTX

SEQ ID NO: 11913 - DNA, 4664 bp, Homo sapiens
  ref <308>: DATABASE ACCESSION NUMBER: EMBL / AB029039
  ref <309>: DATABASE ENTRY DATE: 1999-08-04
gccgctgagggagcccttccccgccagcgcgtgcccttccactccgccccgaggtcgcagcggcccgctctcccgccagcgccccctcctcgcggccacgcagcagcccgcgtctcgctctccccacccagtgcagtggccgccgcctcttccgccgccgggctcggggcctccgcagcgacaacatggaggccgtgaagaccttcaatagcgagttgtattccctgaatgactataaaccacccatttcgaaagcgaaaatgacccaaattactaaggcagccatcaaagctattaagttctataaacatgtggtacagagtgttgagaagtttattcagaaatgtaaaccagaatacaaagtacctggactttatgttattgactccattgtgcgacaatcccgacatcagtttggtcaagaaaaggatgtgtttgcacccagatttagtaataacatcattagcactttccagaatttatatcgttgccctggggatgacaagagtaaaatagtgagagtactaaacttatggcagaagaataatgtatttaagagtgagattattcagccccttttggatatggcagccgggattccgcctccagttgtcacacctgttttggccagcactaccactgctatgagcaatactccaggaactcctgtgacacctgttactccggccaatgtggtccaaggcttacctgatccgtgggtatctcagataacaaatacagatacacttgcggctgtagctcagatcttgcaaagtcctcaaggccagcagcttcaacaattaatacaaaccttacagatacaacaacagaagccccagccttccattctgcaggccctagatgctggtcttgttgttcagttgcaagctcttacggcacaacttacagctgcagctgcagctgccaacactcttactcccttagaacagggagtctcctttaacaagaagttgatggataggtttgattttggggaagactctgagcatagtgaagaacccaaaaaggaaattccagcttcacaactttctcacgtttcagaatctgtgaacaattccatttttcatcagatagcagaacaactacaacagcaaaacctagaacatctcagacagcagctcttggagcagcaacagcctcaaaaggccactcctcaggatagtcaggaaggaacctttgggtcagagcattcagcgtcaccatcacaagggagtagtcagcagcattttcttgaacctgaagtcaatttggatgattccatagatattcagcaacaggatatggatatagatgaagggcaagatggagtggaagaggaggtctttgaacaagaagctaagaaagtggcggttcgctcaagatcaagaacacattcacgatctcgttcaagatcaccaagaaaacgaaggtctaggtcacggtctggctctagaaagcgtaaacacagaaagcgatcacgctcccgctcaagagaaagaaagaggaaatcatcacggtcgtattcaagtgaaaggagagccagagaaagggagaaagaacgacagaaaaagggattacctccaattagatctaaaacactaagtgtatgtagtactactctctgggttgggcaagtggacaagaaggcaacacagcaagacttaaccaacctgtttgaagagtttggacagattgaatccattaatatgattcctccccggggctgtgcttatgtctgcatggttcatcgacaagatgcatttcgagctcttcagaaactcagttctggatcatataaaattgggtccaaggtcattaagattgcttgggctttaaacaaaggtgtaaaaacagaatacaaacaattctgggatgtggatcttggagttacatatataccatgggaaaaagttaaagtggatgacttggaaggttttgcagaaggaggcatgattgatcaggagactgtaaatactgagtgggaaactgtgaaaagctcagaacctgttaaagagacggtccagacaactcagagcccaactccagttgaaaaggagacagtggtcacaacccaggcagaggttttccctcctcctgttgctatgttgcagattccagtggcgccagccgtgcctacagttagtttagtcccaccagcatttcctgtgtcgatgccggttcctcctcctggattcagtccaatccctccacctccttttttaagagcaagttttaacccttcacaaccaccacctggtttcatgccgcctccagttcccccacctgttgtgccaccccctacgattccaccagtagtaccaacatctttagtgcagccgtcattatccatgacaccggaaactgtgaaagatgttggatttggtagccttgttataccaggcggttctgttgccagcaatcttgctacttccgctctgccagctggaaatgtttttaatgctccaactaaacaggcagagcctgaagaaaaagtacctcatcttatagaccaccagatttcttctggtgaaaacaccagatcagtgattccaaatgatatttcaagtaatgctgcaattttaggaggacagccgccaaatgtgacaagcaattctggaattctgggagtccaaagaccaaatgtatcaagtaattctgaaattcttggggtccggccatctaatgtttccagtagttctgggattattgcagcccaaccaccaaatattctaaataactctggaatattgggaatacagccacccagtgtgtcaaatagttctggacttttgggagtgctacccccaaatatacctaacaattctggacttgtaggagtacagccaccaaatgttccaaatactcctggacttctgggaacacagccaccagctggacctcaaaacttaccccctttaagtatccctaatcaaaggatgcccacaatgccaatgttagacattcgtccgggactaataccacaggcacctgggccaagattccctttaatacagcctggaattccaccccaacggggaatcccacccccatcggtacttgattcagctcttcatccaccaccccgtggaccttttcctccaggagatatttttagtcaaccagaaagaccttttttagctcctggaagacaaagcgtagacaatgttactaacccagaaaaaaggataccacttgggaatgataacattcaacaggaaggagatagagattaccggtttcctcctatagaaaccagggaaagcattagtagacctccccctgtggatgttagagatgtggttgggcggcctatagatccaagagaaggtcctggacggcctccactagatggtagggatcattttggaagacctcctgtagatataagagagaatcttgtgaggccaggtatagatcatcttggtcgaagagaccactttggctttaatccagagaagccctgggggcatagaggagattttgatgagagagagcatcgggttctaccggtctatggtggtccaaaaggcttacatgaagaaagaggtagatttcggtctggaaactatcgatttgatcctagaagtggtccttggaaccgaggatttggacaagaagttcacagagattttgatgaccgcagaagaccctgggagaggcaaagggatagggatgacagagattttgatttctgcagagaaatgaatggaaatcgtcttggacgagacagaattcaaaacacttgggttccccctcctcatgctcgggtttttgattattttgaaggggccacttctcaacgaaaaggtgataatgtgcctcaggttaatggtgaaaatacagagagacatgctcagccaccacctataccagtacagaatgatcctgaactttatgaaaaactgacatcttcaaatgaaataaacaaggagaagagtgacacagttgctgatatagaaagtgaaccagtggtagaaagcacagaaactgaggggacataatcatcactcagtaggtaaaagataccttttgtaaagttgtcatctctctgtaatagataatggctgactggaccatagttgttcacttttgtctgccagaattaagttaatctgatgttcatgttcacctttctcttaaaataattgtacaactgacttgtatagacattgttcttaatatgaacatggtaggtaaactttttttttatttttttctgataaaatacaaatgttggccccagattcttttaacgtcaaggaaatgaataacagcttgtcagagacttcctatggaagaaagaattttttagatactatcattaggttggatatggtaatagatatatttcagaatagcaagtggtggtatatcttatccatatctttaggctgctgcagaattttaaggttatagataaagctgtgatattttatgcaaagactggctctaggtatttgaggagcacaatacagagattttaaaaagtgattttgtaaaatctacactatggtctctgtttctccaaagtaagtgtttgtgatttgttcctcatactgcagtgagtaaaaaagaaacaagaaaacaacaacataaatattaaagtacgtttcaatgttgggtgaattttgtttttagatgccaataaaacttatttgtttgat

SEQ ID NO: 11914 - protein, 1272 aa, Homo sapiens
  misc_feature (1)..(1272): Xaa=Unknown amino acid
MEAVKTFNSELYSLNDYKPPISKAKMTQITKAAIKAIKFYKHVVQSVEKFIQKCKPEYKVPGLYVIDSIVRQSRHQFGQEKDVFAPRFSNNIISTFQNLYRCPGDDKSKIVRVLNLWQKNNVFKSEIIQPLLDMAAGIPPPVVTPVLASTTTAMSNTPGTPVTPVTPANVVQGLPDPWVSQITNTDTLAAVAQILQSPQGQQLQQLIQTLQIQQQKPQPSILQALDAGLVVQLQALTAQLTAAAAAANTLTPLEQGVSFNKKLMDRFDFGEDSEHSEEPKKEIPASQLSHVSESVNNSIFHQIAEQLQQQNLEHLRQQLLEQQQPQKATPQDSQEGTFGSEHSASPSQGSSQQHFLEPEVNLDDSIDIQQQDMDIDEGQDGVEEEVFEQEAKKVAVRSRSRTHSRSRSRSPRKRRSRSRSGSRKRKHRKRSRSRSRERKRKSSRSYSSERRAREREKERQKKGLPPIRSKTLSVCSTTLWVGQVDKKATQQDLTNLFEEFGQIESINMIPPRGCAYVCMVHRQDAFRALQKLSSGSYKIGSKVIKIAWALNKGVKTEYKQFWDVDLGVTYIPWEKVKVDDLEGFAEGGMIDQETVNTEWETVKSSEPVKETVQTTQSPTPVEKETVVTTQAEVFPPPVAMLQIPVAPAVPTVSLVPPAFPVSMPVPPPGFSPIPPPPFLRASFNPSQPPPGFMPPPVPPPVVPPPTIPPVVPTSLVQPSLSMTPETVKDVGFGSLVIPGGSVASNLATSALPAGNVFNAPTKQAEPEEKVPHLIDHQISSGENTRSVIPNDISSNAAILGGQPPNVTSNSGILGVQRPNVSSNSEILGVRPSNVSSSSGIIAAQPPNILNNSGILGIQPPSVSNSSGLLGVLPPNIPNNSGLVGVQPPNVPNTPGLLGTQPPAGPQNLPPLSIPNQRMPTMPMLDIRPGLIPQAPGPRFPLIQPGIPPQRGIPPPSVLDSALHPPPRGPFPPGDIFSQPERPFLAPGRQSVDNVTNPEKRIPLGNDNIQQEGDRDYRFPPIETRESISRPPPVDVRDVVGRPIDPREGPGRPPLDGRDHFGRPPVDIRENLVRPGIDHLGRRDHFGFNPEKPWGHRGDFDEREHRVLPVYGGPKGLHEERGRFRSGNYRFDPRSGPWNRGFGQEVHRDFDDRRRPWERQRDRDDRDFDFCREMNGNRLGRDRIQNTWVPPPHARVFDYFEGATSQRKGDNVPQVNGENTERHAQPPPIPVQNDPELYEKLTSSNEINKEKSDTVADIESEPVVESTETEGTX

SEQ ID NO: 11915 - DNA, 1749 bp, Rattus norvegicus; identical to SEQ ID NO: 8630
  ref <308>: DATABASE ACCESSION NUMBER: EMBL / U50736
  ref <309>: DATABASE ENTRY DATE: 1999-02-01

SEQ ID NO: 11916 - protein, 320 aa, Rattus norvegicus; identical to SEQ ID NO: 8631
  misc_feature (1)..(320): Xaa=Unknown amino acid

SEQ ID NO: 11917 - DNA, 476 bp, Homo sapiens; identical to SEQ ID NO: 8632
  ref <308>: DATABASE ACCESSION NUMBER: EMBL / BF081129
  ref <309>: DATABASE ENTRY DATE: 2001-08-31

SEQ ID NO: 11918 - DNA, 3273 bp, Rattus norvegicus
  ref <308>: DATABASE ACCESSION NUMBER: EMBL / U51898
  ref <309>: DATABASE ENTRY DATE: 2000-03-04
gaattcggcacgagcttatctggcctccttgagtgttcccggcttctgtcctttgatcccctggcgtccccaactcccatccggtgaccgattcttctccgttgccgccctcagtttccctaacttcctaaatcaacccatcccccaatcattgcccgactttcaccctggacggtccactgtccccagctcctccctctgcgcttctgagtggccctgattttctgcctcattgcccgatttcccccccaacaccacctgtttcctgcgtccctccctttatgcccaccccccaacgcccatttctaactctctgcttatcttgtgcctccgcgtttcttctgctcccacgtgttttctagcgtccagtcctgggttcacctctagctcccacagatgacctggaagctggtggcagggagctgtgacccagagcacaggggcaggctgggtcgcctacctgtcccacataggatgcagttctttggacgcctcgttaacaccctcagtagtgtcaccaacttgttctcaaacccattccgggcaaaggaggtgtccttggctgactatgcctcaagtgaacgtgttcgagaggaagggcagctgatcctgttgcagaatgcttccaatcgtacctgggactgtgatctggtcagccctaggaacccacagagtgacttccgactcttccaactggagtcagaggcagacgtcctggtgaacttccagcagtattcctcccagctgccaccgttctatgagagctctgagcaggtcctgcatgtggaggtgctgcagctgacggacctcattcggaaccaccccagctggacagtgacgcacctggccgtggaacttggcattcgggagtgtttccatcacagccgcatcatcacgtgcgccaacagcacagagaatgaggagggctgtaccccactacatctggcctgccgcaagggtgacagtgagattctggtggagttggtacagtactgccacgcccagatggatgtcactgacaacaaaggagagaccgccttccattacgctgtgcaaggggacaatccccaggtgctacagctcctaggaaagaatgcctcagccggcctgaaccaggtgaacaaccaagggctgacgccgctgcacctggcctgccagatggggaagcaggagatggtgcgtgtcctgctgctctgcaatgcccgctgcaacatcatggggcccggtggcttccccatccacacagccatgaagttttcccagaaggggtgtgctgaaatgattatcagcatggacagtaaccagatccacagcaaggatcctcgctatggagccagcccgctccactgggccaagaacgctgagatggcccgaatgcttctgaagaggggctgtgacgtggacagcacaagtgcctcggggaacacagccctgcacgtggctgtgacgcgcaaccggtttgactgtgtcatggtgctgctgacctatggggccaacgcaggtgcccgaggagagcatgggaacacaccactgcatctggccatgtcgaaagataacatggagatggtcaaagccctcattgtatttggggcagaagtagacaccccgaatgactttggggagactcctgcattcatagcttccaagatcagcaagcagcttcaggacctcatgcccgtctcccgagcccggaagccagcgttcatcctgagctccatgagggatgagaagcgaacgcatgaccacctgctctgcttggacggagggggcgtgaagggcctggtcatcatccagcttctcattgccattgagaaggcctcaggtgtggctaccaaggacctcttcgactgggtggcaggaaccagcacaggcggcatcctggccctggccattctacacagtaaatccatggcctatatgcgtggcgtgtacttccgtatgaaggatgaggtgtttcggggctcacggccctatgagtctgggcccctggaggagttcctgaagcgtgagtttggggagcacaccaagatgacagatgtcaagaaacccaaggtgatgctgacagggacactgtcagaccggcagccagcagagctccacctcttccggaattacgatgccccagaggccgttcgggaacctcgctgtaccccaaacattaacctgaagccgcccacccagcctgcagaccagttagtatggcgggcagcccggagcagtggggcagccccaacctatttccggcccaatggacgcttcttggatggtgggctgctggccaacaaccccacactggatgccatgactgaaatccatgagtacaatcaggatatgatccgcaagggccagggcaacaaggtgaagaaactctccatagtcgtgtctctgggtacaggaaagtcccctcaagtgcctgtaacctgtgtagatgtctttcgtcccagcaacccttgggaactggccaagactgtttttggagccaaggaactgggcaagatggtggtggactgttgcacagatccagatgggcgggctgtggatcgtgcccgggcctggtgtgagatggtcggtatccagtacttcaggctgaacccccagctaggctcagacatcatgctggacgaggtcagtgatgcagtgctggtcaacgccctctgggagaccgaggtctacatctatgagtaccgggaggagttccagaagcttgtccagctgctgctatctccctgagcccggcctgctggcaggagtggccggcgtggcacactgcggccaggctggcctgccgctccatgtccatctgagactagggctcggagcgggcagttccccatgaggtacctctcctgatccatccgcactttactaatccagctgaaagcccagagttccctcggccccttcccctgactatgaaggacaactgattccatctactacccatatatcagagatcaacactaagggccagtgtcgagagggccctcccaggctccctggccactgctgcccaccccctctcccacttcctgatgtcagggattagagaaatgttccaccccgtcatcaggtgaaatccaggctaatgaaacccagcgccattctgccattcgactttgcccctcgcacctgcagcctctccaccctgcagccgccccacaaggagcgctcctagctcccaaaggtcaatcctgtgcacatgctcttctctggaaggagagtggggagggctcaaggccacctcaactgtgaaataaacggttttacactcaa

SEQ ID NO: 11919 - protein, 751 aa, Rattus norvegicus; identical to SEQ ID NO: 1043
  ref <308>: DATABASE ACCESSION NUMBER: SWISS-Prot / P97570
  ref <309>: DATABASE ENTRY DATE: 2002-06-15

SEQ ID NO: 11920 - DNA, 2392 bp, Homo sapiens
  ref <308>: DATABASE ACCESSION NUMBER: EMBL / AK001290
  ref <309>: DATABASE ENTRY DATE: 2002-08-06
tgctgtccagggtgacaattctcaggtgctgcagctccttggaaggaacgcagtggctggcctgaaccaggtgaataaccaagggctgaccccgctgcacctggcctgccagctggggaagcaggagatggtccgcgtgctgctgctgtgcaatgctcggtgcaacatcatgggccccaacggctaccccatccactcggccatgaagttctctcagaaggggtgtgcggagatgatcatcagcatggacagcagccagatccacagcaaagacccccgttacggagccagccccctccactgggccaagaacgcagagatggcccgcatgctgctgaaacggggctgcaacgtgaacagcaccagctccgcggggaacacggccctgcacgtggcggtgatgcgcaaccgcttcgactgtgccatagtgctgctgacccacggggccaacgcggatgcccgcggagagcacggcaacaccccgctgcacctggccatgtcgaaagacaacgtggagatgatcaaggccctcatcgtgttcggagcagaagtggacaccccgaatgactttggggagactcctacattcctagcctccaaaatcggcagacttgtcaccaggaaggcgatcttgactctgccgagaaccgtgggggccgaatactgcttcccacccatccacggggtccccgcggagcagggctctgcagcgccacatcatcccttctccctggaaagagctcagcccccaccgatcagcctaaacaacctagaactacaggatctcatgcacatctcacgggcccggaagccagcgttcatcctgggctccatgagggacgagaagcggacccacgaccacctgctgtgcctggatggaggaggagtgaaaggcctcatcatcatccagctcctcatcgccatcgagaaggcctcgggtgtggccaccaaggacctgtttgactgggtggcgggcaccagcactggaggcatcctggccctggccattctgcacagtaagtccatggcctacatgcgcggcatgtactttcgcatgaaggatgaggtgttccggggctccaggccctacgagtcggggcccctggaggagttcctgaagcgggagtttggggagcacaccaagatgacggacgtcaggaaacccaaggtgatgctgacagggacactgtctgaccggcagccggctgaactccacctcttccggaactacgatgctccagaaactgtccgggagcctcgtttcaaccagaacgttaacctcaggcctgcagggctgcctctgcccctttccctgactgtcaaggacaactgactcccccatcagctcctacttacttccgacccaatgggcgcttcctggacggtgggctgctggccaacaaccccacgctggatgccatgaccgagatccatgagtacaatcaggacctgatccgcaagggtcaggccaacaaggtgaagaaactctccatcgttgtctccctggggacagggaggtccccacaagtgcctgtgacctgtgtggatgtcttccgtcccagcaacccctgggagctggccaagactgtttttggggccaaggaactgggcaagatggtggtggactgttgcacggatccagacgggcgggctgtggaccgggcacgggcctggtgcgagatggtcggcatccagtacttcagattgaacccccagctggggacggacatcatgctggatgaggtcagtgacacagtgctggtcaacgccctctgggagaccgaggtctacatctatgagcaccgcgaggagttccagaagctcatccagctgctgctctcaccctgagggtccccagcctctcaccggccccagctgacctcgtccattcagcccctgccaggccaagcccagccactgccctcccgggcagatctgggcccaggcacctctgagtccatagaccaggcctgggagaatgccaagctgcctgcccgaggctggtcctgaaggcctgtctcccactaaccccgccttccagcactttctgtcattccaggctgggaaagtctagagccccctttggcccctttccctgactgtcaaggacaactgactcccaggcttcctggtgggtgcagcccactccctctgccctctgctccgttccctgggggctgggactaaagaaatgggtgtcccccaccccatcagctgggaaagcccaggccgcaggagtgggatgcccgttggactttgcccctcacactggcccagcccctcacactgccccaccccgagaaccctcagctctcaaaggtcactcctgggagtttcttcttcccaatggaagtggcttaagagccaaaactgaaataaatcatttggattc

SEQ ID NO: 11921 - DNA, 2006 bp, Rattus norvegicus; identical to SEQ ID NO: 8661
  misc_feature (1)..(2006): n=a, c, g or t
  ref <308>: DATABASE ACCESSION NUMBER: EMBL / U53184
  ref <309>: DATABASE ENTRY DATE: 1998-02-14

SEQ ID NO: 11922 - DNA, 2368 bp, Homo sapiens; identical to SEQ ID NO: 8662
  ref <308>: DATABASE ACCESSION NUMBER: EMBL / AB034747
  ref <309>: DATABASE ENTRY DATE: 2001-06-22

SEQ ID NO: 11923 - protein, 228 aa, Homo sapiens; identical to SEQ ID NO: 8663
  ref <308>: DATABASE ACCESSION NUMBER: SWISS-Prot / Q99732
  ref <309>: DATABASE ENTRY DATE: 2001-10-16

SEQ ID NO: 11924 - DNA, 2917 bp, Rattus norvegicus
  ref <308>: DATABASE ACCESSION NUMBER: EMBL / U53858
  ref <309>: DATABASE ENTRY DATE: 2000-03-04
cccagggaccgcagcaatctcccaaactccccttccccaggatggcagaggagttaatcacacctgtgtactgcaccggggtgtcagcccaagtgcagaagcaacgggacaaggagttgggcttgggccgccatgaaaatgccatcaagtacctgggccaggattatgaaaatcttcgtgcaagatgcctgcagaacggggtcctcttccaagacgatgccttccctccagtttctcatagcttgggcttcaaggaactgggtcccaattcctctaaaacctatggcatcaagtggaagcgtcctacggaactgctgtcaaacccccagttcatcgtggatggagccacccgaacggacatctgccagggagcactgggggactgttggctcctggctgccattgcctcgctcactctcaacgagactatcctccaccgagtggttccctacggccagagcttccaggagggctatgctggcatctttcatttccagctgtggcagtttggggagtgggtagatgtggttgtggatgatttgctacccaccaaggatggaaagctggtgttcgtgcactctgcccagggcaacgagttctggagcgctctcctggagaaagcctatgcaaaagtgaatggcagctatgaggccctttcgggaggctgcacctcagaggccttcgaggactttaccggtggggtcactgagtggtacgatctgcagaaggcacccagcgacctctaccagatcattctgaaggccctggaacgaggctccttgctgggctgctccattaatatttccgatatccgtgatttggaggctattacttttaagaacctggtgaggggccatgcatactctgtgacggatgccaagcaggtcacttaccagggccagcgggtgaacctaatccggatgcggaacccctggggtgaagtggagtggaaaggaccctggagtgacaactcctatgagtggaacaaagtggacccctatgaacgtgagcagctgagggtcaagatggaggacggggagttctggatgtccttccgggacttcatacgtgagttcaccaaactggaaatctgcaaccttacacctgacgcccttaagagcagaaccctccggaactggaataccacattttacgagggcacctggcgccggggaagcactgctggaggctgcaggaactacccagctaccttctgggtaaacccccagttcaagatccggctggaggaggtggatgacgcagacgactatgacagtcgagagtccggctgcagcttcttgttggccctcatgcagaagcatcgccgcagggagcgtcgctttggccgggacatggagaccattggttttgcagtgtaccaggtccctcgggagttggcgggtcagcctgtgcacttgaagcgtgacttcttcctggccaatgcttctcgggcacaatcagagcactttatcaaccttcgagaggtcagtaaccgcatccgcctgccgccgggggagtatatagtggtgccctccaccttcgagcccaacaaagagggtgactttctgctgcgcttcttttcagagaagaaggctgggacccaggaactagatgaccagatccaggccaacctccccgatgagaaagtgctctctgaagaggagatcgatgacaacttcaaaaccctgttcagcaagttagcaggggatgacatggagatcagtgtcaaggagttacagaccatcttgaacagaatcattagcaaacacaaagacctgcgcactaacggcttcagcctggagtcgtgccgcagcatggtgaacctcatggatcgagacggtaatgggaaactgggcctggtggagttcaacatcctgtggaaccgcatccgaaattacctgaccatcttccgcaagtttgacctggacaagtctggcagcatgagtgcttatgagatgaggatggccatcgaggctgcaggcttcaagcttaacaagaagctgcatgagctcatcatcacccgctactcagagcccgacctggccgtggactttgacaactttgtgtgctgccttgtgcgcctggagaccatgttccggtttttcaaaattctggacacagacctggatggtgttgtgacctttgatctatttaagtggttacagctgactatgtttgcatgaagcgggatggctcctctgcctgtgttcttccttcttcctctgccaagccacacctccccgccatgccgtaccagaccatgtcagctgccagtgccttccctcaaaaaaaggagggcaccttgtcctcctgtccccttgtcctcctgtcctttcacctccccactacctctgttcaattgctctaggcagagtcacagggcccttcctgcccctgtagctaaggcaaccctgacccctgctcatggctaagagcaggaaggcagctccctgcttactccttcctgcctccggggcaggagtaggcatccctgcccctcccactccctgctactgtccagatgtgtgtctcacctaatctgtggaggctctagcccctgtcatcccctagacctgcagacttcgtaaccactagctagttccttgtctgcacctgggtgttgaaggcctcacctcactatgggagccccacagccagttcaccttcctgtgccttcatgtgcagcagccaagatccctctgcaaaccaaagtacacctctcctgcccgtgtgcccaccaggaacttcctggccgggagggcactcaggccctccgtatccccaccccccttcctctattttttaatatttttcaaggaaatgcttgagggactagtgtactggttatggaggaccaggacctggggggtgggttggggaggtcccatgtttcagtgcagtgggaaaataaaatgaa

SEQ ID NO: 11925 - protein, 713 aa, Rattus norvegicus
  ref <308>: DATABASE ACCESSION NUMBER: SWISS-Prot / P97571
  ref <309>: DATABASE ENTRY DATE: 2002-06-15
MAEELITPVYCTGVSAQVQKQRDKELGLGRHENAIKYLGQDYENLRARCLQNGVLFQDDAFPPVSHSLGFKELGPNSSKTYGIKWKRPTELLSNPQFIVDGATRTDICQGALGDCWLLAAIASLTLNETILHRVVPYGQSFQEGYAGIFHFQLWQFGEWVDVVVDDLLPTKDGKLVFVHSAQGNEFWSALLEKAYAKVNGSYEALSGGCTSEAFEDFTGGVTEWYDLQKAPSDLYQIILKALERGSLLGCSINISDIRDLEAITFKNLVRGHAYSVTDAKQVTYQGQRVNLIRMRNPWGEVEWKGPWSDNSYEWNKVDPYEREQLRVKMEDGEFWMSFRDFIREFTKLEICNLTPDALKSRTLRNWNTTFYEGTWRRGSTAGGCRNYPATFWVNPQFKIRLEEVDDADDYDSRESGCSFLLALMQKHRRRERRFGRDMETIGFAVYQVPRELAGQPVHLKRDFFLANASRAQSEHFINLREVSNRIRLPPGEYIVVPSTFEPNKEGDFLLRFFSEKKAGTQELDDQIQANLPDEKVLSEEEIDDNFKTLFSKLAGDDMEISVKELQTILNRIISKHKDLRTNGFSLESCRSMVNLMDRDGNGKLGLVEFNILWNRIRNYLTIFRKFDLDKSGSMSAYEMRMAIEAAGFKLNKKLHELIITRYSEPDLAVDFDNFVCCLVRLETMFRFFKILDTDLDGVVTFDLFKWLQLTMFA

SEQ ID NO: 11926 - DNA, 1447 bp, Homo sapiens
  ref <308>: DATABASE ACCESSION NUMBER: EMBL / AK025380
  ref <309>: DATABASE ENTRY DATE: 2000-09-29
taaaatactttacttgtacttcctgatgatacaaacaatcctgcccacttcctctgccagatattgcacccactcgtcaggatttgtgcgtccttgactctgccccacccagtgctcccagcaggggcaggtgcaggaagctcactaggtggagatgttggaattggtttttcttgcagacaaagacctgcggaccaagggcttcagcctagagtcgtgccgcagcatggtgaacctcatggatcgtgatggcaatgggaagctgggcctggtggagttcaacatcctgtggaaccgcatccggaattacctggtaggttgtccccactcacctcagtcatgcaggtgcgggccgggcaggtgggaagggccgggtgactcagcctggccctcaccctctgccgccacctcagtccatcttccggaagtttgacctggacaagtcgggcagcatgagtgcctacgagatgcggatggccattgagtcggcaggcttcaagctcaacaagaagctgtacgagctcatcatcacccgctactcggagcccgacctggcggtcgactttgacaatttcgtttgctgcctggtgcggctagagaccatgttccgatttttcaaaactctggacacagatctggatggagttgtgacctttgacttgtttaagtggttgcaactgaccatgtttgcatgaggcagggactcggtcccccttgccgtgctcccctccctcctcgtctgccaagcctcgcctcctaccacaccacaccaggccaccccagctgcaagtgccttccttggagcagagaggcagcctcgtcctcctgtcccctctcctcccagccaccatcgttcatctgctccgggcaggactgtgtggcccctgcctgtgccagccatgggctcgggatggactccctgggccccacccattgccaagccaggaaggcagctttcgcttgttcctgcctcgggacagccccgggtttccccagcatcctgatgtgtcccctctccccacttcagaggccacccactcagcaccaccggcctggccttgcctgcagactataaactataaccactagctcgacacagtctgcagtccaggcgtgtggagccgcctcccggctcggggaggccccggggctgggaacgcctgtgccttcctgcgccgaagccaacgccccctctgtccttccctggccctgctgccgaccaggagctgcccagcctgtgggcggtcggccttccctccttcgctccttttttatattagtgattttaaaggggactcttcagggacttgtgtactggttatgggggtgccagaggcactaggcttggggtggggaggtcccgtgttccatatagaggaaccccaaataataaaaggccccacatctgtctgtgaaaaaaaaaaaaaaaaaaaaaaaaaaaaaaaaa

SEQ ID NO: 11927 - protein, 714 aa, Homo sapiens
  ref <308>: DATABASE ACCESSION NUMBER: SWISS-Prot / P07384
  ref <309>: DATABASE ENTRY DATE: 2002-06-15
MSEEIITPVYCTGVSAQVQKQRARELGLGRHENAIKYLGQDYEQLRVRCLQSGTLFRDEAFPPVPQSLGYKDLGPNSSKTYGIKWKRPTELLSNPQFIVDGATRTDICQGALGDCWLLAAIASLTLNDTLLHRVVPHGQSFQNGYAGIFHFQLWQFGEWVDVVVDDLLPIKDGKLVFVHSAEGNEFWSALLEKAYAKVNGSYEALSGGSTSEGFEDFTGGVTEWYELRKAPSDLYQIILKALERGSLLGCSIDISSVLDMEAITFKKLVKGHAYSVTGAKQVNYRGQVVSLIRMRNPWGEVEWTGAWSDSSSEWNNVDPYERDQLRVKMEDGEFWMSFRDFMREFTRLEICNLTPDALKSRTIRKWNTTLYEGTWRRGSTAGGCRNYPATFWVNPQFKIRLDETDDPDDYGDRESGCSFVLALMQKHRRRERRFGRDMETIGFAVYEVPPELVGQPAVHLKRDFFLANASRARSEQFINLREVSTRFRLPPGEYVVVPSTFEPNKEGDFVLRFFSEKSAGTVELDDQIQANLPDEQVLSEEEIDENFKALFRQLAGEDMEISVKELRTILNRIISKHKDLRTKGFSLESCRSMVNLMDRDGNGKLGLVEFNILWNRIRNYLSIFRKFDLDKSGSMSAYEMRMAIESAGFKLNKKLYELIITRYSEPDLAVDFDNFVCCLVRLETMFRFFKTLDTDLDGVVTFDLFKWLQLTMFA

SEQ ID NO: 11928 - DNA, 1092 bp, Rattus norvegicus; identical to SEQ ID NO: 8676
  ref <308>: DATABASE ACCESSION NUMBER: EMBL / U54632
  ref <309>: DATABASE ENTRY DATE: 1999-01-07

SEQ ID NO: 11929 - protein, 158 aa, Rattus norvegicus [sequence omitted]

SEQ ID NO: 11930 - DNA, 1077 bp, Homo sapiens; identical to SEQ ID NO: 8678
  ref <308>: DATABASE ACCESSION NUMBER: EMBL / U29092
  ref <309>: DATABASE ENTRY DATE: 1999-06-30

SEQ ID NO: 11931 - protein, 158 aa, Homo sapiens [sequence omitted]

SEQ ID NO: 11932 - DNA, 1578 bp, Rattus norvegicus; identical to SEQ ID NO: 8700
  ref <308>: DATABASE ACCESSION NUMBER: EMBL / U56862
  ref <309>: DATABASE ENTRY DATE: 2000-03-04

SEQ ID NO: 11933 - protein, 407 aa, Rattus norvegicus; identical to SEQ ID NO: 8701
  ref <308>: DATABASE ACCESSION NUMBER: SWISS-Prot / Q62981
  ref <309>: DATABASE ENTRY DATE: 2001-10-16

SEQ ID NO: 11934 - DNA, 841 bp, Homo sapiens; identical to SEQ ID NO: 8702
  misc_feature (1)..(841): n=a, c, g or t
  ref <308>: DATABASE ACCESSION NUMBER: EMBL / AL542378
  ref <309>: DATABASE ENTRY DATE: 2001-02-11

SEQ ID NO: 11935 - protein, 292 aa, Homo sapiens; identical to SEQ ID NO: 8703
  ref <308>: DATABASE ACCESSION NUMBER: SWISS-Prot / Q15072
  ref <309>: DATABASE ENTRY DATE: 2002-06-15

SEQ ID NO: 11936 - DNA, 4377 bp, Rattus norvegicus
  ref <308>: DATABASE ACCESSION NUMBER: EMBL / U62897
  ref <309>: DATABASE ENTRY DATE: 1997-09-23
tgcggagccgctggagcggagcggtgttagcggcgttgctggaagatggcgagcggctgggatgagcggccgccctggcggctggaaagcctgcggctgctaccgccgccaccgctgctgctgctactgctgctattgaggagctcggcccaggcggcgcacatcaagaaggctgaggcgaccacgacgaccgtcggcggctccgaggcggccgagggccagtttgaccactactaccacgaagcggcgctgggcgaggcactggaggcggcagcggccgcggggccgcctggcctggcccgtctcttcagcatcggcaattcggtggagggccgaccgctgtgggtgctgcgcctcacggctggcctggggccgccgcccacccccgccgccgtggggctggacgccgcggggccgctgctgcccggccgaccgcaggtgaagctggtgggtaacatgcacggcgacgagacggtgtcgcgccaggtgttggtctacctggcccgtgagctggcgtcgggctaccgccgcggggacccgcgcctggtccgcctgctcaacaccaccgacgtatatttgctgcccagcctgaatccggatggcttcgaacgcgctcgcgagggtgactgcggcctcggcgacagcggtccgcctgggaccagcggccgagacaacagccgaggccgcgacctcaaccgcagcttccctgaccagttcagcacgggggagccaccttccctggatgaggtgccagaggtgcgcgccctcatcgactggatccgcaggaacaagtttgtgctttctggaaatcttcatggtggctcagtggtagcaagctatccttttgatgattctcccgagcataagaccactggaatctatagcaaaacctccgatgatgaagtctttcgatacttggcgaaagcttatgcttctaaccaccctataatgagaactggtgaaccccattgtccaggagatgaagaggagactttcaaagacgggatcacgaacggtgcgcactggtatgatgtggaaggtggtatgcaagattacaactatgtgtgggccaactgttttgagatcacattagaattatcttgctgcaaatacccacctgcttctcagcttcgacaagaatgggagaacaaccgtgagtctttgatcacattgattgaaaaggtccacattggaattaaaggatttgttaaagactcagtcacaggctctgggttggagaatgcaaccatctcagtggctggtattaatcataatatcacaactgggagattcggtgatttccacagactgctcattcctggaagttacaatcttacagcggtttcacctgggtatatgccgttgactattaataatatagtggtgaaagaaggaccagccacagagatagatttctcccttcaaccaactgtgatgtcagtagtgcctgactcgactgaggctgtgacaactcccggcacagttgccgttcctaatattcctcctggaacaccatcgtcccatcagccaattcagcctaaagactttcaccaccaccattttcctgacatggaaatcttcttgagaagatttgccaatgaatatcctaacatcactcgcctttattctctgggaaagtccgtagagtcgagagaactgtatgtgatggagatatctgacaacccaggcgtccatgaaccaggtgaaccagaatttaaatatattggaaatatgcatggaaatgaagtggttggaagagaactgctattgaatctcatcgaatacctctgcaagaactttggaacagaccctgaagtaacagatttggttcgcagcactagaattcacctcatgccatccatgaatcctgatgggtatgagaagtcccaagaaggagactcgataagtgtagttggcagaaacaacagcaacaactttgacctaaaccgaaatttcccagaccagtttgttccgatcacagatcctacccaacctgaaactatcgctgtgatgagctgggtgaaggcctatccgtttgtgctgtcggccaatctgcatggaggttccttggtggttaactacccttatgatgataatgaacaaggagttgccacatacagcaaatcaccagatgacgccgtgtttcaacaaatagcactttcttattccaaggaaaactcgcagatgttccaaggtagaccttgcaaagacatgtaccttaatgagtattttcctcatggcataacgaatggagcgagttggtataatgtcccaggtggtatgcaggactggaactatttacagacgaattgctttgaagtaaccatcgaactaggttgtgtgaaatatccattcgagaaggaactgccaaagtactgggagcaaaaccggagatctctaatccagtttatgaaacaggttcatcagggtgtcaaaggatttgttcttgatgccacagatggtaggggcatattaaatgccaccctcagtgttgctgaaattaatcacccagtgacgacttacaaagctggagattactggcgtctcttggtcccagggacatataaaatcacagcatctgctcgagggtataaccccgtcaccaagaacgtgaccgtcaggagtgaaggtgctattcaggtcaacttcacacttgttcgatcttcaacagatgcaaacaatgagtcaaagaaaggaaaggggcatagcaccagcactgatgacaccagcgacccaacttctaaggagtttgaagcactgatcaaacacctttcggctgagaatggcttggaaggcttcatgttaagctcgtcctcagacctggctctgtatcgataccattcctacaaagacttatccgagttcctgagaggactcgtaatgaactacccacacattacaaaccttaccactttgggacagagtgttgaatatcgtcacatttggtcccttgaaatctccaataagcccaacatatcagaacctgaagaaccgaagattcgttttgttgctggtatccatggaaacgctccagttggcactgaactgcttttggctctggcagaatttctttgcctgaattacaaaaagaatccagttgttacccaattggttgacaggactagaattgtgattgtcccctctctgaatccagatgggagagagcgagcacaggagaaagactgtacctcgaagactgggcacacaaatgcccgtggcagggacctggacacagacttcacaagtaatgcttcccaacctgagaccaaagccatcattgaaaacttgattcaaaaacaggatttcagcctttccattgctttagatggtggttctgtgctggtcacatatccgtacgacaagccagtccagacagtggaaaacaaagaaacgttaaagcatctggcgtctctttatgcaaataaccacccatcaatgcacatgggtcagcccagttgcccaaataattcagatgagaacataccaggaggagtgatgcggggagcagagtggcacagtcacctgggcagcatgaaggattatagtgtcacctatggccattgcccagaaatcacagtatacacaagctgctgctacttcccaagtgcagctcaactccctgccctatgggcagagaacaagaagtctctcctcagcatgctggtggaggtccacaaaggagtccatgggttagtaaaagacaagactggtaaaccaatctctaaagcagtaattgtactcaatgaaggaataagagtacacacaaaagaggggggttatttccatgtgcttttagctcctggggtccataacatcaatgccatcgctgatggatatcagcaacagcattcacaggtctttgtgcatcatgatgcagccagttctgtggtgatagtctttgatacagataaccggatatttggtttgccaagggaacttgtggtaactgtgtcaggtgccaccatgtcagcgctgatcctcacggcttgcatcatttggtgcatctgctctatcaagtctaacagacacaaagatggcttccaccggctgcggcagcatcatgatgaatatgaagatgaaattcgcatgatgtcaactggctctaagaagtcccttttaagccatgagttccaggatgaaacggacacagaggaagagacattatattctagcaaacattgagaagcacggtttgcatatctccctgcttaagtaccaggcaaatgacagctcctcttgggagacactgcagtaagaagagagattccttcctccttcaaagagctttgggaagttagcctgctaaattcatactctctgaatgtcacaggcagttttgaacttcccttccttaaaagtactcttaaccttttcctt

SEQ ID NO: 11937 - protein, 476 aa, Rattus norvegicus; identical to SEQ ID NO: 11115
  ref <308>: DATABASE ACCESSION NUMBER: SWISS-Prot / P15087
  ref <309>: DATABASE ENTRY DATE: 2002-06-15

SEQ ID NO: 11938 - DNA, 541 bp, Homo sapiens
  ref <308>: DATABASE ACCESSION NUMBER: EMBL / BE552042
  ref <309>: DATABASE ENTRY DATE: 2000-08-11
cgtgtactctatctgccactaaaggagagtcaaaggtataaccagccctaaacttcgcagcaatctattcaaagttgcttaacaggctctctagaacgttctagtaataatcctccagaatggagccatgtttgtcctccgagcactctatttcaaagcattcagtcactcaccctcgagcagatgctgtgattttataagttcctggaaccaagagacgccagtaatctccagttttgtaagtagtcactgggtgattaatctcagcaacactaatggtggcatttaatatacccctgccatctgtggcatctagaacaaatcctctgacgccctgatgaacctgtttcataaactggattagtgatcttcgattctgttcccaaaagtttggcagctctttctcaagtggatatttcacacaacctagttcaatagtcacttcaaagcaatttgtttgtaaatagttccagtcctgcattcttcctggcacattataccaactagctccatttgttattccatgaggaaaatattcatt

SEQ ID NO: 11939 - protein, 476 aa, Homo sapiens
  ref <308>: DATABASE ACCESSION NUMBER: SWISS-Prot / P16870
  ref <309>: DATABASE ENTRY DATE: 2002-06-15
MAGRGGSALLALCGALAACGWLLGAEAQEPGAPAAGMRRRRRLQQEDGISFEYHRYPELREALVSVWLQCTAISRIYTVGRSFEGRELLVIELSDNPGVHEPGEPEFKYIGNMHGNEAVGRELLIFLAQYLCNEYQKGNETIVNLIHSTRIHIMPSLNPDGFEKAASQPGELKDWFVGRSNAQGIDLNRNFPDLDRIVYVNEKEGGPNNHLLKNMKKIVDQNTKLAPETKAVIHWIMDIPFVLSANLHGGDLVANYPYDETRSGSAHEYSSSPDDAIFQSLARAYSSFNPAMSDPNRPPCRKNDDDSSFVDGTTNGGAWYSVPGGMQDFNYLSSNCFEITVELSCEKFPPEETLKTYWEDNKNSLISYLEQIHRGVKGFVRDLQGNPIANATISVEGIDHDVTSAKDGDYWRLLIPGNYKLTASAPGYLAITKKVAVPYSPAAGVDFELESFSERKEEEKEELMEWWKMMSETLNF

SEQ ID NO: 11940 - DNA, 4189 bp, Rattus norvegicus; identical to SEQ ID NO: 8778
  ref <308>: DATABASE ACCESSION NUMBER: EMBL / U65007
  ref <309>: DATABASE ENTRY DATE: 1996-11-22

SEQ ID NO: 11941 - protein, 1382 aa, Rattus norvegicus; identical to SEQ ID NO: 8779
  ref <308>: DATABASE ACCESSION NUMBER: SWISS-Prot / P97523
  ref <309>: DATABASE ENTRY DATE: 2002-06-15

SEQ ID NO: 11942 - DNA, 432 bp, Homo sapiens; identical to SEQ ID NO: 8780
  ref <308>: DATABASE ACCESSION NUMBER: EMBL / U11813
  ref <309>: DATABASE ENTRY DATE: 2001-10-27

SEQ ID NO: 11943 - protein, 1390 aa, Homo sapiens [sequence omitted]

SEQ ID NO: 11944 - DNA, 3053 bp, Rattus norvegicus; identical to SEQ ID NO: 8790
  ref <308>: DATABASE ACCESSION NUMBER: EMBL / U65656
  ref <309>: DATABASE ENTRY DATE: 2000-03-04

SEQ ID NO: 11945 - protein, 662 aa, Rattus norvegicus; identical to SEQ ID NO: 8791
  ref <308>: DATABASE ACCESSION NUMBER: SWISS-Prot / P33436
  ref <309>: DATABASE ENTRY DATE: 2002-06-15

SEQ ID NO: 11946 - DNA, 758 bp, Homo sapiens; identical to SEQ ID NO: 8792
  misc_feature (1)..(758): n=a, c, g or t
  ref <308>: DATABASE ACCESSION NUMBER: EMBL / AU123141
  ref <309>: DATABASE ENTRY DATE: 2002-08-06

SEQ ID NO: 11947 - protein, 408 aa, Homo sapiens; identical to SEQ ID NO: 8793
  ref <308>: DATABASE ACCESSION NUMBER: SWISS-Prot / P05455
  ref <309>: DATABASE ENTRY DATE: 2002-06-15

SEQ ID NO: 11948 - DNA, 556 bp, Rattus norvegicus; identical to SEQ ID NO: 8820
  ref <308>: DATABASE ACCESSION NUMBER: EMBL / U67207
  ref <309>: DATABASE ENTRY DATE: 2000-03-04

SEQ ID NO: 11949 - DNA, 2991 bp, Homo sapiens; identical to SEQ ID NO: 8821
  ref <308>: DATABASE ACCESSION NUMBER: EMBL / U52912
  ref <309>: DATABASE ENTRY DATE: 1999-06-30

SEQ ID NO: 11950 - protein, 1165 aa, Homo sapiens; identical to SEQ ID NO: 8822
  ref <308>: DATABASE ACCESSION NUMBER: SWISS-Prot / P48357
  ref <309>: DATABASE ENTRY DATE: 2002-06-15

SEQ ID NO: 11951 - DNA, 410 bp, Rattus norvegicus; identical to SEQ ID NO: 8831
  ref <308>: DATABASE ACCESSION NUMBER: EMBL / U67994
  ref <309>: DATABASE ENTRY DATE: 2000-03-04

SEQ ID NO: 11952 - protein, 29 aa, Rattus norvegicus
  ref <308>: DATABASE ACCESSION NUMBER: SWISS-Prot / AAB39619
  ref <309>: DATABASE ENTRY DATE: 2001-12-01
VKVFEQFLENLDKSRKGALLKKSDLQKDF

SEQ ID NO: 11953 - DNA, 1399 bp, Homo sapiens; identical to SEQ ID NO: 8833
  ref <308>: DATABASE ACCESSION NUMBER: EMBL / X74330
  ref <309>: DATABASE ENTRY DATE: 1994-11-14

SEQ ID NO: 11954 - protein, 420 aa, Homo sapiens; identical to SEQ ID NO: 8834
  ref <308>: DATABASE ACCESSION NUMBER: SWISS-Prot / P49642
  ref <309>: DATABASE ENTRY DATE: 2002-06-15

SEQ ID NO: 11955 - DNA, 3348 bp, Rattus norvegicus; identical to SEQ ID NO: 8891
  misc_feature (1)..(3348): n=a, c, g or t
  ref <308>: DATABASE ACCESSION NUMBER: EMBL / U75916
  ref <309>: DATABASE ENTRY DATE: 2000-07-30

SEQ ID NO: 11956 - DNA, 1811 bp, Homo sapiens; identical to SEQ ID NO: 8892
  ref <308>: DATABASE ACCESSION NUMBER: EMBL / AK025185
  ref <309>: DATABASE ENTRY DATE: 2000-09-29

SEQ ID NO: 11957 - DNA, 1719 bp, Rattus norvegicus; identical to SEQ ID NO: 8911
  ref <308>: DATABASE ACCESSION NUMBER: EMBL / U76252
  ref <309>: DATABASE ENTRY DATE: 2000-03-04

SEQ ID NO: 11958 - protein, 568 aa, Rattus norvegicus; identical to SEQ ID NO: 8912
  ref <308>: DATABASE ACCESSION NUMBER: SWISS-Prot / P07314
  ref <309>: DATABASE ENTRY DATE: 2002-06-15

SEQ ID NO: 11959 - DNA, 2444 bp, Homo sapiens; identical to SEQ ID NO: 8913
  ref <308>: DATABASE ACCESSION NUMBER: EMBL / AL117414
  ref <309>: DATABASE ENTRY DATE: 2000-02-18

SEQ ID NO: 11960 - protein, 586 aa, Homo sapiens; identical to SEQ ID NO: 8914
  ref <308>: DATABASE ACCESSION NUMBER: SWISS-Prot / P36269
  ref <309>: DATABASE ENTRY DATE: 2002-06-15

SEQ ID NO: 11961 - DNA, 429 bp, Rattus norvegicus; identical to SEQ ID NO: 8929
  ref <308>: DATABASE ACCESSION NUMBER: EMBL / U77829
  ref <309>: DATABASE ENTRY DATE: 2000-03-04

SEQ ID NO: 11962 - DNA, 4104 bp, Rattus norvegicus; identical to SEQ ID NO: 8992
  ref <308>: DATABASE ACCESSION NUMBER: EMBL / U82626
  ref <309>: DATABASE ENTRY DATE: 1998-01-17

SEQ ID NO: 11963 - protein, 1191 aa, Rattus norvegicus; identical to SEQ ID NO: 8993
  ref <308>: DATABASE ACCESSION NUMBER: SWISS-Prot / AAB96342
  ref <309>: DATABASE ENTRY DATE: 2003-02-01

SEQ ID NO: 11964 - DNA, 3654 bp, Homo sapiens
  ref <308>: DATABASE ACCESSION NUMBER: Refseq / NM_005445
  ref <309>: DATABASE ENTRY DATE: 2002-11-05
atgtacataaagcaggtgattatccagggttttcgaagttacagagatcaaacaattgtagatcccttcagttcaaaacataatgtgattgtgggcagaaatggatctggaaaaagtaactttttttatgcaattcagtttgttctcagtgatgagtttagtcatcttcgtccagaacagcggttggctttattgcatgaaggtactggtcctcgtgttatttctgcttttgtggagattatttttgataattcagacaaccggttaccaatcgataaagaggaagtttcacttcgaagagttattggtgccaaaaaggatcagtatttcttagacaagaagatggtcacgaaaaatgatgtgatgaacctccttgaaagcgctggtttttctcgaagcaatccttattatattgttaaacaaggaaagatcaaccagatggcaacagcaccagattctcagagattaaagctattaagagaagtagctggtactagagtgtatgacgaacgaaaggaagaaagcatctccttaatgaaagaaacagagggcaaacgggaaaaaatcaatgagttgttaaaatacattgaagagagattacatactctagaggaagaaaaggaagaactagctcagtatcagaagtgggataaaatgagacgagccctggaatataccatttacaatcaggaacttaacgagactcgtgccaaacttgatgagctttctgctaagcgagagactagtggagaaaaatccagacaattaagagatgctcagcaggatgcaagagataaaatggaggatatcgaacgccaagttagagaattgaaaacaaaaatttcagctatgaaagaagaaaaagaacagcttagtgctgaaagacaagagcagattaagcagaggactaagttggagcttaaagccaaggatttacaagatgaactagcaggcaatagtgaacaaaggaaacgtttattaaaagagaggcagaagctgcttgaaaaaatagaagaaaagcagaaagaactggcagaaacagaacccaaattcaacagtgtgaaagagaaagaagaacgaggaattgctagattggctcaagctacccaggaaagaacggatctttatgcaaagcagggtcgaggaagccagtttacatcaaaagaagaaagggataagtggattaaaaaggaactcaagtctttagatcaggctattaatgacaagaaaagacagattgctgctatacataaggatttggaagacactgaagcaaataaagagaaaaatctggagcagtataataaactggaccaggatcttaatgaagtcaaagctcgagtagaagaactggacagaaaatattacgaagtaaaaaataagaaagatgaactacaaagtgaaagaaactacttgtggagagaagagaatgcagaacagcaagcacttgctgctaaaagagaagatcttgaaaagaagcaacaacttcttagagcagcaacaggaaaggccattttaaatggaatagacagcataaacaaagtgctagaccacttccgtcgaaaaggaataaaccagcatgttcaaaatggctatcatggtattgtaatgaataactttgaatgtgaaccagctttctacacatgcgtggaagtcactgctggaaacaggttattttatcacattgttgattcagatgaagtcagcacgaagattttaatggagtttaataaaatgaatcttcctggagaggttacttttctgcctcttaacaagttagatgtcagggatacagcctatcctgaaaccaatgatgctattcctatgatcagcaaactgaggtacaatcccagatttgacaaagctttcaaacatgtgtttggaaagactcttatttgtcgtagcatggaagtttcaacccagctggcccgtgctttcactatggactgtattactttggaaggtgaccaagtcagccatcggggtgctctaactgggggttattatgacacaaggaagtctcgacttgaattgcaaaaagatgttagaaaagcagaagaagaactaggtgaacttgaagcaaagctcaatgaaaacctgcgcagaaatattgaaaggattaataatgaaattgatcagttgatgaaccaaatgcaacagatcgagacccagcaaaggaaatttaaagcatctagagatagcatattatcagaaatgaagatgctaaaagagaagaggcagcagtcagagaaaaccttcatgcctaagcaacgtagcttacagagtttggaggcaagcttgcatgctatggagtctaccagagagtcattgaaagcagaactgggaactgatttgctttctcaactgagtttggaagatcagaagagagtagatgcactgaatgatgagattcgtcaacttcagcaggaaaacagacagttgctaaatgaaagaattaaattagaaggtattattactcgagtagagacttatctcaatgagaatctgagaaaacgcttggaccaagtagaacaggaacttaatgagctgagagagacagaagggggtactgttctcacagccacaacatcagaacttgaagccatcaataaaagagtaaaagacactatggcacgatcagaagatttggacaattccattgataaaacagaagctggaattaaggagcttcagaagagtatggagcgctggaaaaatatggaaaaagaacatatggatgctataaatcatgatactaaagaactggaaaagatgacaaatcggcaaggcatgctattgaagaagaaagaagagtgtatgaagaaaattcgagaacttggatcacttccccaggaagcatttgaaaagtaccagacactgagcctcaaacagttgtttcgaaaacttgagcagtgcaacacagaattaaagaagtacagccatgttaacaaaaaggctttggatcagtttgtaaatttctccgagcagaaagaaaagttaataaagcgtcaagaagagttagataggggttacaaatcgatcatggaactgatgaatgtacttgaacttcggaaatatgaagctattcagttaactttcaaacaggtatctaagaacttcagtgaagtattccagaagttagtacctggtggcaaagctactttggtgatgaagaaaggagatgtggagggcagtcagtctcaagatgaaggagaagggagtggtgagagtgagaggggttctggctcacaaagcagtgtcccatcagttgaccagtttactggagttggaattagggtgtcatttacaggaaaacaaggtgaaatgagagaaatgcaacagctttcaggtggacagaaatccttggtagcccttgctctgatttttgccattcagaaatgtgacccggctccattttacttgtttgatgaaattgaccaggctctggatgctcagcacagaaaggctgtgtcagatatgattatggaacttgctgtacatgctcagtttattacaactacttttaggcctgaactgcttgagtcagctgacaaattctatggtgtaaagttcagaaataaggttagtcatattgatgtgatcacagcagagatggccaaagactttgtagaagatgataccacacatggttaa

SEQ ID NO: 11965 - protein, 1217 aa, Homo sapiens
  ref <308>: DATABASE ACCESSION NUMBER: Refseq / NP_005436
  ref <309>: DATABASE ENTRY DATE: 2002-11-05
MYIKQVIIQGFRSYRDQTIVDPFSSKHNVIVGRNGSGKSNFFYAIQFVLSDEFSHLRPEQRLALLHEGTGPRVISAFVEIIFDNSDNRLPIDKEEVSLRRVIGAKKDQYFLDKKMVTKNDVMNLLESAGFSRSNPYYIVKQGKINQMATAPDSQRLKLLREVAGTRVYDERKEESISLMKETEGKREKINELLKYIEERLHTLEEEKEELAQYQKWDKMRRALEYTIYNQELNETRAKLDELSAKRETSGEKSRQLRDAQQDARDKMEDIERQVRELKTKISAMKEEKEQLSAERQEQIKQRTKLELKAKDLQDELAGNSEQRKRLLKERQKLLEKIEEKQKELAETEPKFNSVKEKEERGIARLAQATQERTDLYAKQGRGSQFTSKEERDKWIKKELKSLDQAINDKKRQIAAIHKDLEDTEANKEKNLEQYNKLDQDLNEVKARVEELDRKYYEVKNKKDELQSERNYLWREENAEQQALAAKREDLEKKQQLLRAATGKAILNGIDSINKVLDHFRRKGINQHVQNGYHGIVMNNFECEPAFYTCVEVTAGNRLFYHIVDSDEVSTKILMEFNKMNLPGEVTFLPLNKLDVRDTAYPETNDAIPMISKLRYNPRFDKAFKHVFGKTLICRSMEVSTQLARAFTMDCITLEGDQVSHRGALTGGYYDTRKSRLELQKDVRKAEEELGELEAKLNENLRRNIERINNEIDQLMNQMQQIETQQRKFKASRDSILSEMKMLKEKRQQSEKTFMPKQRSLQSLEASLHAMESTRESLKAELGTDLLSQLSLEDQKRVDALNDEIRQLQQENRQLLNERIKLEGIITRVETYLNENLRKRLDQVEQELNELRETEGGTVLTATTSELEAINKRVKDTMARSEDLDNSIDKTEAGIKELQKSMERWKNMEKEHMDAINHDTKELEKMTNRQGMLLKKKEECMKKIRELGSLPQEAFEKYQTLSLKQLFRKLEQCNTELKKYSHVNKKALDQFVNFSEQKEKLIKRQEELDRGYKSIMELMNVLELRKYEAIQLTFKQVSKNFSEVFQKLVPGGKATLVMKKGDVEGSQSQDEGEGSGESERGSGSQSSVPSVDQFTGVGIRVSFTGKQGEMREMQQLSGGQKSLVALALIFAIQKCDPAPFYLFDEIDQALDAQHRKAVSDMIMELAVHAQFITTTFRPELLESADKFYGVKFRNKVSHIDVITAEMAKDFVEDDTTHG

SEQ ID NO: 11966 - DNA, 2093 bp, Rattus norvegicus
  ref <308>: DATABASE ACCESSION NUMBER: EMBL / U86379
  ref <309>: DATABASE ENTRY DATE: 2000-03-04
tgtcgagtaagcactcagcaactagtccaacatcctccacggcggctggaccagataggatttgttggtggctcacagatcatcagtcctggagccttctgatcccacctcagtgctcttgactgagcaatggagtctttcactgctgacaccaactcaactgacctacactcacggcctctgtttaaaccccaagacattgcctccatggtcattctcagtctcacgtgtttattgggactgccaggcaatgggctggtgctgtgggtcgctggcgtaaagatgaagaggaccgtgaacacagtctggttcctccacctcaccctggccgatttcctctgctgcctctccttgcccttctccgtggctcacctgattctccgaggacactggccctatggcttgttcctgtgcaaacttatcccgtccgtcattatcctcaacatgtttgccagtgtcttcctgcttactgccattagcctggaccgctgtctgatggtgcacaagccgatctggtgccagaaccatcggagcgtgagaacagccttcgccgtctgtggatgcgtctgggtggtaacctttgtgatgtgtataccggtatttgtataccgtgatctgctcgttgtggatgattacagtgtatgtggctataactttgattcctccagggcatatgattattgggactacatgtacaattcacatctaccagaaatcaaccctcctgacaactccactggacatgtggatgacaggacagctccttcctcctctgtaccagcaagggacctttggacagctaccactgctctccagtcacaaacgttccacacatctcctgaagacccattctctcaagactcagcaagtcagcaaccccattatggggggaagcctcctactgtgctcatagccaccatacccggcgggtttcctgttgaagatcataaatccaacacactgaacactggtgcttttctctctgcccacacagagccgtccctcactgcttctagcagtcctttatacgcccatgatttcccggatgattattttgaccaactgatgtatggcaatcacgcgtggacacctcaggtggcaatcaccatctcgaggctggtggtgggcttcctggtgccctttttcatcatgataacctgttacagcctcatcgtcttcagaatgcgaaaaaccaacctcaccaagtcgaggaacaaaacccttcgggtggccgtggcggtggtcaccgtcttttttgtctgctggattccataccatattgttggaatcctgttagtgattactgaccaagaaagcgccttgagagaagttgtgctaccctgggaccacatgtccattgctttagcatctgccaatagttgtttcaaccctttcctttatgccctcttgggaaaagacttcaggaagaaagcaagacagtccgtaaagggcattctggaagcagccttcagcgaagagctcacgcactctaccagttgtacccaggacaaagccccctcaaaaagaaaccatatgagtacggatgtgtgaagatgctgcactggggacctaagcagatgttctgaggtgaatactggtgatgggtgacctgtgagcgggacaccttagacagcctggccaccctcagagaaaggtctcttattgacatcagcatcatttgaaaacactaaaggcacaaaatttcaagccccatcccagatgtttgactccgaatctctggcccgtggggaccaatgtcttaacaggcccccttgtttccaccaatgttaagttttattcaactcattttattcccatccctgaatcggccatgtgcaatgaataacgtcttcatctgtttccagtattaatctcttcttgcatagcatcatttaaatcctttagtttgtgcgggaggctgctattgtccagagtgaaagatatttttttattgaacatttgtgtggtggtagcagtgattttttagtggggaggcaggggagaaagacacagaaataaaaggtttttggaaaaaaaaaaaaaaaaaaaaaaaaaaaaaaaaaaaaaaaagaaaaaaaaaaaaaaaaaaaaaa

SEQ ID NO: 11967 - protein, 473 aa, Rattus norvegicus
  ref <308>: DATABASE ACCESSION NUMBER: SWISS-Prot / O55197
  ref <309>: DATABASE ENTRY DATE: 2000-05-30
MESFTADTNSTDLHSRPLFKPQDIASMVILSLTCLLGLPGNGLVLWVAGVKMKRTVNTVWFLHLTLADFLCCLSLPFSVAHLILRGHWPYGLFLCKLIPSVIILNMFASVFLLTAISLDRCLMVHKPIWCQNHRSVRTAFAVCGCVWVVTFVMCIPVFVYRDLLVVDDYSVCGYNFDSSRAYDYWDYMYNSHLPEINPPDNSTGHVDDRTAPSSSVPARDLWTATTALQSQTFHTSPEDPFSQDSASQQPHYGGKPPTVLIATIPGGFPVEDHKSNTLNTGAFLSAHTEPSLTASSSPLYAHDFPDDYFDQLMYGNHAWTPQVAITISRLVVGFLVPFFIMITCYSLIVFRMRKTNLTKSRNKTLRVAVAVVTVFFVCWIPYHIVGILLVITDQESALREVVLPWDHMSIALASANSCFNPFLYALLGKDFRKKARQSVKGILEAAFSEELTHSTSCTQDKAPSKRNHMSTDV

SEQ ID NO: 11968 - DNA, 1956 bp, Homo sapiens
  ref <308>: DATABASE ACCESSION NUMBER: EMBL / U28488
  ref <309>: DATABASE ENTRY DATE: 1999-06-30
cggtggggaccagacaggactcgtggagacatccaggtgctgaagccttcagctactgtctcagttttttgaagtttagcaatggcgtctttctctgctgagaccaattcaactgacctactctcacagccatggaatgagcccccagtaattctctccatggtcattctcagccttacttttttactgggattgccaggcaatgggctggtgctgtgggtggctggcctgaagatgcagcggacagtgaacacaatttggttcctccacctcaccttggcggacctcctctgctgcctctccttgcccttctcgctggctcacttggctctccagggacagtggccctacggcaggttcctatgcaagctcatcccctccatcattgtcctcaacatgtttgccagtgtcttcctgcttactgccattagcctggatcgctgtcttgtggtattcaagccaatctggtgtcagaatcatcgcaatgtagggatggcctgctctatctgtggatgtatctgggtggtggcttttgtgatgtgcattcctgtgttcgtgtaccgggaaatcttcactacagacaaccataatagatgtggctacaaatttggtctctccagctcattagattatccagacttttatggagatccactagaaaacaggtctcttgaaaacattgttcagcggcctggagaaatgaatgataggttagatccttcctctttccaaacaaatgatcatccttggacagtccccactgtcttccaacctcaaacatttcaaagaccttctgcagattcactccctaggggttctgctaggttaacaagtcaaaatctgtattctaatgtatttaaacctgctgatgtggtctcacctaaaatccccagtgggtttcctattgaagatcacgaaaccagcccactggataactctgatgcttttctctctactcatttaaagctgttccctagcgcttctagcaattccttctacgagtctgagctaccacaaggtttccaggattattacaatttaggccaattcacagatgacgatcaagtgccaacacccctcgtggcaataacgatcactaggctagtggtgggtttcctgctgccctctgttatcatgatagcctgttacagcttcattgtcttccgaatgcaaaggggccgcttcgccaagtctcagagcaaaacctttcgagtggccgtggtggtggtggctgtctttcttgtctgctggactccataccacatttttggagtcctgtcattgcttactgacccagaaactcccttggggaaaactctgatgtcctgggatcatgtatgcattgctctagcatctgccaatagttgctttaatcccttcctttatgccctcttggggaaagattttaggaagaaagcaaggcagtccattcagggaattctggaggcagccttcagtgaggagctcacacgttccacccactgtccctcaaacaatgtcatttcagaaagaaatagtacaactgtgtgaaaatgtggagcagccaacaagcaggggctcttaggcaatcacatagtgaaagtttataagaggatgaagtgatatggtgagcagcggacttcaaaaactgtcaaagaatcaatccagcggttctcaaacggtacacagactattgacatcagcatcacctagaaacttgttagaaatgcaaattctcaagccgcatcccagacttgctgaatcggaatctctgggggttgggacccagcaagggcacttaacaaaccctcgtttctgattaatgctaaatgtaagaatcattgtaaacattagttctatttctatcccaaactaagctatgtgaaataagagaagctactttgtttttaaatgatgttgaatatttgtcgatatttccatcattaaatttttccttagcattgtctaagtcttcca

SEQ ID NO: 11969 - protein, 482 aa, Homo sapiens [sequence omitted]

SEQ ID NO: 11970 - DNA, 770 bp, Rattus norvegicus; identical to SEQ ID NO: 9034
  ref <308>: DATABASE ACCESSION NUMBER: EMBL / U87971
  ref <309>: DATABASE ENTRY DATE: 1998-01-07

SEQ ID NO: 11971 - protein, 211 aa, Rattus norvegicus; identical to SEQ ID NO: 9035
  ref <308>: DATABASE ACCESSION NUMBER: SWISS-Prot / AAB93844
  ref <309>: DATABASE ENTRY DATE: 2002-10-01

SEQ ID NO: 11972 - DNA, 1507 bp, Homo sapiens; identical to SEQ ID NO: 3016
  ref <308>: DATABASE ACCESSION NUMBER: Refseq / NM_003164
  ref <309>: DATABASE ENTRY DATE: 2002-05-14

SEQ ID NO: 11973 - protein, 301 aa, Homo sapiens; identical to SEQ ID NO: 3017
  ref <308>: DATABASE ACCESSION NUMBER: SWISS-Prot / Q13190
  ref <309>: DATABASE ENTRY DATE: 2002-06-15

SEQ ID NO: 11974 - DNA, 3622 bp, Rattus norvegicus
  ref <308>: DATABASE ACCESSION NUMBER: EMBL / U88036
  ref <309>: DATABASE ENTRY DATE: 1997-10-15
gctgctctgactttcttttagtctcagcatggagaggaccgtcttctaaagcttcttcataaaaacagcagtaagattatttaaagaatagatatctggaaacaatcagaagaacaacatgggaaaatctgagaaaagggttgcaacccatggggtcagatgttttgccaagatcaagatgtttctgttggcattaacatgtgcatatgtatccaaatcattatcaggaacttatatgaattccatgctcacacaaatagagagacaattcggtatccccacatctatagttgggcttatcaatgggagctttgaaataggaaaccttttgttgattatatttgtgagttattttggaacaaaacttcacagacctatcatgattggtgttggatgtgcagttatgggcctggggtgtttcttaatctcgctaccccatttcctcatgggccaatatgaatatgaaacgattttacctacaagcaacgtgtcctcaaacagcttcttctgtgtggaaaacagatcccagaccttaaatccaacacaagacccctcagagtgtgtgaaagaaatgaaatcattaatgtggatatatgtactggtaggaaacataatacgtggaattggtgaaactcccatcatgcccttgggtatttcctacattgaagactttgccaaatctgaaaactctcctttatacattgggattttagaaacaggaatgaccattggccctttgattggacttctgttggcttcttcctgtgcaaacatttatgtagacattgagtctgtgaatacagatgacctgaccataactcccacagatacacgctgggtcggagcttggtggatcggctttttggtctgtgcaggagtgaatatcctgaccagctttccctttttcttttttcccaaaacacttccaaaggaaggattacaggagaatgtggatggaactgaaaatgccaaagagaagaaacacagaaaaaaggccaaggaagaaaaacgaggaatcactaaagatttctttgtgttcatgaagagcctctcctgcaatccaatttacatgcttttcatccttataagtgttctccagttcaatgcatttatcaattcatttaccttcatgcctaagtatctggaacagcaatatggaaaatccactgctgaggtagtcttccttatgggtctttatatgttacctccaatatgcctcggatatttaattggtggtttgattatgaagaagttcaaggttactgtcaagaaagctgcacacttagcattctggctctgcctgtctgagtaccttctgtctttccttagctatgtgatgacctgtgataattttccagtggcaggcttaacaacctcttatgaaggggttcagcaccaactatatgtggagaacaaggtccttgctgactgtaacacaaggtgtaactgctcaacgaacacatgggatccagtgtgtggagacaatggcctggcatacatgtcagcctgccttgcaggctgtgagaagtctgttggaacaggaaccaacatggtgtttcagaattgcagctgcattcagtcatcgggaaactcatctgcagtcctgggcctgtgtaacaaaggccctgactgtgccaacaagctgcagtacttcttaatcatagcaatatttggctgtttcatatactcgctggcaggcattccagggtatatggttcttctgaggtgtatcaagtctgaagagaagtcacttggagttgggttacatgcattttgcataagaatattagctggcattcctgcacccatttactttggagctttgatagacagaacctgtttacattggggaaccctgaaatgtggtgagcccggggcatgcaggatgtatgacataaacagcttcagacgtctttaccttggattgccggctgcactaagaggagcaagctttgtccccgccttcttcattctaagacttacgaggacattccagttccctggggacattgagtcttcaaaaactgatcatgcggagatgaagctcaccttgaaggaaagtgagtgcacagaagtcctaaggtcgaaagtgacggaggactgaaaacgaagctgtaatgagttttctactgccctatgcaaggccatgaagagaatgtacacttcactagttttgaatcatgagagatacaattggaactcttaggttatccataaggccgtcaaagttacttcattcatgataaaattatttactgatagcattttcagaaggctgacatagtactcaagattttcccagggaaaacttctatagtggccttcacccttaaccttaaagctgccttcattttcaaccagcatgttctcttttaactcaatcaagggaagtggatgtttcccacacattctcaaatatctttgaaactttcctattgcagaaatatcatttagatgtttttaatttatatactgatgctggagatcaaaatatacatcttggttaagccagattgcgttagtttgttttgatttatcctctgcatgtgcaaaacttctgcatctgtcttgtgtacttaggagtggtaactctcttttacttctaagattagactcttcagagtgtgccatctcctgttttcagtcccttctatcattacttctgtcacacagttgatcatttcacatacatcactgaaaactttaatcaggttgttaaccagtcatgtagcaaagatgattgggactctttttctctaacaattcaaagctggtcatgaaactcttttttaaaaatcaagagtaggggaaaactagtcctttcaaaggctccttgtagagatgggctgtatctcagtggaatagttattacctaatgtatgtgaggccccaggttcaaccacaacgtagggtaaaccaataaagtaataaaaataacgtaagtccagatgcatcatcagatattctaaaaggctattctcatattcagggggcttcaatggcttagtgttcattctattcaagggccatggagcacatagttattaacattcataataaacttagagtaaaacctttaaagagggaccagatagaaagttcgatagaaagaactgtttgccaccgaacctgaaaaggttgttgtgatccttgggaccaacgtgaaggagagaacaaactctcacaagttgtgctatatctctttttaattgtgcatgccccattgcaaatcaattaataaaaaaagcattaaaaggtttaagaccgacatttgctgtaaaattatagctcataaacgtgaaagtacacatcaaaaataaaatcaagttgtggttgttttaatgagaaatatccctcctaggcataggcatttggatatttggtttctaatgaatgactctgcttagggaagattggatgtgcatccctaagacaaaaggtgaatcactgagatgggttgaaagttaaaagcctcacctacttccagtacactctctgctttgtgctttggttgatgatatgaaatcatggtttcctgctccagccaccatgcctggtgcttgccttcatgaacttccatccctggagtcatgcgttaaaataaactcctttttttaatgtg

SEQ ID NO: 11975 - protein, 661 aa, Rattus norvegicus
  ref <308>: DATABASE ACCESSION NUMBER: SWISS-Prot / O35913
  ref <309>: DATABASE ENTRY DATE: 2000-05-30
MGKSEKRVATHGVRCFAKIKMFLLALTCAYVSKSLSGTYMNSMLTQIERQFGIPTSIVGLINGSFEIGNLLLIIFVSYFGTKLHRPIMIGVGCAVMGLGCFLISLPHFLMGQYEYETILPTSNVSSNSFFCVENRSQTLNPTQDPSECVKEMKSLMWIYVLVGNIIRGIGETPIMPLGISYIEDFAKSENSPLYIGILETGMTIGPLIGLLLASSCANIYVDIESVNTDDLTITPTDTRWVGAWWIGFLVCAGVNILTSFPFFFFPKTLPKEGLQENVDGTENAKEKKHRKKAKEEKRGITKDFFVFMKSLSCNPIYMLFILISVLQFNAFINSFTFMPKYLEQQYGKSTAEVVFLMGLYMLPPICLGYLIGGLIMKKFKVTVKKAAHLAFWLCLSEYLLSFLSYVMTCDNFPVAGLTTSYEGVQHQLYVENKVLADCNTRCNCSTNTWDPVCGDNGLAYMSACLAGCEKSVGTGTNMVFQNCSCIQSSGNSSAVLGLCNKGPDCANKLQYFLIIAIFGCFIYSLAGIPGYMVLLRCIKSEEKSLGVGLHAFCIRILAGIPAPIYFGALIDRTCLHWGTLKCGEPGACRMYDINSFRRLYLGLPAALRGASFVPAFFILRLTRTFQFPGDIESSKTDHAEMKLTLKESECTEVLRSKVTED

SEQ ID NO: 11976 - DNA, 2721 bp, Homo sapiens
  ref <308>: DATABASE ACCESSION NUMBER: EMBL / U21943
  ref <309>: DATABASE ENTRY DATE: 2000-03-04
aagacatatcaagatttaaaacataaatagcttggaacaccctgaagagcaacatgggagaaactgagaaaagaattgaaacccatagaataagatgtctttccaagttgaagatgtttctgttggcaataacatgtgcatttgtatccaaaacactgtctggatcttatatgaattccatgctcacacaaatagagagacaattcaacatcccaacatctctagttggattcattaatggaagctttgagattggaaatcttttgttgattatatttgtgagttattttggaaccaaactgcatagacctataatgattggcattggatgtgtggttatgggcttaggctgtttcttaaaatcactacctcatttcctcatgaaccaatatgaatatgaatctacagtttcagtttcaggcaacttgtcctcaaacagtttcttgtgtatggaaaatggaacccagattttaagaccaacgcaggatccatcagagtgtacaaaggaagttaaatcattaatgtgggtgtacgtcctagtaggcaatattgtacgtggaatgggtgaaactcccatcctgcctttgggtatttcctatatagaagattttgccaaatttgaaaattctcctttatatattgggcttgtagaaacaggagctattattggtcctttgattggacttttgttggcatcattctgtgcaaatgtttatgttgacactggatttgtgaacacagatgatctgatcataactcccactgacactcgttgggtcggtgcatggtggtttggctttctgatttgtgcaggagttaacgtgctcactgccattccttttttctttttgcccaacacacttccaaaggaaggactagagactaatgctgacatcattaaaaatgaaaatgaagacaaacaaaaagaagaggtcaagaaggaaaaatatggaatcactaaagattttctacctttcatgaaaagtctttcctgcaatccaatttatatgcttttcatacttgtaagtgtgatacagttcaatgcattcgttaacatgatctccttcatgcctaaatacctagaacagcaatatggaatatcatcttcagatgcaatctttctaatgggtatttataacttacctccaatatgtattggatatataattggtggtttaattatgaagaagttcaagattactgtcaaacaagctgcccacataggatgttggttatccttacttgagtatcttctctattttttatcttttctcatgacttgtgaaaattcttcagttgttggaataaatacctcttatgaaggaattccacaagatttatatgtggaaaatgacatctttgctgattgcaatgtggattgcaactgtccatctaaaatatgggatcctgtgtgtggaaacaatggcttgtcatatctgtcagcttgtcttgctggttgtgagacatccattggaacgggaataaacatggtgttccaaaattgcagctgtattcaaacatcaggaaattcatctgcagttcttgggctgtgcgacaaaggacctgactgttccttgatgctccagtacttcctaatcttgtcagcgatgagcagtttcatttattctttggctgccatacctggatatatggttctcttgaggtgtatgaaatctgaagagaagtcccttggtgtgggattacatacattttgcacaagagtatttgctggcattcctgcacctatatattttggcgctttaatggattccacatgtttacactggggaactttgaaatgtggtgagtcaggggcatgcaggatatatgattccaccaccttcagatacatctacctcggattgccggcagcactaagaggatcaagctttgttccagccttaatcatcttaattcttttgaggaagtgtcatctacctggtgaaaatgcctcttcaggaacagagcttatagagacaaaagtcaaagggaaggaaaatgagtgcaaagatatataccaaaagtccacggttttgaaagatgatgaattgaaaactaaattgtaattgtcctattatattacttttttcagaattagagaacatgctgtacaacttaattgttttaaaaatcagtagagatataatagataactttttcttgtctttaagaacctaaaaaacctcttaactcaaaataataaaatgttcactaatgatatttctaaggtatcagtgacacttgagttttcctaggagggacatcaataacagccccctaaagaagattcttagagccagctttatttttatgttgaaacagcaatttcccttaattcatcgaagtaagggtgtacttcctacatctccttctactaatacttctaaaaattttctgttatgaaaacctatttaattccactaaatttgttctttgatattggaattattcagatgcctaaattctcattctgttatgtgaagatttaaatattttattcaagtttatcgcttccatgtgagagaagcctacatcttcttattctatttaggaatcgttctttaactcttcttattcattctaggcatgactcctatataatagattactcataaatataccctcctactttcaattttttcttttctttattactcatacatttgctcaatttgtacagaatactgacaaacttaagcaggttattaaacatcatgaggc

SEQ ID NO: 11977 - protein, 670 aa, Homo sapiens
  ref <308>: DATABASE ACCESSION NUMBER: SWISS-Prot / P46721
  ref <309>: DATABASE ENTRY DATE: 2002-06-15
MGETEKRIETHRIRCLSKLKMFLLAITCAFVSKTLSGSYMNSMLTQIERQFNIPTSLVGFINGSFEIGNLLLIIFVSYFGTKLHRPIMIGIGCVVMGLGCFLKSLPHFLMNQYEYESTVSVSGNLSSNSFLCMENGTQILRPTQDPSECTKEVKSLMWVYVLVGNIVRGMGETPILPLGISYIEDFAKFENSPLYIGLVETGAIIGPLIGLLLASFCANVYVDTGFVNTDDLIITPTDTRWVGAWWFGFLICAGVNVLTAIPFFFLPNTLPKEGLETNADIIKNENEDKQKEEVKKEKYGITKDFLPFMKSLSCNPIYMLFILVSVIQFNAFVNMISFMPKYLEQQYGISSSDAIFLMGIYNLPPICIGYIIGGLIMKKFKITVKQAAHIGCWLSLLEYLLYFLSFLMTCENSSVVGINTSYEGIPQDLYVENDIFADCNVDCNCPSKIWDPVCGNNGLSYLSACLAGCETSIGTGINMVFQNCSCIQTSGNSSAVLGLCDKGPDCSLMLQYFLILSAMSSFIYSLAAIPGYMVLLRCMKSEEKSLGVGLHTFCTRVFAGIPAPIYFGALMDSTCLHWGTLKCGESGACRIYDSTTFRYIYLGLPAALRGSSFVPALIILILLRKCHLPGENASSGTELIETKVKGKENECKDIYQKSTVLKDDELKTKL

SEQ ID NO: 11978 - DNA, 2837 bp, Rattus norvegicus
  ref <308>: DATABASE ACCESSION NUMBER: EMBL / U88324
  ref <309>: DATABASE ENTRY DATE: 2001-08-01
gaattcggcacgaggtggaaagcactgagacgtgaagatgagtgaacttgaccagctgcggcaggaggccgagcaactgaagaaccaaattagagatgcccgtaaagcatgtgcagatgcgactctttctcagatcacaaacaacattgatccagtgggaagaatccaaatgcgaaccaggagaacactgagggggcatctggcaaagatttatgccatgcactggggcacagactcaaggctccttgtcagcgcctctcaggatgggaaactcatcatctgggacagctataccacaaacaaggttcatgccatccctctgcgctcctcttgggtcatgacctgtgcatacgctccttctgggaattatgtggcctgtggtggcctggataacatctgctccatttacaatctgaaaactcgtgaaggaaatgtgcgtgtgagtcgtgagctggcaggacatacaggttatctatcctgttgccggttcctggatgacaatcagatagttaccagttctggagacaccacatgtgccctgtgggacatcgagaccggccagcagacaaccacgtttactggacacactggagatgtcatgagcctgtctcttgctcctgacaccagactgtttgtctctggtgcttgcgatgcttcggtcaagctctgggatgtccgagaagggatgtgccggcagacctttacaggacacgagtctgacatcaatgccatatgtttctttcccaatggcaatgcctttgccactggctcagacgatgctacatgcaggctgtttgaccttcgtgcagaccaggagctcatgacctactcccatgacaacattatctgtggtatcacatctgttcccttctccaagagtggccgcctcctcctcggtggctatgacgacttcaactgtaatgtctgggatgcactcaatgctgacagagcaggtgtcctagctggacatgacaaccgagtcagctgcttgggggtgactgatgatggcatggctgtggcaacaggatcctgggacagcttcctcaagatctggaactaaggccacagcaggtggatggatgccatggcgactggaagaccattccaaccttgaagcgttactgcgatagcatatcctatccaaccatactaacgtggacacccacacctcccctcagaacttcaaaagggcaagatcttttttccttcacttattgctgaaaccaagagcacaactcccattaagagaaggatctctgtgctgtaaactaaaacaaattgtgcatttttctggggccattgtctttggtttattttgttttgttttttgtttttgttttgtttgtcttgggcaaatttttaaaggaaatactacaataaaaatgttaaccagaaggtaaccctgagtatgattgtgagagagacacaccttcttactagttcatttgcatttaaatcagtgatcctgatctgtggcaatcatgaaaaacaagttgaagactttgtttatctggaattgtttctaaatataagtcatttgtagcaagactttggaagcattcacgtttcttccttaaacatattcctttatgttcagtagttaagagaaccagagcccatgggggtgtctgactgtcactgatgcatttttgtccctggcttgcttttttttttttttttttttttttgtctcatgtcacagatgactgtttcgcacaaacacagcatagtggaagaaaaaattcagaagcaaagtagccaagcacatgttatgatggccacgaatgcttggtcagaatccttccctttgctcagcagtgaacttattcccagcacccttccctcctcactgtccagtttctgttctttccttgggtttcctgtgaagttggagggaagtttgtagtcatgtgacactagccgtcctgcccctgctgtcagattttttttctccagagaggtgcctgtcctgtgcttggatagtcagtttgtgtatgaaacaatgtacaaatcaatgttttgaaaataatgatctcagactttctaagttaaattttaaacaatttgattgtttgccatattgggtgggtttactcttagaatcgcatgctgtagaaatgctctaaagtgcatataggactcagtccttagatgttctttttattttaagaaataacctcttcaagttgtaaccgtggcggctttgtccattactgttgctattctgcacacatatcggaagcagcaagcgctttacacactcgagtagtgggataagtcactgttttctttactttacaagatgatagtcctgttgggaatgactgctgctggcttcaggaagggagggaagctgctccgctgcctctttgccacttcctggaagcagcctccatggaacagcctttgcatctgaggcaaccatttttacaccgtgcagatcttcgtggttatcatctcaaagccatgttcagcagcagcgtttggacagcagtgttctgtgggccctcccatcccccgatatcctgcacccctcatagcagtagtggcttcgccattctgttttctgcagcgtcctgtacaaaactgtgctgtgactgtgcggtaggcctggacatggcaaagagaatacagcgaagccccttctcttcctaccaaacgactctgtagagctctctgcaccctgtaccctttccaccttttgtatttaattttaaagtcagtgtactgcaaggaggctggatgcaagatagatactatattaaactgtactgttatttaagatgtaataaagcagtttgacatgaggaaaaaaaaaaaaaaaaaaaaaaaaaaaa

SEQ ID NO: 11979 - protein, 340 aa, Rattus norvegicus
  ref <308>: DATABASE ACCESSION NUMBER: SWISS-Prot / P54311
  ref <309>: DATABASE ENTRY DATE: 2002-06-15
MSELDQLRQEAEQLKNQIRDARKACADATLSQITNNIDPVGRIQMRTRRTLRGHLAKIYAMHWGTDSRLLVSASQDGKLIIWDSYTTNKVHAIPLRSSWVMTCAYAPSGNYVACGGLDNICSIYNLKTREGNVRVSRELAGHTGYLSCCRFLDDNQIVTSSGDTTCALWDIETGQQTTTFTGHTGDVMSLSLAPDTRLFVSGACDASAKLWDVREGMCRQTFTGHESDINAICFFPNGNAFATGSDDATCRLFDLRADQELMTYSHDNIICGITSVSFSKSGRLLLAGYDDFNCNVWDALKADRAGDLAGHDNRVSCLGVTDDGMAVATGSWDSFLKIWN

SEQ ID NO: 11980 - DNA, 1319 bp, Homo sapiens
  ref <308>: DATABASE ACCESSION NUMBER: EMBL / AY007113
  ref <309>: DATABASE ENTRY DATE: 2000-09-06
tcggttttaacattttattgggtaaatgattttaaaggtaataacaatagtgtcaaaactactacaatatctttccacagccataccttacagacccacataaaccttctcatattttttctttttgctcatatttaatattgtaaagccatacatgtcatataaaatgcccatttccaatagtttcttcaaactattaagcaattaaatgtggaaggaaggagggcctagttatactggaaggggtttcaggtaatctgtgatgtcttacggtaatcaaaaaacaggttactaagaaagaaggaaaagaggagctactccaggtagctttttgctcattacaagtctcaccattgtatcaccaagaactcattatgctggtgacagattcaaagtaattttggggaacatataaaacactaaaataacttagaaactagatccaaatatttcaaaagtaatcaactttgatatacaaaagtagtcagaggtggttacaaaagtttgtttgctcagtgcgtctatgtaccagcgcagttactgggtagagcaaaataaaaggttcattttcttctgaaatagcaataaaaaacaaggaaaacatatatttgtatataaaggatcaatgctggtcttaagaataatgtcatcagaaacccttaaatcgagaggcacacaacgggtttccacttttaaaaaataaaaggaaagtcaccagtttatttaaatggaggaggtgctcacacccctcaaataaacttaattcattttaacatcactagcaaaaatcacttagaaactgtacaaaaataaaaaagttaacacatttaatcctgcaaggtttttgtaaggactggaaggcaggcttttgaagcagcatttgggcatggctgggggcttctttggtttgatctaacacacataagagatggaacctattccagatgacagtttcaaatttcctgcacatttgaagacaagataagaggccagtatacaaacttccggtgtgctgggcactgggactgtatgtgctggactgaaaatcttacaactgctttaagctttaagggtgaggggaagcaagccttgcacttcctccatcaatttcactgacctctcgtgttaggggagactacagagggtagtagcacattctcgtgcagtcagaaggccacttgaggggtgggggacaatttgttcttttagaatctggtacctggctgaccttgtttaagaacaagaaaacccttccagaaatggaagccttttgctacataccaaagcaaagtacgtactatttccaagaggaaaaatac

SEQ ID NO: 11981 - protein, 340 aa, Homo sapiens [sequence omitted]

SEQ ID NO: 11982 - DNA, 1624 bp, Rattus norvegicus; identical to SEQ ID NO: 9050
  ref <308>: DATABASE ACCESSION NUMBER: EMBL / U88986
  ref <309>: DATABASE ENTRY DATE: 1997-12-19

SEQ ID NO: 11983 - DNA, 3609 bp, Homo sapiens; identical to SEQ ID NO: 9051
  ref <308>: DATABASE ACCESSION NUMBER: EMBL / U38545
  ref <309>: DATABASE ENTRY DATE: 2000-03-04

SEQ ID NO: 11984 - protein, 1074 aa, Homo sapiens; identical to SEQ ID NO: 9052
  ref <308>: DATABASE ACCESSION NUMBER: SWISS-Prot / Q13393
  ref <309>: DATABASE ENTRY DATE: 2002-06-15

SEQ ID NO: 11985 - DNA, 953 bp, Rattus norvegicus
  misc_feature (1)..(953): n=a, c, g or t
  ref <308>: DATABASE ACCESSION NUMBER: EMBL / U89743
  ref <309>: DATABASE ENTRY DATE: 2000-03-04
acgggcgctcagctggaatcgcggccgctantgtatcctccatttctctttttggctcatgtcagctgcatcagggaacacntggcatctgtgtcctgtggtgaccgtccccagcatggagggtgtgtcacatctgcctcagtgtgctgcagtcagcagatcggccctactgtccctgggggattcagttacacagcaaacacagtgcaggttcctcgtcaacactgtgtaaggtttcaggagaccctttaacatctctaagtatagcacacacccgaacagacttccgccctattgctgtgtggcctgtggaccgctaggatgtgtagctgcaggaagggaaaccttgagagttctcgcagggtgggggtcaatttacattcaactgtgtcttacaatacaaccttcttctacaagctcagcaatggaagcaggaagacagctgcattgccacccaaatatatttttttagagacatgggaatttttttggtcgtcctctaaaaagccccttcttaccttaccaatgcattactctatagtgatatatatctatatatttatatatatatatatatattctcccaaataaaaacaaaacaacgattaaaaaataagccagcaactcacatttccaagagttagtgtagcctctacaggactatggagacaggcactgggaagttaggggtcagggaggcagggcctccacccctgtgacggagcagcaaggtcatggcggttctgccggcaagctcagcccttctaggtgacataggaaacaattccacaacactgacatttccagaacactgacaacagaaccagtctctgtcaagaacggttgaggagcangtgtaggggagagagatggctttcttcttttgcccttcatagtacaactgctggaatgcctcccctcctgttcagggcaaccttgttggccaatgaagt

SEQ ID NO: 11986 - protein, 83 aa, Rattus norvegicus
  misc_feature (1)..(83): Xaa=Unknown amino acid
  ref <308>: DATABASE ACCESSION NUMBER: SWISS-Prot / AAB49893
  ref <309>: DATABASE ENTRY DATE: 1997-05-01
TGAQLESRPLXYPPFLFLAHVSCIREHXASVSCGDRPQHGGCVTSASVCCSQQIGPTVPGGFSYTANTVQVPRQHCVRFQETL

SEQ ID NO: 11987 - DNA, 1114 bp, Rattus norvegicus; identical to SEQ ID NO: 9061
  misc_feature (1)..(1114): n=a, c, g or t
  ref <308>: DATABASE ACCESSION NUMBER: EMBL / U89745
  ref <309>: DATABASE ENTRY DATE: 2000-03-04

SEQ ID NO: 11988 - protein, 97 aa, Rattus norvegicus; identical to SEQ ID NO: 9062
  ref <308>: DATABASE ACCESSION NUMBER: SWISS-Prot / AAB49895
  ref <309>: DATABASE ENTRY DATE: 1997-05-01

SEQ ID NO: 11989 - DNA, 5033 bp, Rattus norvegicus; identical to SEQ ID NO: 9071
  ref <308>: DATABASE ACCESSION NUMBER: EMBL / U90312
  ref <309>: DATABASE ENTRY DATE: 1998-01-05

SEQ ID NO: 11990 - protein, 1248 aa, Rattus norvegicus; identical to SEQ ID NO: 9072
  ref <308>: DATABASE ACCESSION NUMBER: SWISS-Prot / O55207
  ref <309>: DATABASE ENTRY DATE: 2002-06-15

SEQ ID NO: 11991 - DNA, 6799 bp, Homo sapiens; identical to SEQ ID NO: 9073
  ref <308>: DATABASE ACCESSION NUMBER: EMBL / AL157424
  ref <309>: DATABASE ENTRY DATE: 2000-02-18

SEQ ID NO: 11992 - protein, 1443 aa, Homo sapiens; identical to SEQ ID NO: 9074
  ref <308>: DATABASE ACCESSION NUMBER: SWISS-Prot / O15056
  ref <309>: DATABASE ENTRY DATE: 2002-06-15

SEQ ID NO: 11993 - DNA, 3170 bp, Rattus norvegicus
  ref <308>: DATABASE ACCESSION NUMBER: Refseq / NM_024159
  ref <309>: DATABASE ENTRY DATE: 2002-05-22
cccgtcatgtctaacgaagtagaaacaagcacaaccaatggtcagcctgaccaacaggctgcaccgaaagcaccatcaaagaaggaaaagaagaaaggttctgaaaagacagatgagtatctgttggccaggttcaaaggtgatggtgtaaaatacaaggccaagctaatcggtattgatgatgtgcctgatgcgaggggagacaaaatgagtcaggattctatgatgaaactcaagggaatggcagcagctggtcgctctcagggacagcacaagcaaaggatctgggtcaacatttccctgtctggcataaaaattattgatgagaaaaccggggtaatagagcatgaacatccagtaaataagatttccttcattgctcgtgatgtgacagacaatagagcatttggttatgtgtgtggaggagaaggccagcatcaattttttgctataaaaacagggcaacaggctgaaccattagtcgtcgatcttaaagacctttttcaagttatctataatgtaaagaaaaaggaagaagaaaagaaaaaggttgaagaagccaacaaagcggaagagaatgggagtgaggccctaatgacccttgatgatcaagctaacaaactgaagctgggtgttgaccagatggatttgtttggggacatgtctacacctcctgacctaaataatccaacagaaagcagagatatcctgttagtggatctaaactctgaaatcgacaccaatcagaactctttaagagaaaatccattcttaacaaatggagtcacctcctgttctctccctcgaccaaagcctcaggcatccttcttgcctgaaagtgccttttctgccaatctcaacttctttcccacccctaatcctgatcctttccgtgatgatcctttcgcacagccagaccaatcggcaccctcttcgtttcattctctcacatctgcagatcagaagaaagcgaatccgggtagcttgtctactccacagagtaaagggcccttgaacggtgatactgattactttggtcagcaatttgaccagatctctaaccggactggcaaacaggaagctcagggaggcccatggccctatccaagttcgcaaacccagcaagcagtgagaactcaaaatggggtatctgaaaaagaacagaacggcttccatatcaaatcttccccgaacccttttgtgggaagccctcccaaaggactatcggtaccgaatggcgtaaagcaggacttggaaagctctgtccagtcctcagcgcatgactccatagccattatcccacctccacaaagtaccaaaccaggaagaggcaggaggaccgctaagtcttcagcaaacgacctgcttgcttcagatatctttgcctcagaacctccaggccagatgtcccccacaggacaacctgcagtcccacaggcgaactttatggatctcttcaaaaccagtgctcctgccccaatggggtcggggcccctcgtaggtctaggtactgtcccagtaacacccccccaagcaggaccttggacacctgttgtcttcactccttctacaactgtggtcccaggagccataataagtggccagccttccggttttggtcagccactcgtctttggtacaaccccagcagtgcaagtttggaatcagccttcatcatttgcaactgcagcttcccctccacccccggcagtttggtgtcctaccacatctgtggcacccaacacttggtcatccacaagtcccctggggaatccttttcagagtagtaatatctttccaccttccaccatatccactcagtcctttcctcagcctatgatgtcctctgttctggtcacacctccccaaccacctccccgaaatggcccactaaaggacactcttagtgatgccttcactggcttagacccacttggggataaagaggtcaaggaagtgaaagaaatgtttaaggacttccagctgcggcagccacctcttgtaccctcgaggaagggggagacaccttcctctgggacctcaagcgccttctccagttacttcaacaataaagttggcattcctcaggagcatgtagaccatgatgattttgatgccaatcaactgttgaacaagattaatgaaccaccaaagccagcccccagacaaggtgtcctctcgggtaccaaatctgctgacaattcactcgagaaccctttctctaaagggttcagctcaacaaacccctccgtggtctctcagcctgcatcttctgatgcccacaggagcccttttggaaatccttttgcctaacttctttctgaagttgtaatgctgactgactatccagatgagcaaaaggctggctttggtcaaggattaagcagatagccagaaacgtgctgacctctgtccttgctccagctttgatgtattacctgttaccctacttgtctttgcctcatgtacttgtaaaaagcctttcactctctctaggctaaagctacactgaaacaatggctttacataaattaaactcctaagctctctagctccaatataaatgaagtagcttccctaccaaatccttgtctgtcgtgctcctagaaccttccagaatattctccgttttaccctcaatttgggaggtgtggccacctttacccttaatatcacactgccttgagtaaatgtccaaatccttgtagctctcaaggtcatttgtgattcctggtgtgcatcataaatctaaacattaatattaacattaataggaaagcaagacaccttgcttcccattcccactcagacaagtttttttatgataaaatgaaagcaagactaacttctcgaatccacccaaggaccatttcgagatggtctttctcagctaattgcatcatttaccaatcctactccaagtggtgtttacatttgacttgaaaaggagaaaggtctaactcaaaacataaggcattattcaaagctaataaaacaatttctccctggggccccacattgttttcattccagacactttgcagctgtttgaccctgatgatattatgccctacattttccttgaagattctgattttatttcatgtgattcttttttctcaataaagatgattattgtgtgcatttactaaacaaacaaaaaaaaaaaa

SEQ ID NO: 11994 - protein, 768 aa, Rattus norvegicus; identical to SEQ ID NO: 9160
  ref <308>: DATABASE ACCESSION NUMBER: SWISS-Prot / O88797
  ref <309>: DATABASE ENTRY DATE: 2002-06-15

SEQ ID NO: 11995 - DNA, 2493 bp, Homo sapiens; identical to SEQ ID NO: 9161
  ref <308>: DATABASE ACCESSION NUMBER: EMBL / AK024965
  ref <309>: DATABASE ENTRY DATE: 2000-09-29

SEQ ID NO: 11996 - protein, 770 aa, Homo sapiens; identical to SEQ ID NO: 9162
  ref <308>: DATABASE ACCESSION NUMBER: Refseq / NP_001334
  ref <309>: DATABASE ENTRY DATE: 2001-12-24

SEQ ID NO: 11997 - DNA, 3616 bp, Rattus norvegicus
  ref <308>: DATABASE ACCESSION NUMBER: EMBL / U97142
  ref <309>: DATABASE ENTRY DATE: 1997-07-29
gcggccgcaggttgggtcggaactgaacccctgaaagcgggtccgcctcccgccctcgcgcccgcccggatctgagtcgctggcggcggtgggcggcagagcgacggggagtctgctctcaccctggatggagctgaactttgagtggccagaggagcgcagtcgcccggggatcgctgcacgctgagctctctccccgagaccgggcggcggctttggattttgggggggcggggaccagctgcgcggcggcaccatgttcctagccactctgtacttcgcgctgccactcctggatttgctgatgtccgccgaggtgagtggtggagaccgtctggactgtgtgaaagccagcgatcagtgcctgaaggaacagagctgcagcaccaagtaccgcacactaaggcagtgcgtggcgggcaaggaaaccaacttcagcctgacatccggccttgaggccaaggatgagtgccgtagcgccatggaggccttgaagcagaagtctctgtacaactgccgctgcaagcggggcatgaagaaagagaagaattgtctgcgtatctactggagcatgtaccagagcctgcagggaaatgacctcctggaagattccccgtatgagccggttaacagcaggttgtcagatatattccgggcagtcccgttcatatcagatgttttccagcaagtggaacacatttccaaagggaacaactgcctggacgcagccaaggcctgcaacctggacgacacctgtaagaagtacaggtcggcctacatcaccccctgcaccaccagcatgtccaacgaggtctgcaaccgccgtaagtgccacaaggccctcaggcagttcttcgacaaggttccggccaagcacagctacgggatgctcttctgctcctgccgggacatcgcctgcaccgagcggcggcgacagactatcgtccccgtgtgctcctatgaagaacgagagaggcccaactgcctgagtctgcaagactcctgcaagaccaattacatctgcagatctcgccttgcagatttttttaccaactgccagccagagtcaaggtctgtcagcaactgtcttaaggagaactacgcagactgcctcctggcctactcgggactgattggcacagtcatgactcccaactacgtagactccagcagcctcagcgtggcaccatggtgtgactgcagcaacagcggcaatgacctggaagactgcttgaaatttctgaatttttttaaggacaatacttgtctcaaaaatgcaattcaagcctttggcaatggctcagatgtgaccatgtggcagccagcccctccagtccagaccaccactgccaccactaccactgccttccgggtcaagaacaagcctctggggccagcagggtctgagaatgagatccccacacacgttttaccaccctgtgcgaatttgcaggctcagaagctgaaatccaatgtgtcgggtagcacacacctctgtctttctgatagtgatttcggaaaggatggtctcgctggtgcctccagccacataaccacaaaatcaatggctgctcctcccagctgcagtctgagctcactgccggtgctgatgctcaccgcccttgctgccctgttatctgtatcgttggcagaaacgtcgtagctgcatccgggaaaacagtatgaaaagacaaaagagaaccaagtattctgtccctgtcctcttgtatatctgaaaatccagttttaaaagctccgttgagaagcagtttcacccaactggaactctttccttgtttttaagaaagcttgtggccctcaggggcttctgttgaagaactgctacagggctaattccaaacccataaggctctggggcgtggtgcggcttaaggggaccatttgcaccatgtaaagcaagctgggcttatcatgtgtttgatggtgaggatggtagtggtgatgatgatggtaattttaacagcttgaaccctgttctctctactggttaggaacaggagatactattgataaagattcttccatgtcttactcagcagcattgccttctgaagacaggcccgcagcctagtgtgaatgacaagtggaggttggcctcaagagtggacttggcagactctaccttgtagtaatgttcacctttccgtgtatggtctccacagagtgtttatgtatttacagactgttctgtgatcccccaacaacaacaaccacaaattccttggtcacctccaaatgtaaccggtcctttagcccagtagaggagggtgggtgtggccctggcacagctcccggattgttgatgggcactctcctgagctttgcttgagtgagaagctgaatgtagctgaaaatcaactcttcttacacttcttactgcttcgttcacttacgaggtcacatatagaacaaacatcaccaactattagcttaccgttagcttcccaactattagctttctatgttttgaaagcagtgttgctgaccccatgttttaatgatggtttaatacatgcagccctttcctctcatcggtaacactagctccaacatcaacttcatgcatgtggctctcaaaagcaggccccaagaagcccagttctttaggagaaagctgcgtcctgtttctgtggacaggcaggaggaaacagagcagcctgcccgtggtgtctttatctgttttgaaatcaaggctgcctgtgtgtaaggaatggttcaattcttataaagggtgccactgttgatgccacaactggcagttggtctagctccaggacaccggtttccatgttgcctggcagagacagctttgattgggactggctggccacaagggatgggatgaagatgtgctgccctctctttcaaagttgagccctgccagggcacatagaagcatctttgctcctgaccacaacgtagaacagcttggattcaaggtcatcaagcgtctcctgtacattgctctgtgaccttcataacagactgtcccgcacaaaaggaacggcagtttatggatctagagtgggagcacagggtctggaaaggtgaaccgattggcaaaatacacagaacaggagggagagtctcaagccgagacatcttgcttactagccacacaccatctcctggagccctcctcctgacctgggcagacccttaggtgtatatctaaagacctcttcaatgttcaggttcagaatctgtaaatggttgcgtcctggcacccattcctgaaaactgaacaaaggagaggatatctttcctccattgagccctgaaagtatgactggcttctcaccctcccacagagcagggagccctggtgcacacagtctcctgatatcctccctgctctttgaggtttgccttgggagaaaatgattcacctcgggaggggacgctttggtgtctgaagtacgtttatatcgaaatgttaatgaatacccatgtaaaatactcaatagccacctttcttcccttcacaatgttttcgaggggaatgcatccaacatccaagtgtacctggtcagtgggaagttccatgaagactcatacattgaataaacatattcgatgtgccgaaagcggccgc

SEQ ID NO: 11998 - protein, 468 aa, Rattus norvegicus; identical to SEQ ID NO: 6712
  ref <308>: DATABASE ACCESSION NUMBER: SWISS-Prot / Q62997
  ref <309>: DATABASE ENTRY DATE: 1998-07-15

SEQ ID NO: 11999 - DNA, 1619 bp, Homo sapiens; identical to SEQ ID NO: 6713
  ref <308>: DATABASE ACCESSION NUMBER: EMBL / AF042080
  ref <309>: DATABASE ENTRY DATE: 2000-09-14

SEQ ID NO: 12000 - protein, 465 aa, Homo sapiens; identical to SEQ ID NO: 6714
  ref <308>: DATABASE ACCESSION NUMBER: SWISS-Prot / P56159
  ref <309>: DATABASE ENTRY DATE: 2002-06-15

SEQ ID NO: 12001 - DNA, 769 bp, Rattus norvegicus
  ref <308>: DATABASE ACCESSION NUMBER: EMBL / V01216
  ref <309>: DATABASE ENTRY DATE: 1993-09-12
ctcttcctgggccggtgcctctgagtgtcttcggcatggcgctgcacatggttcttgtcgttttgagcctcctgcccttgttggaagctcagaacccagaacctgccaacatcaccctaggcatacctattaccaatgagaccctgaaatggctctcagacaaatggttttacatgggagcagctttccgagaccccgtgttcaagcaggcagttcaaacgatacagacggaatatttttaccttacccccaacttgataaacgacacaattgaacttcgggagtttcagaccacagacgaccagtgtgtctataacttcacccatctaggagtccagagagagaatgggaccttatccaagtgtgcaggagcagtgaaaatctttgcccatttgatagtgctgaagaaacatgggaccttcatgcttgcctttaacctgacagatgagaaccgggggctgtccttctatgctaaaaagccagacttgtccccagagctgcggaaaatattccagcaggctgtcaaagatgtgggcatggatgaatcagaaatcgtatttgtcgactggacaaaggataagtgcagtgagcagcagaagcagcagctggagctggagaaggagactaagaaggagaccaagaaggatccttaggccaagcatgaactcagctctctgaactccggggactgtccccatgcccactctacccccactcctgtgcacctcgattctattttccacaataataaaggtttggttaaacaatc

SEQ ID NO: 12002 - protein, 205 aa, Rattus norvegicus
  ref <308>: DATABASE ACCESSION NUMBER: SWISS-Prot / P02764
  ref <309>: DATABASE ENTRY DATE: 1997-11-01
MALHMVLVVLSLLPLLEAQNPEPANITLGIPITNETLKWLSDKWFYMGAAFRDPVFKQAVQTIQTEYFYLTPNLINDTIELREFQTTDDQCVYNFTHLGVQRENGTLSKCAGAVKIFAHLIVLKKHGTFMLAFNLTDENRGLSFYAKKPDLSPELRKIFQQAVKDVGMDESEIVFVDWTKDKCSEQQKQQLELEKETKKETKKDP

SEQ ID NO: 12003 - DNA, 803 bp, Homo sapiens
  ref <308>: DATABASE ACCESSION NUMBER: EMBL / X02544
  ref <309>: DATABASE ENTRY DATE: 1995-03-30
gcccatagtttattataaaggtgactgcaccctgcagccaccagcactgcctggctccacgtgcctcctggtctcagtatggcgctgtcctgggttcttacagtcctgagcctcctacctctgctggaagcccagatcccattgtgtgccaacctagtaccggtgcccatcaccaacgccaccctggaccagatcactggcaagtggttttatatcgcatcggcctttcgaaacgaggagtacaataagtcggttcaggagatccaagcaaccttcttttacttcacccccaacaagacagaggacacgatctttctcagagagtaccagacccgacaggaccagtgcatctataacaccacctacctgaatgtccagcgggaaaatgggaccatctccagatacgtgggaggccaagagcatttcgctcacttgctgatcctcagggacaccaagacctacatgcttgcttttgacgtgaacgatgagaagaactgggggctgtctgtctatgctgacaagccagagacgaccaaggagcaactgggagagttctacgaagctctcgactgcttgcgcattcccaagtcagatgtcgtgtacaccgattggaaaaaggataagtgtgagccactggagaagcagcacgagaaggagaggaaacaggaggagggggaatcctagcaggacacagccttggatcaggacagagacttggggccatcctgcccctccaacccgacatgtgtacctcagctttttccctcacttgcatcaataaagcttctgtgtttggaacagct

SEQ ID NO: 12004 - protein, 201 aa, Homo sapiens
  ref <308>: DATABASE ACCESSION NUMBER: SWISS-Prot / P02763
  ref <309>: DATABASE ENTRY DATE: 2002-06-15
MALSWVLTVLSLLPLLEAQIPLCANLVPVPITNATLDQITGKWFYIASAFRNEEYNKSVQEIQATFFYFTPNKTEDTIFLREYQTRQDQCIYNTTYLNVQRENGTISRYVGGQEHFAHLLILRDTKTYMLAFDVNDEKNWGLSVYADKPETTKEQLGEFYEALDCLRIPKSDVVYTDWKKDKCEPLEKQHEKERKQEEGES

SEQ ID NO: 12005 - DNA, 360 bp, Rattus norvegicus
  ref <308>: DATABASE ACCESSION NUMBER: Refseq / NM_024128
  ref <309>: DATABASE ENTRY DATE: 2001-02-28
atgccagggctccggccatcagaacagtgcatttggtggtttcgttctcttttatgcccctttgctatttgcagaccttaccccatacatagagtgaccccacgctctgctgactgcagtgtggatgcactgctaagcggcgcagaggaaggaaggtgtgcaccacgacacacgcagccctgccagggcagttctgggaggttctctttgctatgtcccctgcgcagaacacgaggatggggtggggaggagctggctctgggccagggggttgccgagcctgtgctcctgtgggtggtgtctgctggtgatgtgctagataggaagaaagcccactggctcgttcctttcctgttatga

SEQ ID NO: 12006 - protein, 119 aa, Rattus norvegicus; identical to SEQ ID NO: 9196
  ref <308>: DATABASE ACCESSION NUMBER: Refseq / NP_077042
  ref <309>: DATABASE ENTRY DATE: 2001-02-28

SEQ ID NO: 12007 - DNA, 606 bp, Homo sapiens
  ref <308>: DATABASE ACCESSION NUMBER: EMBL / AW974756
  ref <309>: DATABASE ENTRY DATE: 2000-06-08
gtttaaggggtcaaagttggtatcattaacagggcaatgacttgacccttctttcaactgatcttactggtagttgtctctagtttttaagtaaattaatgatggaccatcccccaaacagagaactatgggggtatgaaacaaggctgaaggcttttaaccatgggagaaaaaggtgctggtattattcatatagcataacctgaggttggagaggaccacttgggagcctgtaaccaaaactagaaggtaacttctgggatggacggaggttcccttgaagcagtgccaacctaaatctacctcaggtaagtagttagattaactttttcaagatttcagaccaaacaagacaacttgtattcagttgatgtattcctatgctttaatgtttttgtttgcccttaattattaaataaacatttgttctgaaaaaaaaaaaaaaaaaaaaccatttgcggccgcaagcttattccctttagtgagggttaattttagcttggcactggccgtcgttttaacaacgtttgactgggaaaaccctggcgtttccccaaattaattgcctttgcagacataccccttttgccgcttggcgtaatagca

SEQ ID NO: 12008 - DNA, 2216 bp, Rattus norvegicus; identical to SEQ ID NO: 9199
  ref <308>: DATABASE ACCESSION NUMBER: Refseq / NM_031518
  ref <309>: DATABASE ENTRY DATE: 2002-11-05

SEQ ID NO: 12009 - protein, 278 aa, Rattus norvegicus; identical to SEQ ID NO: 9200
  ref <308>: DATABASE ACCESSION NUMBER: SWISS-Prot / P04218
  ref <309>: DATABASE ENTRY DATE: 2002-06-15

SEQ ID NO: 12010 - DNA, 210 bp, Homo sapiens; identical to SEQ ID NO: 9201
  ref <308>: DATABASE ACCESSION NUMBER: EMBL / X05323
  ref <309>: DATABASE ENTRY DATE: 2002-11-04

SEQ ID NO: 12011 - protein, 274 aa, Homo sapiens; identical to SEQ ID NO: 9202
  ref <308>: DATABASE ACCESSION NUMBER: SWISS-Prot / CAA28943
  ref <309>: DATABASE ENTRY DATE: 2002-06-15

SEQ ID NO: 12012 - DNA, 1317 bp, Rattus norvegicus
  ref <308>: DATABASE ACCESSION NUMBER: EMBL / X02341
  ref <309>: DATABASE ENTRY DATE: 1995-03-30
agttcctggcgatcctgacactcttcagtgtgctgttctcacagtcgctggcctggcctctctatgggccaccttcttcagtgaggttggatgacaggctgcagttcgaaggagcaggtgaccctgatcaagtctctttaaaagcagactctgacatcttgcagaatgccttagcggagaatgacacgccctattatgatgtgtccagaaatgccaggcatgctgatggagttttcaccagcgactacagtagacttctgggtcagatttctgccaaaaaataccttgagtcactcattggcaaacgaatcagcagtagcatctcggaagaccccgtgccggtcaaacgacactctgatgcagtcttcacagataactacacccgccttagaaagcaaatggctgtgaagaaatacttgaactccattctaaatgggaagaggagcagtgagggagattctccagacttccttgaagagctagagaaatgatgagaagggtcctctgggcagagctgaagatcagagaattcttgaaggaaaacaaccaagtgattacattatgagttctacatatctaattcaagaaaacaacttccatagcaaaaccaaataaaatgtgttgtgaatattgtggtttcctttatgtaataactgtgatgtttacattgtaaatatatttagcactctaaaattcatctttagctcgtgaaaggcttataatttcatatgctatatattctttaaaaaatatatttaatgataggtagatactagattaattgcaattatctgaagctttctgcaagggtagcaatcgaggaaaattgatgggcttatttatagcatgcagttaactattcaacagagcagaacagataatcagtgtgaccaagtctgaatgctaagcagataggccgccgtgttacataaagcaaaatatctaagggaaaaccaaacatatggaaaatggagatacttgacaaaaggattttcaaaattgtattcctccagtgatagggactccacctctcatggattcatctctccgactaggatttgcaatccccaaaagcttcttcgagttgcttcagctaggaaaagctcaacttccaacctggagcttcccctttctgcttgtgctgtggatgtgtaagctagaagcctaacggagtgcttgatttccagtagtaaatactctttccgtaatcactcacaacagtattttgtcttattggcttcctttgctgaaagtacatttgtagacacaactatttttccaatgtgattgtatgaaattaaagacaggaataaagat

SEQ ID NO: 12013 - protein, 170 aa, Rattus norvegicus
  ref <308>: DATABASE ACCESSION NUMBER: SWISS-Prot / CAA26200
  ref <309>: DATABASE ENTRY DATE: 2002-06-15
MESRSKPQFLAILTLFSVLFSQSLAWPLYGPPSSVRLDDRLQFEGAGDPDQVSLKADSDILQNALAENDTPYYDVSRNARHADGVFTSDYSRLLGQISAKKYLESLIGKRISSSISEDPVPVKRHSDAVFTDNYTRLRKQMAVKKYLNSILNGKRSSEGDSPDFLEELEK

SEQ ID NO: 12014 - DNA, 1511 bp, Homo sapiens
  ref <308>: DATABASE ACCESSION NUMBER: Refseq / NM_003381
  ref <309>: DATABASE ENTRY DATE: 2002-11-05
ggtcagctccaaaacaatccggaacggccagctccgggggagcacgactgggcgagaggcacagaaatggacaccagaaataaggcccagctccttgtgctcctgactcttctcagtgtgctcttctcacagacttcggcatggcctctttacagggcaccttctgctctcaggttgggtgacagaataccctttgagggagcaaatgaacctgatcaagtttcattaaaagaagacattgacatgttgcaaaatgcattagctgaaaatgacacaccctattatgatgtatccagaaatgccaggcatgctgatggagttttcaccagtgacttcagtaaactcttgggtcaactttctgccaaaaagtaccttgagtctcttatgggaaaacgtgttagcagtaacatctcagaagaccctgtaccagtcaaacgtcactcagatgcagtcttcactgacaactatacccgccttagaaaacaaatggctgtaaagaaatatttgaactcaattctgaatggaaagaggagcagtgagggagaatctcccgactttccagaagagttagaaaaatgatgaaaaagacctttggagcaaagctgatgacaacttcccagtgaattcttgaaggaaaatgatacgcaacataattaaattttagattctacataagtaattcaagaaaacaacttcaatatccaaaccaaataaaaatattgtgttgtgaatgttgtgatgtattctagctaatgtaataactgtgaagtttacattgtaaatagtatttgagagttctaaattttgtctttaactcataaaaagcctgcaatttcatatgctgtatatcctttctaacaaaaaaatatattttaatgataagtaatgctaggttaatccaattatatgagacgtttttggaagagtagtaatagagcaaaattgatgtgtttatttatagagtgtacttaactattcaggagagtagaacagataatcagtgtgtctaaatttgaatgttaagcagatggaatgctgtgttaaataaacctcaaaatgtctaagatagtaacaatgaagataaaaagacattcttccaaaaagattttcagaaaatattatgtgtttccatattttataggcaacctttatttttaatggtgttttaaaaaatctcaaatttggattgctaatcaccaaaggctctctcctgatagtctttcagttaaggagaacgacccctgcttctgacactgaaacttccctttctgcttgtgttaagtatgtgtaaaatgtgaagtgaatgaaacactcagttgttcaataataaatatttttgccataatgactcagaatattgctttggtcatatgagcttccttctgtgaaatacattttggagacacaactatttttccaaaataattttaagaaatcaaagagagaaaataaagaccttgcttatgattgcagataaaaaaaaaaaaaaaaaaaaaaaaaaaaaaaaaaaa

SEQ ID NO: 12015 - protein, 170 aa, Homo sapiens
  ref <308>: DATABASE ACCESSION NUMBER: SWISS-Prot / P01282
  ref <309>: DATABASE ENTRY DATE: 2002-06-15
MDTRNKAQLLVLLTLLSVLFSQTSAWPLYRAPSALRLGDRIPFEGANEPDQVSLKEDIDMLQNALAENDTPYYDVSRNARHADGVFTSDFSKLLGQLSAKKYLESLMGKRVSSNISEDPVPVKRHSDAVFTDNYTRLRKQMAVKKYLNSILNGKRSSEGESPDFPEELEK

SEQ ID NO: 12016 - DNA, 1771 bp, Rattus norvegicus; identical to SEQ ID NO: 9207
  ref <308>: DATABASE ACCESSION NUMBER: EMBL / X02601
  ref <309>: DATABASE ENTRY DATE: 1993-09-12

SEQ ID NO: 12017 - protein, 475 aa, Rattus norvegicus; identical to SEQ ID NO: 9208
  ref <308>: DATABASE ACCESSION NUMBER: SWISS-Prot / P03957
  ref <309>: DATABASE ENTRY DATE: 2002-06-15

SEQ ID NO: 12018 - DNA, 1434 bp, Homo sapiens; identical to SEQ ID NO: 9209
  ref <308>: DATABASE ACCESSION NUMBER: EMBL / J03209
  ref <309>: DATABASE ENTRY DATE: 1999-07-02

SEQ ID NO: 12019 - protein, 477 aa, Homo sapiens; identical to SEQ ID NO: 9210
  ref <308>: DATABASE ACCESSION NUMBER: SWISS-Prot / P08254
  ref <309>: DATABASE ENTRY DATE: 2002-06-15

SEQ ID NO: 12020 - DNA, 2460 bp, Rattus norvegicus
  ref <308>: DATABASE ACCESSION NUMBER: Refseq / NM_012998
  ref <309>: DATABASE ENTRY DATE: 2000-11-01
ccccggcgccaacctagctgccccgcccgctgccgacgtccgacatgctgagccgtgctttgctgtgcctggccctggcctgggcggctagggtgggcgccgacgctctggaggaggaggacaacgtcctggtgctgaagaagagcaacttcgcagagccggcggcgcacaactacctgctggtggagttctatgccccatggtgtggccactgcaaagcactggccccagagtatgccaaagctgctgcaaaactgaaggcagaaggctctgagatccgactagcaaaggtggacgccacagaagagtctgacctggcccagcagtatggtgtccgtggctaccccacaatcaagttcttcaagaatggagacacagcctccccaaaggaatatacagctggcagggaagctgacgacattgtgaactggctgaagaaacgcacaggcccagcagccacaaccctgtctgacactgcagctgcagagtccttggtggactcaagcgaagtgacggtcatcggcttcttcaaggacgcagggtcagactccgccaagcagttcttgctggcagcagaggctgttgatgacataccttttggaatcacttccaatagcgatgtgttttccaagtaccagctggacaaggatggggtggtcctctttaagaagtttgatgaaggccgcaacaattttgaaggtgagatcaccaaggagaagctattagacttcatcaagcacaaccagctgcctttggtcatcgagttcactgaacagacagctccaaagattttcggaggtgaaatcaagacacatattctgctgttcctgcccaagagtgtgtctgactacgatggcaaattgagcaactttaagaaagcggccgagggctttaagggcaagatcctgttcatcttcatcgatagtgaccacactgacaaccagcgcatacttgagttctttggcctgaagaaggaggaatgtccagctgtgcggcttattaccctggaggaagagatgaccaagtacaaaccggagtcagacgagctgacagctgagaagatcacacaattttgccaccacttcctggagggcaagatcaagccccacctgatgagccaggaactgcctgaagactgggacaagcagccagtgaaagtgctagttgggaaaaactttgaggaggttgcttttgatgagaaaaagaacgtgtttgttgaattctatgctccctggtgtggtcactgcaagcagctagccccgatttgggataaactgggagagacatacaaagaccatgagaatatcgtcatcgctaagatggactcaacagccaatgaggtggaagctgtgaaggtgcacagctttcccacactcaagttcttcccagcaagtgcagacagaacggtcattgattacaacggtgagcggacactagatggttttaagaaattcttggagagcggtggccaggatggagcgggggacaatgacgacctcgacctagaagaagctttagagccagatatggaagaagacgacgatcagaaagccgtgaaggatgaactgtagtgcagaagccagatctgggcgcctgaacccaaaacctcggtgggccatgtcccagcagcccacatctccggagcctgagcctcaccccaggagggagcgccatcagaacccagggaatctttctgaagccacactcatctgacacacgtacacttaaacctgtctcttctttttttgcttttcaattttggaaagggatctctgtccaggccagcccatcttgaagggctacgttttgttttaattggtggtgtacttttttgtacgtggattttgtcccaagtgcttgctaccatatttggggatttcacactggtaatgtctttcctgttagagaggtttatgctatcacttcagatttcgtctgtgagatgtttcatcttcctgacatgtctccatgtcgaggtacttgttccaccacgcagacctccctgagaccccttcctgccctgcgcaggaggcgatggttctgggtcgtatgctctctctctctccaccttgtactagtgttgccatgacagcatggcttttgtagtttgcatttaacctggggatttctgcatcctgtcagagggtgggtccccacgtgtggaaaagagacagtggtggcttgctgccaggctcaggccaggcctggacagctctcactcttcttaagccagaactaccgaccagccggccggctgtgggcacattactctggctgctggatcctcttccagcatggcatgtggcctgtgtgaggcagaaccgggacccttgattcccagactgggagtcagctaaggacactggggctgaatgaaatgcccattctcaaggtctatttctaaaccataatgttggaattgaacacattggctaaataaagttgaaattttactaccat

SEQ ID NO: 12021 - protein, 509 aa, Rattus norvegicus
  ref <308>: DATABASE ACCESSION NUMBER: SWISS-Prot / P04785
  ref <309>: DATABASE ENTRY DATE: 2002-06-15
MLSRALLCLALAWAARVGADALEEEDNVLVLKKSNFAEALAAHNYLLVEFYAPWCGHCKALAPEYAKAAAKLKAEGSEIRLAKVDATEESDLAQQYGVRGYPTIKFFKNGDTASPKEYTAGREADDIVNWLKKRTGPAATTLSDTAAAESLVDSSEVTVIGFFKDAGSDSAKQFLLAAEAVDDIPFGITSNSDVFSKYQLDKDGVVLFKKFDEGRNNFEGEITKEKLLDFIKHNQLPLVIEFTEQTAPKIFGGEIKTHILLFLPKSVSDYDGKLSNFKKAAEGFKGKILFIFIDSDHTDNQRILEFFGLKKEECPAVRLITLEEEMTKYKPESDELTAEKITQFCHHFLEGKIKPHLMSQELPEDWDKQPVKVLVGKNFEEVAFDEKKNVFVEFYAPWCGHCKQLAPIWDKLGETYKDHENIVIAKMDSTANEVEAVKVHSFPTLKFFPASADRTVIDYNGERTLDGFKKFLESGGQDGAGDNDDLDLEEALEPDMEEDDDQKAVKDEL

SEQ ID NO: 12022 - DNA, 598 bp, Homo sapiens
  ref <308>: DATABASE ACCESSION NUMBER: EMBL / BE770246
  ref <309>: DATABASE ENTRY DATE: 2001-08-31
gcgctgtagggacaactttgtaacgtggcttttgatgagaaaaaaaacgtctttgtggagttctgtaagtgttgccctttcagctccccaggtccgtgccaccagtgcacgcgcagggtaggcagactcctggggaagcgtctgccagtggctttgtgtccaggacacaccctagaactgctttcttttcagatgccccatggtgtggtcactgcaaacagttggctcccatttgggataaactgttagagacgtacaaggaccatgagaacatcgtcatcgccaagatggactcgactgccaacaagcgcctggccaggcgcttgtgggcaatcactgttgggtatatctcagccagatttctaaactcaagggagatcgttgggaagtcctccagcacctggcgatccttctccttgctctcccatgaaccgccagtctggtgggtaaaggaaagagtgaaagttgtgtaacagcgggaccttccttttccacactgatggtcatgtcatcttccagtgtgtccagagctcggagaaccagatacaatatgcacactgcattgtgcatatccccaacaagcgactgggggatccga

SEQ ID NO: 12023 - protein, 417 aa, Homo sapiens; identical to SEQ ID NO: 4132
  ref <308>: DATABASE ACCESSION NUMBER: SWISS-Prot / P37268
  ref <309>: DATABASE ENTRY DATE: 2002-06-15

SEQ ID NO: 12024 - DNA, 2116 bp, Rattus norvegicus
  ref <308>: DATABASE ACCESSION NUMBER: EMBL / X06769
  ref <309>: DATABASE ENTRY DATE: 1993-09-12
cgcaactgagaagactggatagagccggcggagccgcgaacgagcagtgaccgcgctcccacccagctctgctctgcagctcccaccagtgtctacccctggacccctcgccgagctttgcccaaaccacgaccatgatgttctcgggtttcaacgcggactacgaggcgtcatcctcccgctgcagtagcgcctccccggccggggacagcctttcctactaccattccccagccgactccttctccagcatgggctcccctgtcaacacacaggacttttgcgcagatctgtccgtctctagtgccaactttatccccacggtgacagccatctccaccagcccagacctgcagtggctggtgcagcccactctggtctcctccgtggccccatcgcagaccagagcgccccatccttacggactccccaccccgtcgaccggggcttacgccagagcgggagtggtgaagaccatgtcaggcggcagagcgcagagcatcggcagaaggggcaaagtagagcagctatctcctgaagaggaagagaaacggagaatccgaagggaaaggaataagatggctgcagccaagtgccggaatcggaggagggagctgacagatacgctccaagcggagacagatcaacttgaagacgagaagtctgcgttgcagaccgagattgccaatctactgaaagagaaggaaaaactggagtttattttggcagcccaccgacctgcctgcaagatccccaatgacctgggcttcccagaggagatgtctgtgacctccctggacttgactgggggtctgcctgaggctaccaccccagagtctgaggaggccttcaccctgcctcttctcaatgaccctgagcccaagccatccttggagccggtcaagaacattagcaacatggagctgaaggctgaaccctttgatgacttcttgtttccggcatcatctaggcccagtggctcggagactgcccgctctgtgccagatgtggacctgtctggttccttctatgcagcagactgggagcctctgcacagcagttccctggggatggggcccatggtcacagagctggagcccctgtgcactcccgttgtcacctgcactcccagctgcactacctatacgtcttcctttgtcttcacctaccccgaggctgactccttccctagctgcgcagctgcccaccgaaagggcagcagcagcaacgagccctcctctgactcactgagctcgcccacactgctagccctgtgagcagtcagagaaggcagggcagccggcactgactgagctggtgcattacagagaggagaaacacgtcttccctcgaggggttcccgtagacctagggaggaccttatctgtgcgtgaaacacaccaagctgtggacctcaaggacttgaaagcatccacatctggactccagtcctcacctcttccggagatgtagcaaaaaaacaaaaaaacaaaacaaaaaaaaaacaaaacaaaaaatcaaaagcaaccgcatggagtgtattgtttgtagtgacacctgagagctggtagttagtagcatgtgagccaggcctgggtctgtgtctcttttctctttctccttagtcttctcatagcattaactaatctgttgggttcattattggaattaacctggtgctggatatttttcggattgtatctagtgcagctgattttaacaatacctactgtgttcctggcaatagtgtgttccaatttagaaatgaccaatattaaactaagaaaagatagaactttattttccggtagatagaaataaatcgctatatccacgtactgtagctcttcagcgtccatgttcattgtcatgtaactgatcatgcattgttgaggtggtctgaatgttctgacattaacagttttccatgaaaacgttttattgtgttttcaatttatttattaagatggattctcagatatttatatttttattttatttttttctatcctgaggtctttcgacatgtggaaagtgaatttgaatgaaaaaattttaagcattgtttgcttattgttccaagacattgtcaataaaagcatttaagttgaatgcg

SEQ ID NO: 12025 - protein, 380 aa, Rattus norvegicus
  ref <308>: DATABASE ACCESSION NUMBER: SWISS-Prot / CAA29937
  ref <309>: DATABASE ENTRY DATE: 2002-06-15
MMFSGFNADYEASSSRCSSASPAGDSLSYYHSPADSFSSMGSPVNTQDFCADLSVSSANFIPTVTAISTSPDLQWLVQPTLVSSVAPSQTRAPHPYGLPTPSTGAYARAGVVKTMSGGRAQSIGRRGKVEQLSPEEEEKRRIRRERNKMAAAKCRNRRRELTDTLQAETDQLEDEKSALQTEIANLLKEKEKLEFILAAHRPACKIPNDLGFPEEMSVTSLDLTGGLPEATTPESEEAFTLPLLNDPEPKPSLEPVKNISNMELKAEPFDDFLFPASSRPSGSETARSVPDVDLSGSFYAADWEPLHSSSLGMGPMVTELEPLCTPVVTCTPSCTTYTSSFVFTYPEADSFPSCAAAHRKGSSSNEPSSDSLSSPTLLAL

SEQ ID NO: 12026 - DNA, 3565 bp, Homo sapiens
  ref <308>: DATABASE ACCESSION NUMBER: EMBL / V01512
  ref <309>: DATABASE ENTRY DATE: 1994-11-21
gcagccgggcggccgcagaagcgcccaggcccgcgcgccacccctctggcgccaccgtggttgagcccgtgacgtttacactcattcataaaacgcttgttataaaagcagtggctgcggcgcctcgtactccaaccgcatctgcagcgagcaactgagaagccaagactgagccggcggccgcggcgcagcgaacgagcagtgaccgtgctcctacccagctctgcttcacagcgcccacctgtctccgcccctcggcccctcgcccggctttgcctaaccgccacgatgatgttctcgggcttcaacgcagactacgaggcgtcatcctcccgctgcagcagcgcgtccccggccggggatagcctctcttactaccactcacccgcagactccttctccagcatgggctcgcctgtcaacgcgcaggtaaggctggcttcccgtcgccgcggggccgggggcttggggtcgcggaggaggagacaccgggcgggacgctccagtagatgagtagggggctcccttgtgcctggagggaggctgccgtggccggagcggtgccggctcgggggctcgggacttgctctgagcgcacgcacgcttgccatagtaagaattggttcccccttcgggaggcaggttcgttctgagcaacctctggtctgcactccaggacggatctctgacattagctggagcagacgtgtcccaagcacaaactcgctaactagagcctggcttcttcggggaggtggcagaaagcggcaatcccccctcccccggcagcctggagcacggaggagggatgagggaggagggtgcagcgggcgggtgtgtaaggcagtttcattgataaaaagcgagttcattctggagactccggagcggcgcctgcgtcagcgcagacgtcagggatatttataacaaaccccctttcaagcaagtgatgctgaagggataacgggaacgcagcggcaggatggaagagacaggcactgcgctgcggaatgcctgggaggaaaagggggagacctttcatccaggatgagggacatttaagatgaaatgtccgtggcaggatcgtttctcttcactgctgcatgcggcactgggaactcgccccacctgtgtccggaacctgctcgctcacgtcggctttccccttctgttttgttctaggacttctgcacggacctggccgtctccagtgccaacttcattcccacggtcactgccatctcgaccagtccggacctgcagtggctggtgcagcccgccctcgtctcctctgtggccccatcgcagaccagagcccctcaccctttcggagtccccgccccctccgctggggcttactccagggctggcgttgtgaagaccatgacaggaggccgagcgcagagcattggcaggaggggcaaggtggaacaggtgaggaactctagcgtactcttcctgggaatgtgggggctgggtgggaagcagccccggagatgcaggagcccagtacagaggatgaagccactgatggggctggctgcacatccgtaactgggagccctggctccaagcccattccatcccaactcagactctgagtctcaccctaagaagtactctcatagtttcttccctaagtttcttaccgcatgctttcagactgggctcttctttgttctcttgctgaggatcttattttaaatgcaagtcacacctattctgcaactgcaggtcagaaatggtttcacagtggggtgccaggaagcagggaagctgcaggagccagttctactggggtgggtgaatggaggtgatggcagacacttttactgaatgtcggtctttttttgtgattattctagttatctccagaagaagaagagaaaaggagaatccgaagggaaaggaataagatggctgcagccaaatgccgcaaccggaggagggagctgactgatacactccaagcggtaggtactctgtgggttgctcctttttaaaacttaagggaaagttggagattgagcataagggcccttgagtaagactgtgtcttatgctttcctttatccctctgtatacaggagacagaccaactagaagatgagaagtctgctttgcagaccgagattgccaacctgctgaaggagaaggaaaaactagagttcatcctggcagctcaccgacctgcctgcaagatccctgatgacctgggcttcccagaagagatgtctgtggcttcccttgatctgactgggggcctgccagaggttgccaccccggagtctgaggaggccttcaccctgcctctcctcaatgaccctgagcccaagccctcagtggaacctgtcaagagcatcagcagcatggagctgaagaccgagccctttgatgacttcctgttcccagcatcatccaggcccagtggctctgagacagcccgctccgtgccagacatggacctatctgggtccttctatgcagcagactgggagcctctgcacagtggctccctggggatggggcccatggccacagagctggagcccctgtgcactccggtggtcacctgtactcccagctgcactgcttacacgtcttccttcgtcttcacctaccccgaggctgactccttccccagctgtgcagctgcccaccgcaagggcagcagcagcaatgagccttcctctgactcgctcagctcacccacgctgctggccctgtgagggggcagggaaggggaggcagccggcacccacaagtgccactgcccgagctggtgcattacagagaggagaaacacatcttccctagagggttcctgtagacctagggaggaccttatctgtgcgtgaaacacaccaggctgtgggcctcaaggacttgaaagcatccatgtgtggactcaagtccttacctcttccggagatgtagcaaaacgcatggagtgtgtattgttcccagtgacacttcagagagctggtagttagtagcatgttgagccaggcctgggtctgtgtctcttttctctttctccttagtcttctcatagcattaactaatctattgggttcattattggaattaacctggtgctggatattttcaaattgtatctagtgcagctgattttaacaataactactgtgttcctggcaatagtgtgttctgattagaaatgaccaatattatactaagaaaagatacgactttattttctggtagatagaaataaatagctatatccatgtactgtagtttttcttcaacatcaatgttcattgtaatgttactgatcatgcattgttgaggtggtctgaatgttctgacattaacagttttccatgaaaacgttttattgtgtttttaatttatttattaagatggattctcagatatttatatttttattttatttttttctaccttgaggtcttttgacatgtggaaagtgaatttgaatgaaaaatttaagcattgtttgcttattgttccaagacattgtcaataaaagcatttaagttgaatgcgaccaaccttgtgctcttttcattctggaagt

SEQ ID NO: 12027 - protein, 380 aa, Homo sapiens
  ref <308>: DATABASE ACCESSION NUMBER: SWISS-Prot / CAA24756
  ref <309>: DATABASE ENTRY DATE: 2002-06-15
MMFSGFNADYEASSSRCSSASPAGDSLSYYHSPADSFSSMGSPVNAQDFCTDLAVSSANFIPTVTAISTSPDLQWLVQPALVSSVAPSQTRAPHPFGVPAPSAGAYSRAGVVKTMTGGRAQSIGRRGKVEQLSPEEEEKRRIRRERNKMAAAKCRNRRRELTDTLQAETDQLEDEKSALQTEIANLLKEKEKLEFILAAHRPACKIPDDLGFPEEMSVASLDLTGGLPEVATPESEEAFTLPLLNDPEPKPSVEPVKSISSMELKTEPFDDFLFPASSRPSGSETARSVPDMDLSGSFYAADWEPLHSGSLGMGPMATELEPLCTPVVTCTPSCTAYTSSFVFTYPEADSFPSCAAAHRKGSSSNEPSSDSLSSPTLLAL

SEQ ID NO: 12028 - DNA, 2324 bp, Rattus norvegicus
  ref <308>: DATABASE ACCESSION NUMBER: EMBL / X07467
  ref <309>: DATABASE ENTRY DATE: 1993-09-12
gtgaacgtgtttggcagcggcaactaaattcagaaaacatcatggcagagcaggtggctttgagccggacccaggtgtgtgggatcctgagggaagagttgtaccagggtgatgccttccaccaagctgatacacacatatttatcatcatgggtgcatcgggtgacctggccaagaagaagatttatcctaccatctggtggctgttccgggatggccttctacccgaagacaccttcattgtaggctatgcccgctcacgactcacagtggatgacatccgcaaacagagtgagcccttctttaaagtcactccagaagaaagacccaagctagaggagttctttgcccgtaactcctatgtagctggccagtatgatgatccagcctcctacaagcacctcaacagccacatgaatgccctgcaccagggaatgcaggccaaccgtctgttctacctggccttgccccccactgtctatgaagcagtcaccaagaacattcaagagatctgcatgagtcagacaggctggaaccgcatcatagtggagaagcccttcgggagagacctgcagagctccaatcaactgtcgaaccacatctcctctctgtttcgtgaggaccagatctaccgcattgaccactacctgggcaaagagatggtccagaacctcatggtgctgagatttgccaacaggatctttggacccatctggaatcgagacaacattgcttgtgtgatccttacatttaaagagccctttggtactgagggtcgtgggggctattttgatgaatttgggatcatcagggatgtcatgcagaaccacctcctgcagatgttgtgtctagtggccatggaaaagcctgcctctacagattcagatgatgtccgtgatgagaaggtcaaagtgttaaaatgtatctcagaggtggaaactgacaacgtggtccttggccagtatgtggggaaccccagtggagaaggagaagctaccaatgggtacttagatgaccccacagtaccccatgggtctaccactgctacctttgcagcagctgtcctctatgtggagaatgaacggtgggatggagtacccttcatcctgcgctgtggcaaagctctgaatgagcgcaaagctgaagtgagacttcagttccgcgatgtggcaggtgacatcttccaccagcagtgcaagcgtaacgagctggtcatccgtgtgcagcccaatgaggcggtatacaccaagatgatgaccaagaagcctggcatgttcttcaaccctgaggagtctgagctggacctaacctatggcaacagatacaagaatgtgaagctccctgatgcctatgaacgcctcatcctggatgtcttctgtgggagccaaatgcactttgtccgtagtgatgaactcagggaagcctggcgtatcttcacaccattgctgcacaagattgatcgagagaagccccagcccatcccgtatgtctatggcagccgaggtcccacagaggcagatgagctgatgaagagagtgggcttccagtatgagggtacctacaagtgggtgaaccctcacaagctctgagccctggaaacttacaccatctgcactctgcctcttctggccaccctttctgcatctgcccttctcaccatctaaccctctattaggactattgacctcatattggaaagactttgggaccataggccttagctacacattctagtccctgggcttaggccaccattctgtcctatgctgctgccactgccactaccactaagcccagctacattcctcagataccaggcattcaaaacgcattgcaatgctttcaggaccaccactgtccctatctgagccacccatctttccacaagacctgaatcacctcctcccctcaatcccctgcagaaagaacgcctatcagtctgtccctggactccttaagataggagttaggaacaattgggaggagccttgggccttggagggacaatgaccaaaccacacttccctgagactgtgggcaagctcctcaaaacttaaagtgatcaaggacacccatctgagaggacctgcccatagccacactagccttagtgctacttgacattcctcctcaccagctggaagaactctcatgctgcctagcaatattttgggggccatagatatctcctaaacaattccatagtccatagtcagcctcatccaacccatgggcagcctccttaccaaaggaaggtaagagcagcagctagaattttcctaccccaaccctgccattaaatcctcaaaaaaaaaaaaaaaaaa

SEQ ID NO: 12029 - protein, 514 aa, Rattus norvegicus
  ref <308>: DATABASE ACCESSION NUMBER: SWISS-Prot / P05370
  ref <309>: DATABASE ENTRY DATE: 2002-06-15
AEQVALSRTQVCGILREELYQGDAFHQADTHIFIIMGASGDLAKKKIYPTIWWLFRDGLLPEDTFIVGYARSRLTVDDIRKQSEPFFKVTPEERPKLEEFFARNSYVAGQYDDPASYKHLNSHMNALHQGMQANRLFYLALPPTVYEAVTKNIQEICMSQTGWNRIIVEKPFGRDLQSSNQLSNHISSLFREDQIYRIDHYLGKEMVQNLMVLRFANRIFGPIWNRDNIACVILTFKEPFGTEGRGGYFDEFGIIRDVMQNHLLQMLCLVAMEKPASTDSDDVRDEKVKVLKCISEVETDNVVLGQYVGNPSGEGEATNGYLDDPTVPHGSTTATFAAAVLYVENERWDGVPFILRCGKALNERKAEVRLQFRDVAGDIFHQQCKRNELVIRVQPNEAVYTKMMTKKPGMFFNPEESELDLTYGNRYKNVKLPDAYERLILDVFCGSQMHFVRSDELREAWRIFTPLLHKIDREKPQPIPYVYGSRGPTEADELMKRVGFQYEGTYKWVNPHKL

SEQ ID NO: 12030 - DNA, 2625 bp, Homo sapiens
  misc_feature (1)..(2625): n=a, c, g or t
  ref <308>: DATABASE ACCESSION NUMBER: EMBL / X03674
  ref <309>: DATABASE ENTRY DATE: 1993-09-12
agggacagcccagaggaggcgtggccacgctgccggcggaagtggagccctccgcgagcgcgcgaggccgccggggaggcggggaaaccggacagtaggggcggggcgggccggcgatggggatgcgggagcactacgcggagctgcacccgtgcccgccggaattggggatgcagagcagcggcagcgggtatggcaggcaccggcgggccggcctccagcgcaggtgcccgagaggcaggggctggcctgggatgcgcgcgcacctgccctcgccccgccccgcccgcacgaggggtggtggccgaggccccgccccgcacgcctcgccgaggcgggtccgctcagcccaggcgcccgcccccgcccccgccgattaaatgggccggcggggctcagcccccggaaacggtcgtacacttcggggctgcgagcgcggagggcgacgacgacgaagcgcagacagcgtcatggcagagcaggtggccctgagccggacccacgtgtgcgggatcctgcgggaagagcttttccagggcgatgccttccatcagtcggatacacacatattcatcatcatgggtgcatcgggtgacctggccaagaagaagatctaccccaccatctggtggctgttccgggatggccttctgcccgaaaacaccttcatcgtgggctatgcccgttcccgcctcacagtggctgacatccgcaaacagagtgagcccttcttcaaggccaccccagaggagaagctcaagctggaggacttctttgcccgcaactcctatgtggctggccagtacgatgatgcagcctcctaccagcgcctcaacagccacatgaatgccctccacctggggtcacaggccaaccgcctcttctacctggccttgcccccgaccgtctacgaggccgtcaccaagaacattcacgagtcctgcatgagccagataggctggaaccgcatcatcgtggagaagcccttcgggagggacctgcagagctctgaccggctgtccaaccacatctcctccctgttccgtgaggaccagatctaccgcatcgaccactacctgggcaaggagatggtgcagaacctcatggtgctgagatttgccaacaggatcttcggccccatctggaaccgggacaacatcgcctgcgttatcctcaccttcaaggagccctttggcactgagggtcgcgggggctatttcgatgaatttgggatcatccgggacgtgatgcagaaccacctactgcagatgctgtgtctggtggccatggagaagcccgcctccaccaactcagatgacgtccgtgatgagaaggtcaaggtgttgaaatgcatctcagaggtgcaggccaacaatgtggtcctgggccagtacgtggggaaccccgatggagagggcgaggccaccaaagggtacctggacgaccccacggtgccccgcgggtccaccaccgccacttttgcagccgtcgtcctctatgtggagaatgagaggtgggatggggtgcccttcatcctgcgctgcggcaaggccctgaacgagcgcaaggccgaggtgaggctgcagttccatgatgtggccggcgacatcttccaccagcagtgcaagcgcaacgagctggtgatccgcgtgcagcccaacgaggccgtgtacaccaagatgatgaccaagaagccgggcatgttcttcaaccccgaggagtcggagctggacctgacctacggcaacagatacaagaacgtgaagctccctgacgcctacgagcgcctcatcctggacgtcttctgcgggagccagatgcacttcgtgcgcagcgacgagctccgtgaggcctggcgtattttcaccccactgctgcaccagattgagctggagaagcccaagcccatcccctatatttatggcagccgaggccccacggaggcagacgagctgatgaagagagtgggtttccagtatgagggcacctacaagtgggtgaacccccacaagctctgagccctggcacccacctccacccccgccacggccaccctccttcccgccgcccgaccccgagtcgggaggactccgggaccattgacctcagctgcacattccnggccccgggctctggccaccttggcccgcccctcgctgctgctactacccgagcccagctacattcctcagctgccaagcactcgagaccatcttggcccctccagaccctgcctgagcctaggagcttgagtcacctcctccactcactccagcccaacagaaggaaggaggagggcgcccattcgtctgtcccagagcttattggccactgggtctcgctccgagtggggccagggtgggagggagggtcagggggaggaaaggggcgagcacccacgtgagagaatctgcctgtggccttgcccgccagcctcagtgccacttgacattccttgtcaccagcaacatctcgagccccctagatgtcccctgtcccaccaactctgcactccatggccaccccgtgccacccgtaggcagcctctctgctataagaaaagcagacgcagcagctgggaccccttccaacctcaatgccctgccattaaatccgcaaacagcc

SEQ ID NO: 12031 - protein, 514 aa, Homo sapiens
  ref <308>: DATABASE ACCESSION NUMBER: SWISS-Prot / P11413
  ref <309>: DATABASE ENTRY DATE: 2002-06-15
AEQVALSRTHVCGILREELFQGDAFHQSDTHIFIIMGASGDLAKKKIYPTIWWLFRDGLLPENTFIVGYARSRLTVADIRKQSEPFFKATPEEKLKLEDFFARNSYVAGQYDDAASYQRLNSHMNALHLGSQANRLFYLALPPTVYEAVTKNIHESCMSQIGWNRIIVEKPFGRDLQSSDRLSNHISSLFREDQIYRIDHYLGKEMVQNLMVLRFANRIFGPIWNRDNIACVILTFKEPFGTEGRGGYFDEFGIIRDVMQNHLLQMLCLVAMEKPASTNSDDVRDEKVKVLKCISEVQANNVVLGQYVGNPDGEGEATKGYLDDPTVPRGSTTATFAAVVLYVENERWDGVPFILRCGKALNERKAEVRLQFHDVAGDIFHQQCKRNELVIRVQPNEAVYTKMMTKKPGMFFNPEESELDLTYGNRYKNVKLPDAYERLILDVFCGSQMHFVRSDELREAWRIFTPLLHQIELEKPKPIPYIYGSRGPTEADELMKRVGFQYEGTYKWVNPHKL

SEQ ID NO: 12032 - DNA, 1290 bp, Rattus norvegicus; identical to SEQ ID NO: 9294
  ref <308>: DATABASE ACCESSION NUMBER: EMBL / X07636
  ref <309>: DATABASE ENTRY DATE: 1993-09-12

SEQ ID NO: 12033 - protein, 301 aa, Rattus norvegicus; identical to SEQ ID NO: 9295
  ref <308>: DATABASE ACCESSION NUMBER: SWISS-Prot / P08290
  ref <309>: DATABASE ENTRY DATE: 2000-05-30

SEQ ID NO: 12034 - DNA, 1309 bp, Homo sapiens; identical to SEQ ID NO: 9296
  ref <308>: DATABASE ACCESSION NUMBER: EMBL / M11025
  ref <309>: DATABASE ENTRY DATE: 1999-07-02

SEQ ID NO: 12035 - protein, 311 aa, Homo sapiens; identical to SEQ ID NO: 9297
  ref <308>: DATABASE ACCESSION NUMBER: SWISS-Prot / P07307
  ref <309>: DATABASE ENTRY DATE: 2002-06-15

SEQ ID NO: 12036 - DNA, 1150 bp, Rattus norvegicus; identical to SEQ ID NO: 9322
  ref <308>: DATABASE ACCESSION NUMBER: Refseq / NM_013069
  ref <309>: DATABASE ENTRY DATE: 2000-11-01

SEQ ID NO: 12037 - protein, 280 aa, Rattus norvegicus; identical to SEQ ID NO: 9323
  ref <308>: DATABASE ACCESSION NUMBER: SWISS-Prot / P10247
  ref <309>: DATABASE ENTRY DATE: 2002-06-15

SEQ ID NO: 12038 - DNA, 1304 bp, Homo sapiens; identical to SEQ ID NO: 9324
  ref <308>: DATABASE ACCESSION NUMBER: Refseq / NM_004355
  ref <309>: DATABASE ENTRY DATE: 2002-11-05

SEQ ID NO: 12039 - protein, 296 aa, Homo sapiens; identical to SEQ ID NO: 9325
  ref <308>: DATABASE ACCESSION NUMBER: SWISS-Prot / P04233
  ref <309>: DATABASE ENTRY DATE: 2002-06-15

SEQ ID NO: 12040 - DNA, 3037 bp, Rattus norvegicus; identical to SEQ ID NO: 9340
  ref <308>: DATABASE ACCESSION NUMBER: EMBL / X13722
  ref <309>: DATABASE ENTRY DATE: 1995-03-22

SEQ ID NO: 12041 - protein, 879 aa, Rattus norvegicus; identical to SEQ ID NO: 9341
  ref <308>: DATABASE ACCESSION NUMBER: SWISS-Prot / P35952
  ref <309>: DATABASE ENTRY DATE: 2001-10-16

SEQ ID NO: 12042 - DNA, 542 bp, Homo sapiens; identical to SEQ ID NO: 9342
  ref <308>: DATABASE ACCESSION NUMBER: EMBL / S70123
  ref <309>: DATABASE ENTRY DATE: 2000-05-05

SEQ ID NO: 12043 - protein, 837 aa, Homo sapiens; identical to SEQ ID NO: 9343
  ref <308>: DATABASE ACCESSION NUMBER: SWISS-Prot / AAF24515
  ref <309>: DATABASE ENTRY DATE: 2003-02-01

SEQ ID NO: 12044 - DNA, 30000 bp, Rattus norvegicus
  ref <308>: DATABASE ACCESSION NUMBER: EMBL / X17012
  ref <309>: DATABASE ENTRY DATE: 1993-05-08
ggatcctcaagggccccagagaacttttataaggaagaagaccaaaatatcccaaccacagctttcacctagccctcctgagttctttttccagagctattttagaggagtatctgactgggaagaaattgggcttggtaccttgagctggaaggccatggagtcattcttaaagagcttatcccagctctgggaggacagagaacaccccaactgctctcagactatccaagtgacctttagtgctctgaacaggacaggcaccccacacaggtggaataacatactgaaggactgggcaggagccagaactccacttctcaggaatggccagttgcaagttctaagcaaggtagccatgagagaggtccagggctggggtctcctattacttctcagtccctcctcccagacaggtagggcctctcatcagatttcttgaacttaactgaaaagccacataacatctagatctttggggaatctcaacatagagtcccactctttagcactgagcccagactgggtgtcacctgtccggcaaatgagagattagagggctagggtgatcctggtcaccccaagggctggctgacttgcctgccactcaagccaaatccatctgtgtcttcctgaaagctccacccagagccagggtgacagacctctgaactagacataggtcttcttgctagtacttggtggttgggaagcctcctccaacagtgttaagaaccccttcctagtcaccccctctccacaggcccacctaaagaaatgtcacaggtccctagtgagtcctgtccctgacaaaggaagactagaagtgagcatgaggttggatggatagacattagacccaaaagaagaaagaaggaggggcctgggacctcctacaggaacaccccagaggtaagttagcacagcctgaggtgtggtgccatgccgggatggagctacgtgagctctgcgagcacaagcagaagcaggggctggaaattgggatggttgaagtccgttgagcctccagagaaagccactggctgtcgctgcctaggtcttgggtgggtgagcagatagggcacaccactgctcaagtgccacaaactctctggagggcatatgagtcatgggtaaagggaacaagaatctttgggtccttgggccttgtggggcaagctgaacttttcaggaaattcaatggactcatgctatggagttcttggggcacagaagtatggtccagacgtccagatctctatctatagcctcactcctgcagtctttcaggcctcaagggagaggaaggttgctcccaagactcttaatctgcccaagctgaagcacatcccccataccttcctgagacctcctgcaactctagtttagggttctccttcctactggtcttgaggagaggaagcaaaatactagagataggcttgttctgactcccaactcctccaggagtggacaaaaagcagtcactcaaatggaatcagtgcccagggagcagaggtcgaatcagactcagtctttgatcagcatcaccctgagtgctaaccccagacatcccagccagatgttcctttaaggcccaggttactccatggaggtcagttctagacctggctcagatactcctgctggcctcgctgaggtccttcagcacagccctgcagcccaggagctccttcctgccttggaaccaggggtcctcttgtctatgaggcctgcagtgataatcgtgtttacccagctagctctgttgttgctttggtatttgagctgggactgggtcgtttcaggacctgctccctaacaactcccagccttgctggggcccctcatcgcctctgcctaccatctggagggccactgtattactaaggatagccagtatacctgtgctgtactcttgcctggattgatgaggcaattcagatccacatatgtgggagagactcatactaataccacacatggggagactgaggcctggagccagggcagccactcttctgttctgctcagtactattctccctcacagtataagttccccagacacctaatatggtcttccaatgtagctgcctccagtttggcttccacagattgtattgtctctgggtacaagtgagctggcacctcaggctagccccagggactgtatttgctttctcgcattatcaataaatgttcactgtacttgtgttctcccaggctgaacaggccatgagtgatatgagaggtggggtcaaggatgctgaggtccatttttaccctttgagatccttatacccagcaaggttctgaaccaaggagcagaaccaggtagctctcaagtcaacctgcccagaaaagttggcactaaagagtatcaagcactatgtggctctctagcctaatgtaaatgagggagacccctgaggagcctttccacaaactcagatagggtgcccctcatgctggtaactactgtttgggatttgtgaaatctggacaacgtagccagaaatggctagtcgtgaaagtgtccagcagagggcaccaaaaccttgcttttgcagtactccaagtccgaaccgcctaccataagtccttctaggggctgcatagtgtctccctttgctcccctgaagtcacaggaacaaagaggcttcccaagaagctggctgccctgaattctggagagcatgaggtttgggtaagaaagactggatgtgcacctttggggtttagtttcttagatacccatggcggaggatgaacaaatgtccgggtgtctgcattattcctagaatgtcccgggttagagtcatctcctacctgtctagaattacagccgcccagaggagagtgtaaggggcaatccatgcagcacctcacactacggctaagcaaacaggtcaggggagccgactgtctgtttccagctgggacctttgtggttcccagagccctagtggacacagagaccgggagccagaggagccagtaatccctctctttgcttggagttttcttaggcacataggctggaagacaaaactctagttttcacatggaataggggctacagggaccccagggtgcaggatgcttcatgcagagtccatctgggacggggtcagccctttcccatgtctaccttccgctcagtgctgagaagggaaggtcagttttgcaaagaatgctggggggtggtgtggccaggggtaggagagctgaagaacagcctggataccgtgtctcttttctcttcccccatccaactattgtttctggctgggccacagaacagcaagcgattccttcgaaagtgaagctgtggggtggccctgtgtggtccagtcatgctgtgctggcaccaagttacccagtggctttgagccagcccccttggaatcactggctcactgcctggctcccaggtagcttgttccaccaccaccaccaccaccttggtacaaacacctcacctataacaccttctgctgcaggtagtcagaattctgtgtctgatctgcagacccctgaggcagacccttgaatctgggcctaggctgagctataggtttaccagcatgctgctctctccaggggcggggggctggggagtaagccagggctcctcaaactaaaagttgtcgtggtgatgcatcacccactaggtgctccgtccatatactcaaactgactagattcagttatctgacctctgggctaaggccactgactcttggtgtgccagccaagtcccaaaggctatgtgtggctcccacctgtagactaatgatagattctttaccattttgccaacaacagaagtatgtcttaaagctgcctggaggtccacagaccctgatgtttcctagaggcctcctcccctgcagtcctgcgaagcctttagaatcctgctgctaacattccaccaggacctccctctggctctcccagcccatctgtgtttgtggacaacagagtggagtccctcagccctgccagcttgtggctgttcatgctgaggccctggcactcccccctctgctcttcaaaggctaccctggcttagaattgagtcctgctccagctgggtctccagtcttctgtccaatccctaagacccactgtgacctggactgctgaggacccggaagactcctcctagcttttatgggccaggtcttgagcatgggtcagcaacacctggtgacccagaagcattcagaatgggcctgaggaccagaggtaaactgaggcacccaaatctttgccctggcaaatgcttcctgactttcccccagcctgacatctggggatgaagaacagcttcagttggctagggaacctgaaaaagaggacgttcccaacctggacccaaatattgaaaaggagatgggaggggctggttgggtgaggaaaaaagctgacagagatctagcaaggaaggctccctatatcccagctctagctgcacaggtcagatttaaatatgagtgggagcttcctgaagcaatgttcatattctatagttgcctcctcatacggccagacactgctgtgattggactcatcctgagttcttctctaagacctggcatatgggctggccatggcacaagcaagaggtggctatagctacaaattatacaaaagatgtgtattgacctcagccttcttgggttgtgggtctaaagaatgaaagctagtcagtgagtgtgaggctaatgtcttggatatgagagtctctggctttcatcttttggagatagccctggctctcatgtgggtattgtagagaagagaaaacgggtacacttcctgtatatgctcccaacatagccatgagtatacaagaggtgtcattttctaagggacaggatcccccagagatggaggagtgaggcatccactcatcagtggagaaaagttgaatcagggagaaagggtttagtcaagagtaaactcttgggagagaccagctgcaccatgctgcagatgaggattcctctggtcctgaggttcattgtgtatcttgggacaagaaggtctttgccattctttgaagtcctagctcaatactcaaggcatccctagccagagttccaccccaaatcctagagttccctctagaatgaagttttgtttgaacaggtagaagagcctttatggacaggtgccccacaactataggttctggactgttccaaatccatttccacatggttccagaaataatctgtgtgatcagaaggaaaaatggaggttcaaggtaaactgattgcccagtgtaatgagcagaataggtatttgaacctaggcagtcatcagccccctgtacaaactctattcccatgtgatgcccagtgggtagaagtttatagaatagaccccttatctccaagcatgagttttccttggttctcagatgtggagttgtagcttttaagaaggttgactcagccttgccaatcagccaaggggaggaaatcaatgtgcaaaggttaggaacaagttatatgaggtaggatgagaaggatttttgttttttcctgtgttatgggtgaatcagaacctcatattggcaagattttctaccactgaactacctcctcagccctaacaccttccccttctctccattcccaaggcttgataaagcaccttgtagttatgattgtggggaaagaggcacgttctgaagagtcaatgcaatttattaaatgaccaccagatgtcaagctcgagccgggtttgcaaattcctttcgggtgcaggatggtggggaagccaatgggtattaagaacagtgtttaatccactcttgttcatcccagggacccccacctcttatctagaatccaagaattatacctagaaagagtccataataaatttattttaatataaatatgacaaagtttgcttagaactagagttagaacttagttcaaggtgtttggggtacaggggtcttaggacaggaagatatgcaaagggaagactgcctgataagataggggaggggaagcctcagtctcaagtacaagactacagaactcacttataccatgatgctatagaaggtctcctctctgtaggagaaagaattacagcatcgcctcttaccactttccttccctgagtaatcccaaatccctgcagtaagaactttaaattgtgtattgtaattaaagatatacctaccagatgtcagcatgaggccactttagcagtccaggaaggaaaactggattctgggaatttctagaggtacttcagctttgtttttcataaatgagagtccaggcagattcccctgaattagatgactctcctctctccaagtctcaagtgagtagatttttttgtagtgtctttatagttacatcttttttttaaagttacatttttttaaagatttattcatttattatatatatgtccactgtaactgtcttcagatacacacgaggtacagacgaggacatcagatctctttacagatggttgtgagccaccatgtggttgctgggaattgaactcaggacctctggaagagcagacggtgctcttaaccactgagccatctctccagccctatagttacatcttaatatttgttcatttgttttttgtttgtttgtttaatggtcccttcctccttcctcctgtgtcccctagactgtgtccatagatcatccatgaaatataattttgaagggtcatgccctttaaaatttaattcactgataccttgtgccccattcttgcctcagtggcaccatggtttagttgctcctccatgggcactcattgcctgcattcttccttccttaaacattgaatattctaaataaaataaaataaaaatagctctggacctattccaaggggagttcaaggggacagagttttgattcatttaggaagagtagagttcttcttctctggctgtgacctctgggatgtagccagtttttccttatggccccttatccttctatctgctcagagggacctccttttgtggagcttccatggaatttcttcatgggtttagagaaagccttaacttccctcatgccaacctctagctttattaaatcccagccaaatgttctcagaaggccttagtgatagcagcttgcaacatccagtgatgttgcaatggacaatagagggcagcacttgtcacatacttctagtcacagggcccaaagtagatctagaatcttcacaagaaaaagactgcctcactctgataagcgtgaaatgccttttgctaagtatcccatatatgatttggagtcatccacaagcatagtgaaaaatcttacttgcccttctcccatggaataggatatctgtatcatgctgaactacctccatcagatatgaattgccataaagtttatcttcccctacagaaagtctcattctccctaaacattcctatctctaccactaagtaagtgacttcaggtggaacttggacaacaaatggagagggaatgattaagtcttagcttggactgataagctgaataagataaaagattagctggaatgcaaaagtgcaaaaggtagagacttgtgggtttttgtggggtgatttatttatttatttacttatttatttatttatttatttattgagcctttgctgcaaaagtgcaaaaggtagagactcgtgggtttctgtggagtgatttatttatttatttatttatttatttatttatttattgagccttgctgcaaaagtgcaaaaggtagagactcgtgggtttctgtggagtgatttatttatttatttatttatttatttatttatttatttattgagcctttgctgcaaaagtgcaaaaggtagagactcatgggtttctgtggagtgatttatttatttatttatttatttatttatttatttattgagcctttgctgcaaaagtgcaaaaggtagagacttgtgggtttctgtggatttatttatttatttatttatttatttatttattgagcctttgctgcaaaagtgcaaaaggtagagactcgtgggtttctgtggagtgattaattaattaattaattaatttatttatttattgagcctttgctgcaaaagtgcaaaaggtagagactcgtgggtttctgtggagtgatttattaattaattaattaattaattaattgagccttggctgcaaaagtgcaaaaggtagagactcgtgggtttctgtggagtgattaattaattaattaatttatttatttatttattgagcctttgctgcaaaagtgcaaaaggtagagactcgtgggtttctgtggagtgatttattaattaattaattaattaattgagcctttgctgcaaaagtgcaaaaggtagagactcgtgggtttctgtggagtgatttatttatttatttatttatttatttatttatttattgagcctttgctgcaaaagtgcaaaaggtagagactcgtgggtttctgtggagtgatttatttatttatttatttatttatttattgagcctttgctgcaaaagtacaaaaggtagagactcgtgggtttctgtggagtgattgattgattgaacctttgctctactctctgttctccctcaaagccaggaacaaaggtttcagagtttaaatgagacttcaggcaatacttgtatctgagccccatcccagctgctgtctgtgccttaaagggcgtttgagtctgtgccttaaatggcgtttgagtcccgtgccttaaagggcgtttgagtccgtgccttaaacggcactgcagctaggctaaaacggggtgagaacccacccaatcaacatccccaaaagggtgaacaagtgtcactatacatgccatctgcaccagtatgcttagtgcttggcatcactcataaatggtaggggggcaggtcagatgactgatgacagaggattctaaatcgagtatccatgaaacatgagacaacaagatggcgctgtgccacaaggatacaccacacccagaaggccttagaacgaaattttaatatttattttgaatcccgatcctaatttgcataagccacgcccctttttacctgtgccacgcccacagacattccagggtgtcaagtgactgtcaggtgtcaatctagtgaggccccaccccctccccacccctgcacatagtccctaccccctagctaacaggaagtgcttctagcttaattcaaagccacatagacgccttcctgtctatcaggcaccaaagccccaccctctaatgcccccataccctagtgtgggaaagcgccatagtcagctgccccagaagtctttgcagtactttgctggcatatcatttcccaaatttggagggggctggaaatgggcgtggaggggacgaggtaagggataaaacctcgtagtgtcatttgagcaggtgccttgcttggtggtagagagcagaagccacttctaggggctctgttatcatgcaagctctaaacatccctctcaccgtctcttcagactcagcctcgtcccctcccagccccgccgcaacttcgtcgccccggctggagggtctgggctccacaaccagagcaccccctgctttggaggaggctgctaatattggcccagccagcggatcatcgtccaggcaatttcggaagagaatcttgggcaccagtgattccccggtcctctttatccaccgtccgggaacttcgggaactacgcaacgactagagtacaggtaactaactgatcttcctttgttcatgccttttgtgtttgaatgaaagtgcagtttaaatattctggtatgggtaggtgggctggggacttgggagagttaggatccttccattagtctctgaaaaggggaaggctgccgctaaactgcatggtcccgctaaactgcacggtctaagagtgacttaaacttctgaggggacagaaaggtcaactgtgacttacaaggcttcacaaagctacaaggaaagtacgttttccttcactaatctaccatgcaaaggggatgggcagctctctttctcttcccagcaggagtacacagctgttttgcaaatgtgaaaagttttttctgtgtgaaatttttcccttggtgcatgcctcacctcccaacccccaccgtcccgctcccggctacactgtgcggaggggacagagattctggagcagtgtgtggtgtgatatatatataatatatatatatatataatcttaaaatgatatatatatatataatcttaaaagcaaagtttcctactgttttatatcctgtacctcctaactaccaccaggatactggagggtgggtaggaccctgaaaggatgatgtgccttgctattccctagcagggtttaaagtacaaaagctgcttttctcctggctgtgcctatccttaagcaccctccctccaggttccctgtccataggcagggatttggagcagcagcagtagcactctcaggtgaacattcatttgtgcacaaagcttttcttccctgcatctggcattccagactccttaatccacccagagtagtgtttatggggagaagccctgccaccccttccagaggttgccttccaaaagcagcagagccatgtgtcctttggcttttgctcccatccaaggtgcaggtgtgaggaaaggaatgggagacattcacagttttagctgtgacccttcaaaaaaaaaaaaaaaagccttttgtgtgcagcagcagccttactcaagcctcccccccgcccccaacagggcaggagccagtttgtccttcccaaaggagggtctcctgcctctccctgaacagttgtcaaacttggcaaagtgacttttgaccaactgcttcctcccttctattgagaagggggtggggagagtaagcagctgaagagaccgggcaggggggagtgctccaaccatgacaaggtgacctttgggcttccccatccagcagcaaggggaggggagggggccagactcagctggagacttgtttttgagttatctcaaggatttttgcttctcctcctcaggggccgaatagttaccactgagctcactgtgcacagggaggaggaggaggaggaagaggaagaggaggacgactacgacgactgcagacccttaacccagggtcctgcatctcctcgggctaaacttgcccagccagacccgcagaagcctaagtcaaggcctgtaccaaggcctgagccaaggcctctgccaccgaggcctgagccgaggcctgtgccacaggagcctgagccacaggagcctgagccacaggagcctgagccaccaaagcctgagccgaggcctgtgccacaggagcctgagccaccaaagcctgagccgaggcctgtgccacaggagcctgagccaccgaagcctgagccaaggcctgtgccacaggagcctgagccaccaaagcctgagccgaggcctgtaccaccaaagcctgagccaaggcctgtgccaccgaagcctgagccaaggcctgtgccaccgaagcttgagccgaggcctgtgccaccgaggcctgagcggaggcctgtgccaccgaggcctgagcggaggcctctgccactaaggcctgagctaaggcctctgcagccaaggcctctcccaccgaggcctgagctgaggcctctgcagccaaggcctctgcagctaaggcctctgccaccgaggcctgaggcaaggcctctgccaccaacgcctgaggcaaggcctctgccaccaacacctgagcctgagcctgagcctgagctgaagcctgaggcaaaaccagagaagaaacaggctagagcatcccgagaatccagccccgtgcccaagtgctgtgcctgtggcccaggagatccccacgctcccagaactgaatgaaacctccgaaacctcccaccagccccagtccttcctcagaggtgagtgcccttcaggcatacaacagagcagaggtaactctagcacagacacatcagggctcctgcaaatacaggatctagccaagtgccctgtagccaaggaaccagccaaggctgggaagctcagtcagtcacagtatctagaagtcaggtgggctccaggtgcctctccttgggaacaaggggcgtaggcaaacagacacaggcgggcagcaccagtctctggaaaatgtaggtccttgctatgctcccaggagtctaggggcaaaggtagcaaatgctgtggggaggtcagacagcttccagagggaaaggcaaggttccagatgaagaaagaatctgaggaaagagaaaatgaaaacaaactgttagctaaaaagaatcgggaggccgagaaagctgggtttgaggggccctgttcccccttcccctggctatgcagtaacagctgtggcgcccctgcaccagtggcttgacctctctgtgtctatccccatttgtcatagtgtgtgacagtctcaagcttcctggctgaactgtgaacagcaaatgacataatgaccaaagagacattctgagacccgtgaagggccttaggagagagcttgtgtcctaattctattgtgttctgaaggccatgggtttcctgtatgtgaatggggaagggaagcagctagaaagggcgtgggaccagaagcactgtggactcgtccgaggaagctctgctgtttggtggccctgcagttgactggtcaggtactgggtggggatctgggaggcagaggctgcgtctggtggaatacctggggatttggggggcagcatgtaaggtctgtgtcctgtgcctaagcctcaaggggcccaagcctcccagcacgtgaactcccaccccgcttccagactattatatgcccaaaagaagccaagaatctccttttaaacattggttcagacagtaaatcaataacatagtggtatggcctcagtctatccctacctaggacaccggccttccctcctgccccctctccagtgcccccacagcaactcttacttacttttggtgtgggtgtgttgatcggtttgatggtgtgatcttcatgttgctggttcagttagtgacttcccaggcttgcagactgagacagagcattgcttgggtcttcccggtgtggagtccctatgtggtgtccaagtccgcagcccagttgagtgtgtcctctgcagcaggcatccagcacactagggacccttggagagaagttgcgcgtgtaaaatgcttgccttgttccccgaggagagggagagcagttagctctgtggctacaggaaaagtcacaggggggacaaggaagacccactgcctggagggagagaggggcgagaggcagagaccctggctaagggtgccagccaggcttagtgggtaagtctgaatcttaaagggtatttagtttcttcagaatttgagcttttaagcccagaaaggagacctaggctgccaggatggtgggcagggcagggcaggggagggcagggaccggggatcagcatggggctaaagtctagtgggcccagccagggcaggggagggcagggaccggggatcagcatggggctaaagtctagtgggcccagccctgcctagaagaaacaatagacctcatgacatgcaaggtaggtccctttctaccttgggggggggcaaaaataagggaaaggagagggccttagataaagaatcttgtgtccgctgaacctggctggggattaggctgtgtgcttttgagccctaggttgacccggaactgtaccagcctctttccctgccccttgagccacactttgactaaataaggtcaggtgaaggctctgtgggcagccacacagaggaagaagaacacatgcataccctgtcccccaccctaccccgcctgcatgccctggtggctcttcagtgggcacctcaaggtgacctcagcattttcctacctggcaaagtccaggagtgcatctccggggtgtggttctgcagcttctccaaaatacctctgcagggagtccaggagtgcatctccggggtgtggttctgcagttctccaaaaatacctctgcagggcagaaagcagagattaggctctgaaacaggccaatagtgtgattgctgccctctcgtatgcagaaagcagagattaggcttgaaaacaggccaatagtgtgattgctgccctctcgtatgccccttaggaaactgctctggcctcacaaggactcgggggtgttcacagacaccttttcaatgtcccttactcccaacaaattctcaagtctccccggaaagaggaacatcatcgtaccccagtcttcctagctggaagcttcctcaaatccataggcacacactcagagaggccagaaaagccagggatagaggctggtggatgggggaaggggggcagcatgggtgtgtgtggggggagacaggccagatgttcttggaatggggacacgggggtgattgatgcggacctgaatttgaaaggggaacattccccacgtgcttcatgctccgggtggaaaatgggtggggtgggggctctctcagtcctgccaagataatatggagatgcctcgccctgtctaggtccccacacctgtccactgactttaacctgccttcccagagagtcagcctttgagagtcctccctccctgcatacatcctctacgggtattatagcgacaagccctcttacagccatggccccagggttttcctcattctcctgctctccagctgctcccctatctaacaccccaccccaacccccaggtcctgctagaatcatggcccttcacctccagcattgcccaactttgagggggtggccttgttcccagcaacagtacggtgagcctgtgtgtgatgtgtgggtttaatatttgcctttaaggagctggactttccccagccaggattgggaggctagtggcaaaaatttttctgagaaaacgaaatgagggtcctagcattcggccacggccaccactgtgccgttttgagacgctccttccccgactttctcctctactccccaattttctaccactttccacactgctcaaacaaaactgtttcctgacgttgttagtcgttagggagcgtacaaggccggataggcgtgtgccgagcgcaggggcggtggcaggggtaaccactggggtgccccgggcccccaaactgagccagggatgagtgctgcccccggcccggccccgactgtcgcctcgcggcgcctgaggctggggcgaggggcagtggggaacgagcggggcgcggaggcccgatgagcctggggagcagcgcgctgctccccgacgttccccctccctctcagaagccggtcccgctcatcctctgccacccaaacccctggttgtccagagaaggggaaccccccccccaaaaaaaaaaagccaaaaccggaaaatacagctggctcaggcgcgtgctccgtggagtcggtgctcccagtctgcgtcgcctgtgcccctttccccgcccgcgttcccccgtgagggcgcccctgctccgtgagagttccttggcaccgcggatccctggcgccccgtccttcccagcccggagctcagtttgtcaaattcagctctacttctctgtggttcccctaaagccggagaacttgctggcttctctgcacctcaggcattagtttcactggaatccttgaaatttaagcattgctttccgggggggcctccaaaatcattcagcattgttatgttcacagggaaaggttttgttattttgtttggttggctgttttgttttgatacttgatttccaaatatttttaaaggtgggaattgcgcctctgctgactcctcaaaattaggttatttggcttgggccctaagtttgcttctggctcctatccgttttatatgcaagctcctatagagataaaaacaccaccctcagttccctaaaatttaaagtaagccggatccttagtcctttttgacagaatttccttacttggtgatggacattttgacagcatttagacactgtccccaggggatgaggtagtggggtgttttccccgtatccctatcattttatatctgcaataatgtttctgctgactctttccccaccaccggccctgtagtttttattaacgtggaacataatacactagattctgtggtctattgccccaaccccgaattttacaagttgaatcccacccagacctctttaaacaagtttccaggaatccacaaagtcccaaccttttttctatgtcctcccctaaacgtaggcacctcagtagcctacactctcagttctcggattccagaaaaatcaagggagtgcattcaccagtcacacctaaaattcactcaacaagaccccccctaccccccacaccccccccaaaaaaatccaggcatacacactggtcactgggctttggggtttcctagagctcatgcaagctttctggccaccgttaggttctttaaaatataaatgttctcactaaagcccccaacacagactgagcaatgatctaagcatatgtgatcctcatatgtggtggagggttttccatgctctcccaagtgatatatgactgtaccatgtctctctaggtcacagaaggcacaaaattaactcttggccatgctttttctttctactagaatgctgaatgtccccaatccttgaacactgagctcttccccacccccggcaccaaatattaagagtccctgggtccctttaatttaacaagttttttaaaaagtttttaactctaacaccaattgcaaaattcagtaccatcctgtatccttctcatccccctgttggatcatacttggtgtcctcaaacattaggcagtatttttccaggcccccaaaacacacttagtgttagccttgggtcacagagaggttctggtttctcccactgtaataccagctatacacccactcagccccctacatttcaatccccccaacccctgtcattccacacaatctctgcagattctcaggccctacactttaggaactcataatttctattccttgtaagggagggattggctctgaagcgctccaaggagtgagaactttagattcagaaattatttttctggggcccccaaattcaagtactccaaaacaaattgagattttttttcttccaaagagttgggtttttattaaactttaatgaactttattgaatttatgacttctcccggaatctcccaatatttgggtaatgttttatggtcccaaagcacactggaaaaaactccagatccccaatctaggtttaatatctgtgtctcacaattctagctactatctgtcctgtaattagattcacatccattgggtaatttttattgatccccaaaacagggagtatgtttctctaagaacaaacattgtccaagaaaacataccccccttgtttaacaaaaagatcaataggaatctgtttaagaaattaaaatattaaaaggcattgatttttctgtccttctcaaatggactgattatactcctaattccccacatttagacagcatttcccactctctctctagaggacttctctgaagccacagaaattagaggtgacttttcccgggtgctgtagggcccactggcttcagggtgaaacttagcctccactcccacccccaaaagaattgacccttaattccctaaaacccatctgttgtttttttcactctcccatttttaggcaattaaaattagctccccccccccaaatttcatgttgggaattttcttaaactcaacagcaacagcaaaccacctaacttctataaaatagcctaagattttgtgggttccccaaacttgctgactaagaccttaggttccccacgttaggcttggatcaagatgttccccttttttgcatagaataattttcctcatttcccaacttggattctaatttttctggaatctcaaatttagtcgtttgccacagttttcccatttatggagtctcattcaagtcctcctactttgggccactcattcccagggccgcaaatcagacaagggtctgatttgggatccccgaaatttgatcattgtttccgctggccactttcggcagcttcccgtcctgcgcataacatcgatatcggcctcttcacttctcctacggtgtcccagcggcagctcagattttggaaaagtgtgtgtgccccaaacacgcaccggacactgcgcggcggccaggacgtgggcagtgctgctcccgtgtccaggaaaaccactgggcattgcccccagtttcccccaaatttgggcattgtccccgggtcttccaacggactgggcgttgccccgggacactggggactgcctttggggtctcgctcaccttcagcaacgtccacttcagcagctcccacttctgcagctctcccgcccttctccgatcctcctgcgccacggacccgaccttcggccttgcggtgagctcccggtggcgcgctcccttgtgctccagctcttccgttgcggggcaccggctacctcgcagtttgtcttcagggctgctgcggggtagcgcgggagcgggctgctggcttctcccttggcgaccgcgctcctttgggccgggcgctccgaaacacgcgccactttgtatgcactctgcaaacaacgcggtggtagggaaagcgcctgagcggccaggaagcgggaaaggcagagcgctccggcggcttggatcctccagccctacaggtcgagggcttggggaagcaagcgtagagggcgcgcggtgattgatggtcgggccgagaggttagccccgggtgcaccggtttccgccagtagtagccctttagaggcctagagatgcggaggtcgggagagggaaacagggtgcacgggtttaagagtgattttgacttggtaaaactctcaatggcttcttatatctgaaaccacccgagatagcttcctaacaaccccaaattatcctgttgcccctggggccgaacctgcaactaagcaaattcaaagtgctaaggacagggaactgttatctggaccttctgggtgggtcccaaaggcgcgccgctgagaagcaatttagtgagctctggcccccaggtctggtttgagctacgattcccgcccctgcttctttttctgcggaagggcgcagacattgcccggggctctacgcagggcccagatctgtcatgccaagccagccttcccttcatggtacacctggtggccccccaaaggctgctaggagatcccgcgcaaagcacgaggctaggggtgtttaggatctggctgctattcgaggtgccttgcagcccgtcctgcttgctcagacaggtggaggctgtgcgctctgcaggagccgatccaggggactgtcccctggttggcaggtaggtccttgtaggacctcgatccagctacctgcccgcgccttaactctgcctgctgggatgcgcctaccttgtaatcctctaactgggcacaggtcccctcactaccactgaggcctggggtgccacgcagttggttcgcaccacgcgcccatgttgcacaagcacagggcaccccggaaacatgacatgtggcctcgattttttttgggatggacacccaggatttagtgggcctgctggggcgcacagctccccatctttgctaccaggcacccattcccccctcccccaacggcaacccccgtgcccagggccccggacccgcattccccccgtggctcgagttgcgggggcggtcccggggcggggcaagggccctgcggacgcccattggcgcgggcgtaaggccagcggggcccgagcgggcgccgagccgcggggtggcgcggctataagaaccgggcgttggcgcccggagttcgcctgctctccggcggagctgcgtgaggccaggccggcccccggcccccccttccggccgcccccgcctcctggcccacgcccgcccgcgctcggcccgccagcgcctccatccgggctggcggccccgcgtcgacgccgtccgccacctcgctgctaactcccgtgcagggcgccgtcggcggggcctcgctccgtcgggcctgcggatctccccaccgcctcctcctctatctacctcaacaccccattcctgcttcgccagaggaggcggtccccaccgcaggcagtccggcttgcaggtcgccggcgttgtcatcccccgcgctccccctcccagccctccccggcgcgcagcccggcagctcctctcttttcgctgcagtcccgagcagccgcggcgccgccacgcctgacccccccacaagaagccggggcttacgacggctgagggctccgtcggccctaaccgagctgggtgcccgtggccggggtgacgcctccattcctcccccctcaacaccgtcctcgatccttcgaagttgcatcctttcctctgcttagagtgcgccccccctcgcgcactcgcttacccgccacctttcctaggctcccctcctgccccctccccgttcctcctcgcctcagactccctccccctcacgtccgccctctgccttcgcctacccaagtggattaattatacgctttctgtttctctccgtgctgtcctctcccgctgtgagcctacccgcctctcgctgtcctctctccctctctccctctctgtgtcccccccctttcacgttcactctgtctctctcactatctctgccccccaactatccttgatacaacagctgacctcatttcccgatacctttcccccccccgaaaatacagtatctggcccgccccagccctaagataccctaaagaagcagaagagacgcccccctccccatcaaaaaaagccatctccccgttctgtcccgtcgcacattcggcctctgcgacttggacagagcggcgctggcagaggagtgcccggcagaagggccttcgcccgctgttcggtttgcatacccgcagcagggagatgggcggcagcgtcgccggcttccaggtaagggctctcaggggccctggggtagggggtgcgcagggcccggcctgggctccgcgggactggtgtggtgggtggggggctgggggctcgttccctaaccaaactcttgttcccccttgcgccatggaatggggaaggggagggggtatgggtccgttggggaggggtgtgtaagttgaactcacaggagactttctggtgctttgctgtgtattggggaagggggaaatgaactgcttagaatgtatgatttgtattgtgcagaccccgtaccccctccgcagggtgctgggtgatgaggaggggggcagagtctctgaagcccaccctggtatgttgactttgtgccaataggacaggaaagaaaactgggtgggcggggccagaagcaccccaaaattggcagaagtcaggcgagaccccacagttaactgtttctccccacccacacacgccccaatctgtccccaacattcccagccaggaatgttgggggggcggtttcgggctcaaaagggcagaaatgttacagttttgagagtaactgcccctgccttttactgggtggaactttccataggatgatgtgggaaggacccccctcccgcccccattggtctgtgcagaaagggctgggggtgcacgatgaggccccctcccactggtggtgctttgctaaggaatggtccaaggctagctcttgggggtgcaggagaaaagggactggctggaaggagggagggggcgggtgcaaagggggcgaggggagtggtcagcaaggagggggggtgggggtagggtggagccgggactgggaggagccgactcagacataaaaagcggaggcactgaccagttcgcaaactggacatttgcttctcctgtgagaaccttccagccttttcctgtcttcatcctcttccagccccagcggcctccttatccaacttcaggtaaccagggccatggagccaggaccctgctgccatcccccctccggcctgccatggggtgtcagggcaccgggtagcctggggcctctgccattgcagccgggcctgctacctcttccaagccttcgccctccctcggcctctgtcctgtgttcccactagccccaggcttcctcacctgtcccgccttctacttttccttcccctttgcctccccactccccacaaattcagcccttccctgggccttcacctatcccctacctcctggtcagtcccctgcttgcttctcctggacacctggctggaccagccagtgtgatctggctttgggaagggacttcgaggtcacgtccgcctgccctgctccacggcaccccctcacccctaaggattaactgctgtagctatatagcctgctgatcacaagtggttggtggcccagagtgcattgggtgggccgttctgggtcttgttgaggaggtgggcaaagataactttagttatccgagggagcgcgagcaaatttgtttcttgattattccgcactggtctctcacttgtttctttgcagcaagaaatcccctgggcctgtggagcagaggctggggctgggcctgggggctctacttactgcagggtcaagagtggcttactgtggggcatcgtgacctcccaccactaaaaaaaagctggctaaccattgttctgtagagccacacagcctgtggagggggtgtgtccctccaaaatggggtgtctagcctcccaggaactcaaactgcttcctctagtaccctgggtaaatttagctcttatcagaaagacggtcctatgggccatagaggtactctctagggtccctgaccatggatggtaagagttgaggtctggataggactttaggttccttttgaagctctgaggtgcccaggaaaatctatacttggaggactgggtgaccctggagagcaaggctcacaggagcgctggcaggcccattgcgctaaccattggattcttgacctgggccctgctcatcacgacctgggaggcggggtggacgggtggggttggctctgttgcttagggaagggtggccagctgggggcgggaggttggcgactggtccctttggatgcacatgctccacggtgggtggggtggagctgtctgccatcttggccagtacttgggaggccagagtaggagtggcagtggtgatgtgcccttggactggccccacccccatgatgtcatagcacggaaaccaggtccagtgtccagcactggcccctgctgctgtgggtgtggttaaactgcaattgcgcccatggatgggtggtcctcaagggtttcatacagttcaaagccaccacagggtgcctttgtgggctccattgagtttctgcacgcccagagccaggttttttttttttttttacctcagcaattcaaaccctcctgtttttgcaggttaaataaataatgagacggacgccgtctttcaaattccaattacatttttaattaagagatgataggtgtctttggtggcggggagaagccagactcttggggataggggtgtggcttggggcctgtagctcaaaacctgcgtttctttcaccaggtaccaatggggatcccagtggggaagtcgatgttggtgcttctcatctctttggccttcgccttgtgctgcatcgctgcttaccgccccagcgagactctgtgcggaggggagcttgttgacacgcttcagtttgtctgttcggaccgcggcttctacttcagtaagtaactccagagagacgggggaggcgggagcaagcggggtgggggggaggtggtaacagcacagtggtctggctaagctaccaccccacccccccttgggcaaggcggtaatctcacactcacaagtctgatagctttaaaagtttttttcaaagttaataaaagcaaaacctaatgtggttcccaggtcctagccaggttgagagtgtacacatagtctggggctccaaggagggagagctggaccttggcctacaccatggggtgcttacctgcttttcaatgttcatgcttctcttgatttcccagttgggggaggggctggacctgggctcactgctcacagaaggcagtgatgggggtggggtgggggacacacgggtggggcatgcctgggaggggcaggggcaccagaatggatgactgtccttgctggcctgagccactctatcttcctcacctggtcctggacatgcagcctcctcctcttcacttctgcctacctgcctgtgaactgctctgagtgctcaaacctctggaaactacttctgctcctgggtactgcaggaccagtccttgttcagggagccaatcctgcacggaggggcttcacagataggagggccccaagcccagcctcggaccgtgggggagagggggaagacgggagaagagaagggagtggtttttgggtgcctcactcctcccctcccgtcttgttctctcctgccctatcttcccttcctgtcacagttcagcgatgggggttgagggtgggcccctcaggctcaaggtgacaccaggctggggggccccaagtccagggaccacacctgtgtccaccatgtcccctcgaggggctcaccccgctccctgtttttcaaaccacttcagtgtggtctctggtcttcttggaatctgggacagagagactgtgctgtgttagctgccaggcaggaggcaccagatgccaggggctggtcctgtagcacgcaccttcgtttttcctttctgggcatcttggcctgtctggctcccactgccaccacatccttgcagggtaacctagggtccagccagggcctagtagaagttcaggggaagttcctttcttcttcagccttcccaagggggagggtttggggaggccaccccagtgggtgctgaccccagtgaacactaactgaagctgtctgtcctgtggaactttcaggcaggccttcaagccgtgccaaccgtcgcagccgtggcatcgtggaagagtgctgcttccgcagctgcgacttggccctcctggagacatactgtgccacccccgccaagtccgagagggacgtgtctacctctcaggccgtacttccggtaggtaacagggtggggtcgaaggaattgtggggtgagacaaagaaatcacttgctccttgatttggggtgccatgaagtccacccacgttttactgttggcctctgcccattaacatacatgtttctatagactctagtggggtgggtatattgacacctggatgggagctcaggctaactcgataccctgaaacctgctgactagcacctcctctccaggacgacttccccagataccccgtgggcaagttcttcaaattcgacacctggagacagtccgcgggacgcctgcgcagaggcctgcctgccctcctgcgtgcccgccggggtcgcatgcttgccaaagagctcgaagcgttcagagaggccaagcgccaccgtcccctgatcgtgttaccacccaaagaccccgcccacgggggagcctcttcggagatgtccagcaaccatcagtgaaccaaattatgtggtaattctgcaatgtagtaccatcagtctgtgacctcctcttgagcagggacagctccatcatgtcccacactaaggtctctctgctccacttcccttcccaggtttctccccacccacccccatgccccgcctccccacatcaggctgctccccttgccccacaccatcgggcaaggggatcccagcaactcttcaaaaccaaatttgattggctctaaacaacccaattggcaccctccaaattatatatgaacattaaaaaaaaactttaaagcatatagtccctttacaacaaattggcttaagaaactccataactgataatctaaaaattaaataaccaaagaaattaattggctaaaaacatactaaaaattaattggcttaaaaacaattggcaaaaatcaaataatttggcccgcccccccccccttcatcttctttccatttagatctttagtcaaattggctcagacttggatctcagaacccaagaagaaaggaaggggacccaaaattttgcaggtagcatgtcattgcttcagtgctctctccttgtcactagtcacttttagcataatctggctgtgaacaacaatagccgcccaaactctttcttcactggtcattccatcacaaatgtcacccatgtcaccaaggggctgggtgaaggaacccaaggagaggaacagaacatgaaaactgaaaatagaacctaattggcacaagcccccagtcccaaaaatctcacttttcatacctactctaaaaagcacatgattatacccacacgtacatgcacacacacatgcacacaggcatgcatacacacacacacacacacacacacactattagatgagaacattgaaatggctgagcaacttcgattggaaccacattgcccaatccaaggcccatcttaaattccctgagcagtttgcatggtttgagctcctctctgaatccatctagtttctgctgccagtgtagagtcagtttggccagataaggagatggcactgccaagtgatacatgctacccgagtagcctgacccctaggtgtgctcctgggaggaaagatctgggggacaacccctaccccaagcacacctatgggccatctctgtcaatctcctggggagcccccactttttaggggctccccaggagactcacactgatgtggggagtgtgggaagtctggcggttggaggggtgggtggggggcagtgggggctgggtggggggaaactatgggtaggaagtggtcccagagaggtcttaggtggaacagtcaggaggaggcacaggtcaacttgcagaattactgaagaatcaggaccccaaattttatgtcaattgatctattcccctctttttatgtctggggcaggttttttccttttttttttttaatccctccttagcttttaatgcgctcataatcccattccctatgtaacgggggcagcgatcaagtaatgaatgcatcaagccatcaataccagcgagagccagtaacaccggctagagccatcaacaccggcttccaccatgtcctgctcccaaccatttatcaaccttttttttttttttatctgtctctatcgcttggcctgagttgggagtggagtctctgtggggtgctggccacgcacccacagagaaataaaaggaattgagaaggccgctacctggcctgacttctggggacagtggctggtccccagaagttctgaggagtggagggggcgtggggcagtgtcccctcaggtgttaggaaggtgctcggaggccacaaagatggggccccagctggccctgccagttgggggggaaggggatgtagatgtaagactagagaggttccatcaggcgggagcaagtggctgccttctgagcacttgggggaggtcctccccgtgcccctcagtgtcatcttgcccactcctcagcaccccatcttaccctcaggaggtctggagctctacagacctcctgggggcaaggtggggtgaggcctggagctggggaagcgaggaggctttaaagccttcagagccaggagaactgtgtacatggggttgtctgggccctggggcccgagggtctggtgagccgtagcagccactccacggtgcctaggactgcggcggggaacagggcggctggaggtttacctcacccccacttctgcttccagtgcagtccccctgcccaacagtcctactagtaatctagaggcctgaggcttctgggcccaggtgacaggactggcaccaccctgggggcggtgtgtgtcagccagccatggcacagagggttctcagcaagtgcctaaagaatgggccatttggaacattggacagaaactcaaagagtaaattgttataattggagaatatgaattggcctggtacccaaaatatctcgaggcaccctaaattacctgcccatttgactggacatccacccagtgttaatatgcctcgtgggatgggtgttttcaggggcatttgctgaccatcctctgtgtccccagatttgcagttctccccatcataggtcaccctgatgcaggcacctccctggcctcccatgcctagtgtggccctccatcttgttttgtctcttccctactgtcttcggtgggatcccctcttgggtcccccaatttgtcatcctgtgaagacttcccacgcgtcgaatgccatatgtcacctgtgccactgcccatgtcatccagcagtggccccgggtatttgccccaactcagtccttttaacatgcattttctggcaaaatccaaagcttgggttttgtttttaacctgttaacgcttgcaaacctaataaagcattcaaaatactatttattgagttctttgctctttcacttgggggagggggcaaaggaaaggaagggtggcagggagggaaggagggagggagggaaagagtaaagggtgcctgatgcctgggggaacatggggagcagcagatgaaaagcctttgaagcatgagaagaagtggggttcaataaggcactctgaggaactcgagagcagaggaccacatttgccctcaaagatggggctaaagggatcccatgatgttttcgaatgagctgtgtaccatgaatacctaccccagggaacattgcccttagccttgggggttggggagcaggataggtgaagagtcctggttggtgatggacatggggactcagggtgaaaaacacctaggaatcccctgcgcacacacagtcgcccccattgttccctctatcaaagctatgctggagcctgtccccagtagttactagatagacctgtccagtggtaatggtctttgggattcctgaccctgggagtaaagtgaagccaacccctagatgcttgaaacctggcctggatatcttccttctgcacctttatagtccttagtacccccactttcctagtgcagatgggcatgtacccttcccccatgtgggaggagcccaggctggggcagctgctgaggccctgtgcctgggaccctgctccttttccccagttaatgctacacactagcatttctttttattgtgtttagctactttttaaaataaagagtctcacactctaccccaggcaagcttgaactgcaaatggatgtatgtccatgctggcctggaactcaacagcagtctcagtcctgcctcagccacctgggtgttgaaattacaggtgcaagccaacacaggggttagcattagctttcagttttgtttgcactccagggtctctgctgagtgtgttaaagtgggtcttcagggcagccttcaaatccaagggctgcttttaaactcagggtacacagtggtcatgggggactgcttagaagacgaagttcatccttgaagaggaagactggatagcagtaaggtgaaaatgaagggcactggccagcctctggcttgacagagttgaggttaagacaaggcctggatctgggcagaccaccttcccacccagtgagtctttcttatcagatgcttcagtgtcttctatgtgggtggaagaaggcccagagctgcccactcctttgaggacaattcagtgtgttctcatctgtcccatcatctcctgagagcccactataggtctgtcccacccccctgtcagctcctcagttgactaggaccctaaggagcaggccttgggatatccaggttccagactcttaccccttttcccaagctggttccttcctgacttgctaaccaacatcacctgaacatggagtccttggcacctc

SEQ ID NO: 12045 - protein, 180 aa, Rattus norvegicus
  ref <308>: DATABASE ACCESSION NUMBER: SWISS-Prot / P01346
  ref <309>: DATABASE ENTRY DATE: 2001-10-16
MGIPVGKSMLVLLISLAFALCCIAAYRPSETLCGGELVDTLQFVCSDRGFYFSRPSSRANRRSRGIVEECCFRSCDLALLETYCATPAKSERDVSTSQAVLPDDFPRYPVGKFFKFDTWRQSAGRLRRGLPALLRARRGRMLAKELEAFREAKRHRPLIVLPPKDPAHGGASSEMSSNHQ

SEQ ID NO: 12046 - DNA, 1046 bp, Homo sapiens
  ref <308>: DATABASE ACCESSION NUMBER: EMBL / X00910
  ref <309>: DATABASE ENTRY DATE: 1993-09-12
caggggccgaagagtcaccaccgagcttgtgtgggaggaggtggattccagcccccagccccagggctctgaatcgctgccagctcagccccctgcccagcctgccccacagcctgagccccagcaggccagagagcccagtcctgaggtgagctgctgtggcctgtggccaggcgaccccagcgctcccagaactgaggctggcagccagccccagcctcagccccaactgcgaggcagagagacaccaatgggaatcccaatggggaagtcgatgctggtgcttctcaccttcttggccttcgcctcgtgctgcattgctgcttaccgccccagtgagaccctgtgcggcggggagctggtggacaccctccagttcgtctgtggggaccgcggcttctacttcagcaggcccgcaagccgtgtgagccgtcgcagccgtggcatcgttgaggagtgctgtttccgcagctgtgacctggccctcctggagacgtactgtgctacccccgccaagtccgagagggacgtgtcgacccctccgaccgtgcttccggacaacttccccagataccccgtgggcaagttcttccaatatgacacctggaagcagtccacccagcgcctgcgcaggggcctgcctgccctcctgcgtgcccgccggggtcacgtgctcgccaaggagctcgaggcgttcagggaggccaaacgtcaccgtcccctgattgctctacccacccaagaccccgcccacgggggcgcccccccagagatggccagcaatcggaagtgagcaaaactgccgcaagtctgcagcccggcgccaccatcctgcagcctcctcctgaccacggacgtttccatcaggttccatcccgaaaatctctcggttccacgtccccctggggcttctcctgacccagtccccgtgccccgcctccccgaaacaggctactctcctcggccccctccatcgggctgaggaagcacagcagcatcttcaaacatgtacaaaatcgattggctttaaacaccttcacatacct

SEQ ID NO: 12047 - protein, 180 aa, Homo sapiens
  ref <308>: DATABASE ACCESSION NUMBER: SWISS-Prot / P01344
  ref <309>: DATABASE ENTRY DATE: 2002-06-15
MGIPMGKSMLVLLTFLAFASCCIAAYRPSETLCGGELVDTLQFVCGDRGFYFSRPASRVSRRSRGIVEECCFRSCDLALLETYCATPAKSERDVSTPPTVLPDNFPRYPVGKFFQYDTWKQSTQRLRRGLPALLRARRGHVLAKELEAFREAKRHRPLIALPTQDPAHGGAPPEMASNRK

SEQ ID NO: 12048 - DNA, 3105 bp, Rattus norvegicus
  ref <308>: DATABASE ACCESSION NUMBER: EMBL / X17053
  ref <309>: DATABASE ENTRY DATE: 1993-05-08
aaattaaatctaaggactttcagatttatggctttgatcacactgtttctagagaaatctaaacctggaaggctgagttaagccagacattccagatggctctctcctcatagtccttggaatcacgaaggaagcagggcagagagctaccagaagtagtaaacattgatcacaggctcctagttcatcgtgaccaaatcaaaaggaatgtttctccatggcccattaactgtctgttagtttgaacgtaacatggtgatagccagactggagctacctgagtcctgttccagggaatcttagggcaattacctacataacccttctggacctcaactgcctgatcttagggattaataacatctatttaccagagcgactgcattgtgaagggttccaaacactcctggcacagagtaagcactgtctgggctttggatagaaatctcttctgcaccatgagctcatttataagactttccaggtctggaattgtacaacccaaacagctcatatcaatgtcacaagctcttcggtttggcaaaatgtctgggagtcaccaaatgcagagaatgccatattcaacaaagcctgataaccaaggactcagtggactaattggcagtcctatcccagatccaaggttccttgagccaggggcaagctaggatatgctcccaggtatcttctcccttaggactttaggtttcttggccacttcctcttatttcagtgaaagcagatccactccattgacacttgtggtcacagtctagcacgactgctcccttccttcttttctccctccctgcgcagcttcatttgctcccagtagtggctggaaaaacaccaaattccaatccgcggtttctcccttctacttcctggaaacatccaagggctcggcacttactcagcagattcaaaccttccactttccatcactcatcgaggatgatgctgctccttggcaccaaccaccctgcctgactccaccctctggcttacaataaaaggctgaggcagagccgctagaaatgcagagacacagacagaggccagcccagaaaccagccaactctcactgaagccagatctctcttcctccaccactatgcaggtctctgtcacgcttctgggcctgttgttcacagttgctgcctgtagcatccacgtgctgtctcagccaggtgagaccccagtttccttctccttctagcatttcaccccattttttaattgttgtgggccatcatagtgggccttacctagtaaaatacttttttttttttaccaaggtaaggagcatagagccaacccaattacaggggttgcttctggaaagcaactaggattttaatcgttagatcaaagtttagaatcgcaccttcatacagttcctgctcccctatttcctgagtatttgagaacctggttgatcaaagaagggcttgggttggttcatttttccagatagaggagaatcaggaagagacccaggatcttgatctatgtttcaccagcttccagagatagcagctcagcagaggtagttggtatcagagatactcatgattcgatatagggtttttttttgtaacctatagtaatgtactcggtaatcttctcagaccctagtaatttgacttctaactaccctcaaatgacagtccctagctttaatggcatccctctgtccaagattgtgaacttactttaagtgtgtcagagatcaccttccagctctgatgtattggcatttacatcccaatctgctgaaactgccttctcctcatggtccttttcttctctaaggtcagaagcacctttccagttctaatgtgctccctgcttctcttttattctccagatgcagttaatgccccactcacctgctgctactcattcactggcaagatgatcccaatgagtcggctggagaactacaagagaatcaccagcagcaggtgtcccaaagaagctgtagtgtgagttatacaccccagccctccctggtccaatatttttcctcgagaacaagggatggtcttcatagacttagaatcagttacatgctcagctccaatatcaagtggttcccaatggggaaactgaggccaagaagggaaagttaattctcagcagcactgtctctatggctgctgttcggggccttccatttgcatgagcttattgtagtaaacttgcagaagaggaaggtcactttgagtccccctttctacctgccctcccacctcgagccctacacagtccctccatgtatagcaggttaaacttcatctaaccgtgtcttctctctttccacagatttgtcaccaagctcaagagagagatctgtgctgaccccaataaggaatgggtccagaagtacattagaaaactggaccagaaccaagtgagatcagaaactacagtcttctataaaattgcatcaaccctaaggacttcagcacctttgaatgtgaacttgacccataaatctgaagctaatgcatccactctcttttccacaaccacctcaagcacttctgtagaagtgaccagtatgacagagaactagtgtgatttggaatgtgatgccttaagtaatgttaaacttatttaacttattgatattacactattcccttccatgaatactagaaatccttaaatgcaagatgtagatccatttttttatttctctgtgaatcctggttcaacactttcaatgtatgagagatgaatgggtaaactttgtgtttgagagtccaaggtattgtttaaaatattattatggatattcctaattattaaaagaaatatattatttttgtacacaagtctgactttcggtgttttctgagggaaatggcaaagctaagagtacataagaacacacaggaggacatcacaagatgggacacatattgagggggggatgggggaatgaatgctgcactcttttgtattgagtggtctcatgtgagtgtcataaactctttgagacagggtccagtcagggatgctagtaccatagttccaatccccaggactgcttctcagacacatgctcgataaaagccccagtccttcccagtcatg

SEQ ID NO: 12049 - protein, 148 aa, Rattus norvegicus
  ref <308>: DATABASE ACCESSION NUMBER: SWISS-Prot / CAA34901
  ref <309>: DATABASE ENTRY DATE: 2002-06-15
MQVSVTLLGLLFTVAACSIHVLSQPDAVNAPLTCCYSFTGKMIPMSRLENYKRITSSRCPKEAVVFVTKLKREICADPNKEWVQKYIRKLDQNQVRSETTVFYKIASTLRTSAPLNVNLTHKSEANASTLFSTTTSSTSVEVTSMTEN

SEQ ID NO: 12050 - DNA, 860 bp, Homo sapiens
  ref <308>: DATABASE ACCESSION NUMBER: Refseq / NM_005408
  ref <309>: DATABASE ENTRY DATE: 2002-11-05
aaaaggccggcggaacagccagaggagcagagaggcaaagaaacattgtgaaatctccaactcttaaccttcaacatgaaagtctctgcagtgcttctgtgcctgctgctcatgacagcagctttcaacccccagggacttgctcagccagatgcactcaacgtcccatctacttgctgcttcacatttagcagtaagaagatctccttgcagaggctgaagagctatgtgatcaccaccagcaggtgtccccagaaggctgtcatcttcagaaccaaactgggcaaggagatctgtgctgacccaaaggagaagtgggtccagaattatatgaaacacctgggccggaaagctcacaccctgaagacttgaactctgctacccctactgaaatcaagctggagtacgtgaaatgacttttccattctcctctggcctcctcttctatgctttggaatacttctaccataattttcaaataggatgcattcggttttgtgattcaaaatgtactatgtgttaagtaatattggctattatttgacttgttgctggtttggagtttatttgagtattgctgatcttttctaaagcaaggccttgagcaagtaggttgctgtctctaagcccccttcccttccactatgagctgctggcagtgggtttgtattcggttcccaggggttgagagcatgcctgtgggagtcatggacatgaagggatgctgcaatgtaggaaggagagctctttgtgaatgtgaggtgttgctaaatatgttattgtggaaagatgaatgcaatagtaggactgctgacattttgcagaaaatacattttatttaaaatctccaaaaaaaaaaa

SEQ ID NO: 12051 - protein, 98 aa, Homo sapiens
  ref <308>: DATABASE ACCESSION NUMBER: SWISS-Prot / Q99616
  ref <309>: DATABASE ENTRY DATE: 2002-06-15
MKVSAVLLCLLLMTAAFNPQGLAQPDALNVPSTCCFTFSSKKISLQRLKSYVITTSRCPQKAVIFRTKLGKEICADPKEKWVQNYMKHLGRKAHTLKT

SEQ ID NO: 12052 - DNA, 1139 bp, Rattus norvegicus; identical to SEQ ID NO: 9525
  ref <308>: DATABASE ACCESSION NUMBER: EMBL / X52840
  ref <309>: DATABASE ENTRY DATE: 1992-10-13

SEQ ID NO: 12053 - protein, 171 aa, Rattus norvegicus; identical to SEQ ID NO: 1768
  ref <308>: DATABASE ACCESSION NUMBER: SWISS-Prot / P18666
  ref <309>: DATABASE ENTRY DATE: 2001-10-16

SEQ ID NO: 12054 - DNA, 944 bp, Homo sapiens; identical to SEQ ID NO: 9527
  ref <308>: DATABASE ACCESSION NUMBER: EMBL / X54304
  ref <309>: DATABASE ENTRY DATE: 1993-09-12

SEQ ID NO: 12055 - protein, 170 aa, Homo sapiens; identical to SEQ ID NO: 9528
  ref <308>: DATABASE ACCESSION NUMBER: SWISS-Prot / P19105
  ref <309>: DATABASE ENTRY DATE: 2002-06-15

SEQ ID NO: 12056 - DNA, 1197 bp, Rattus norvegicus; identical to SEQ ID NO: 9533
  ref <308>: DATABASE ACCESSION NUMBER: EMBL / X53054
  ref <309>: DATABASE ENTRY DATE: 1995-03-23

SEQ ID NO: 12057 - protein, 264 aa, Rattus norvegicus; identical to SEQ ID NO: 9534
  ref <308>: DATABASE ACCESSION NUMBER: SWISS-Prot / P18211
  ref <309>: DATABASE ENTRY DATE: 1999-07-15

SEQ ID NO: 12058 - DNA, 689 bp, Rattus norvegicus; identical to SEQ ID NO: 9541
  ref <308>: DATABASE ACCESSION NUMBER: Refseq / NM_022688
  ref <309>: DATABASE ENTRY DATE: 2002-11-05

SEQ ID NO: 12059 - protein, 37 aa, Rattus norvegicus; identical to SEQ ID NO: 9542
  ref <308>: DATABASE ACCESSION NUMBER: SWISS-Prot / P18889
  ref <309>: DATABASE ENTRY DATE: 1999-07-15

SEQ ID NO: 12060 - DNA, 5465 bp, Rattus norvegicus
  ref <308>: DATABASE ACCESSION NUMBER: EMBL / X55812
  ref <309>: DATABASE ENTRY DATE: 1996-09-19
ttaggtcgttaggagaacttactgtgaacaggctcttttatttcttcaaaagatgtctcccatttcaagcaaggagcacccatggctgagggttccctcccggcatctctttctcagtcaccttgagtctggcctaatcaaagactgaggttatgaagtcgatcctagatggccttgcagacaccaccttccgtaccatcaccacagacctcctctacgtgggctcgaatgacattcagtatgaagatatcaaaggagacatggcatccaaattaggatacttcccacagaaattccctctaacttccttcaggggtagtcccttccaagaaaagatgaccgcaggagacaactccccgttggtcccagcaggagacacaacaaacattacagagttctataacaagtctctctcgtcgttcaaggagaatgaggagaacatccagtgtggggagaactttatggacatggagtgctttatgattctgaatcccagccagcagctggccatcgctgtactgtccctcacactgggcaccttcacggttctggagaacctactggtgctgtgtgtcatcctgcactcccgcagtctccgatgcaggccttcctaccacttcatcggcagcctggcagtggccgacctcctgggaagtgtcatttttgtgtacagctttgttgacttccatgtattccaccgtaaagacagccccaatgtgtttctgttcaaactgggtggggttacagcctccttcacagcttctgtgggcagcctgttcctcacagccatcgacaggtacatatccattcacaggcctctggcctataagaggatcgtcaccaggcccaaggccgttgtggccttttgcctgatgtggactatcgcaatagtaatcgctgtgttgcctctcctgggctggaactgcaagaagctgcaatctgtttgctcggacattttcccactcattgacgagacctacctgatgttctggattggggtgaccagtgtgctgctgctgttcattgtgtacgcgtacatgtacattctctggaaggctcacagccacgcggtccgcatgattcagcgtgggacccagaagagcatcatcatccacacgtcagaagacggcaaggtgcaggtgacccggcctgaccaagcccgcatggacattaggctggccaaaaccctggttctgatcctggtggtgttgatcatctgctggggccctctgcttgcgatcatggtgtatgacgtcttcgggaagatgaacaagcttatcaagacggtgtttgccttctgcagtatgctctgcctgctgaactccaccgtgaaccccatcatctatgctctgaggagcaaggacctgagacatgctttccgaagcatgttcccttcgtgcgaaggcaccgcacagcctctagacaacagcatgggggactcagactgcctgcacaagcacgccaacaacacagccagcatgcacagggccgcggagagctgcatcaagagcaccgttaagatcgcgaaggtgaccatgtctgtgtccacagacacgtccgccgaggctctgtgagcctgctgcttttgtggctgcacagaaaaagaaaaaaagtttttctttagcttaaaacttagaagtctgttgtctcatcggttacatatatatttttaagtttaccgtgtttagtaaaatagtgactgtcaccgtgcttactgagtttgctgacatctcaatagcttaggtacttaaactccatttcccaggggtttacagtgtagaaagcctattgcttcagttactcggtggtccttcaaagtctctgaaatagaagggaaaactttggcttccaaatccgaagcctaactatccatagaaaatcaccatgaaatgagtaataacctttgtaaccacaactttcatgatgctgtgtctgtccacagtattaaagaggtacatttttaccataagtatagtgctaaagtagagaaactttgtaacctgttttctgtcccctgttagttgtgtgttgtgtcagtgtttaatatgtcagtttatttatttatttatttttgtctagcttagcaaaaccagaatgtagccctcataagagcgatggcatacaagagtgattgtgtagcagggcgacccctgtttagatagtattactgtccatgatacgattttagaaaccttagtatttcttccaatatccgtatctaaagttaatattgacataagcataaaggtttatttttctgttaaaacaacaagaagaatttgaagactgttcaaagtattgagcagaattcatggacacttaaaactgtgttaggcctgcattttcgtaggaggacatttcaatatcttctggaccacagctgttcagttgggtaatggattgtgatcagaatggaaaagagaaagtaacactgactttcaaagctgacgccctgactttctgcagtcgttagctataactggacctcttaagacagcatgtgtcaaccttagtgtatactgttatcactgtggagttgctgttcacctgccgtgtatcgcatcgttatgttctggatttaaatagatttcaggcccggatggccaaaagacagtttgtcttctccttaattgagaagagacattgtctggcttagtaaaattgtgagtgtgattgtaaatgtgtatgtgtgtgtatgtgtgtgtatgtgtgtgtgtgcatgtgtgtgtattctatcttgcaactgttacagccatgtccccacaggagaaaaaccgaccaagtgtgagacgtaccccttgctgcacccttgcacatggatttagttgctgcaattgagctctttgtgaaatcctgtttataaaaattctgactgaaacttctcaggagtcttcccacctaggagattgggttgagaattctcgtgacgtttaggtgttctgtaaggccagcagcgttcagcaagaagtaatcagtaagaggtgctggaaagtagaggagtctcccagggagaggagagtgtgggggatggtgggcgcctactattaatcaaagtccttgcaaatggaaatcagtaaagggggatggttctacggccttcttcaaccccacccccacccccacagtagcaagtttcaatggtgcacatcagcagtgcaatctcaggttaaggagcaccatgccagttaccagggccaggccatttcatgacagaggatgagtaggacagaggatatatataacaaatgggcagtgaaaacctggtgacggcccagtacctggctctgtttagatgtttgggcaaagcaaaaggcagtgcctctgcctgctggtaccaagatgtgccaaaacataaggacgagggtggctagcttcggttcgacatctctgccatggtgctcaaaatttgggccctttttccgataaagagaagtattgcttttaagaagccactcactcctgataaattctatgtagagtctctcctcatacaggttctcccccgtcctgaggactgcatagcatgaagtggagagctagtatatgcctgtgatttctagtgtttggggttcccagtctgatggggcagtgccccttcttgcaatcaatgtgacctgagggccaagctaggatatatctagattttttttccagctgagtctcttgcttttcttctctgtgcacagaggaggactcaagatgctggaggattagtaactccatagagaagggtattgatagaataccaccaggggctaggaattgccagcctcatcctacatccacctgaatatcaatcatgtctctagctaccaggctgtaccacctcttctcacagctacaaagacctggtaggacattctaggtatagttattaaaaaaaaaatccaagattcacttttagaactgtatttgtgtaaatgccattttagtgataagattttatagtgtattgaactttcaagacctaactcatatttaataagctaagggccaatggggctgatagcactaaacttggtgcttattgatactctaaggaatatctgtgaaatatcatcatgtgtgcgttaagctaccttcatttaaagggacttaaaattaggtggatccactttggcttttcccatatcatttcctaaccatattgaccaaaaccttttccccagtgagtattagtcattagaattacattcattagtatcattcattaaccagccccttaattagattcattaatttaaatgattttaatttaatcacttatacactctggcatcagggttatctacttccctctgacgtttgtccttaacatgcattcttcggccattgctcatctttaaagggggctaattcccaaactacttaactttgtccaaataaagactgagtcctagactatcagtatcatttaaacaaagaaagcagtctctaagagctcctagatttacccctatgtattaaatatatgtaaaaataaatgtgcatctgggcagcttagacataagtctgtgccagatgtctccaaagctgtctgatacttaactttcaggcttagctggtatcaaatgccaaggaatttttgctacctaaacccatctgcaggaaataggcccaactaccagatgagaactaggtctctagttaccattcatttcattaatttctgccattccatatccataaacagcaccactaacatcatgcacaagattagattcctaatattcttgactgtatatttgtatgatattttaaaacctcctaaatggccattcacagttgctttgcactggccttctgataaaatgttaacacacctattgtaatatacaaaaaacattctatctactgatttggactgaatgtatgtacataggctttacaaaaaagtcagacgtcgaagcagtggtttacagatcagtgattttcagatagagtttctttcagttgccgtggaatctttcaaaagcactcttagtgtgaacttactgaactctaggggtcctggtgatcagagtcgcctagagaggaaacctttccttgtattaatatgaagcaagataccagactatcttgattctcacttccagtgtttcaagtggaaaacgtatttccttgttgtctctgtaaatggaacatccttaattttcctcttaaagaatattgtattgttagatgtttgttgaactggtagcatcattgagactgctgtgaagtctttgtcagtaatctgtataatattttgtatacaagtactggtaagattgttattaagtgtagctccagtcattaaattactatagcaaagtagtacttctgtaatatttacaatgtattaagcctacagtatattttatttcattgatgtaattttattgttatttattcaagagaaagcagttcatcatgtctattgtctaaaattacctggaatcaaataaaagttctagattatcacg

SEQ ID NO: 12061 - protein, 473 aa, Rattus norvegicus
  ref <308>: DATABASE ACCESSION NUMBER: SWISS-Prot / P20272
  ref <309>: DATABASE ENTRY DATE: 1998-12-15
MKSILDGLADTTFRTITTDLLYVGSNDIQYEDIKGDMASKLGYFPQKFPLTSFRGSPFQEKMTAGDNSPLVPAGDTTNITEFYNKSLSSFKENEENIQCGENFMDMECFMILNPSQQLAIAVLSLTLGTFTVLENLLVLCVILHSRSLRCRPSYHFIGSLAVADLLGSVIFVYSFVDFHVFHRKDSPNVFLFKLGGVTASFTASVGSLFLTAIDRYISIHRPLAYKRIVTRPKAVVAFCLMWTIAIVIAVLPLLGWNCKKLQSVCSDIFPLIDETYLMFWIGVTSVLLLFIVYAYMYILWKAHSHAVRMIQRGTQKSIIIHTSEDGKVQVTRPDQARMDIRLAKTLVLILVVLIICWGPLLAIMVYDVFGKMNKLIKTVFAFCSMLCLLNSTVNPIIYALRSKDLRHAFRSMFPSCEGTAQPLDNSMGDSDCLHKHANNTASMHRAAESCIKSTVKIAKVTMSVSTDTSAEAL

SEQ ID NO: 12062 - DNA, 1252 bp, Homo sapiens
  ref <308>: DATABASE ACCESSION NUMBER: EMBL / X81121
  ref <309>: DATABASE ENTRY DATE: 1995-03-30
atgaagtcgatcctagatggccttgcagataccaccttccgcaccatcaccactgacctcctgtacgtgggctcaaatgacattcagtacgaagacatcaaaggagaatgaggagaacatccagtgtggggagaacttcatggacatagagtgtttcatggtcctgaaccccagccagcagctggccattgcagtcctgtccctcacgctgggcaccttcacggtcctggagaacctcctggtgctgtgcgtcatcctccactcccgcagcctccgctgcaggccttcctaccacttcatcggcagcctggcggtggcagacctcctggggagtgtcatttttgtctacagcttcattgacttccacgtgttccaccgcaaagatagccgcaacgtgtttctgttcaaactgggtggggtcacggcctccttcactgcctccgtgggcagcctgttcctcacagccatcgacaggtacatatccattcacaggcccctggcctataagaggattgtcaccaggcccaaggccgtggtggcgttttgcctgatgtggaccatagccattgtgatcgccgtgctgcctctcctgggctggaactgcgagaaactgcaatctgtttgctcagacattttcccacacattgatgaaacctacctgatgttctggatcggggtcaccagcgtactgcttctgttcatcgtgtatgcgtacatgtatattctctggaaggctcacagccacgccgtccgcatgattcagcgtggcacccagaagagcatcatcatccacacgtctgaggatgggaaggtacaggtgacccggccagaccaagcccgcatggacattaggttagccaagaccctggtcctgatcctggtggtgttgatcatctgctggggccctctgcttgcaatcatggtgtatgatgtctttgggaagatgaacaagctcattaagacggtgtttgcattctgcagtatgctctgcctgctgaactccaccgtgaaccccatcatctatgctctgaggagtaaggacctgcgacacgctttccggagcatgtttccctcttgtgaaggcactgcgcagcctctggataacagcatgggggactcggactgcctgcacaaacacgcaaacaatgcagccagtgttcacagggccgcagaaagctgcatcaagagcacggtcaagattgccaaggtaaccatgtctgtgtccacagacacgtctgccgaggctctgtga

SEQ ID NO: 12063 - protein, 472 aa, Homo sapiens
  ref <308>: DATABASE ACCESSION NUMBER: SWISS-Prot / P21554
  ref <309>: DATABASE ENTRY DATE: 2002-06-15
MKSILDGLADTTFRTITTDLLYVGSNDIQYEDIKGDMASKLGYFPQKFPLTSFRGSPFQEKMTAGDNPQLVPADQVNITEFYNKSLSSFKENEENIQCGENFMDIECFMVLNPSQQLAIAVLSLTLGTFTVLENLLVLCVILHSRSLRCRPSYHFIGSLAVADLLGSVIFVYSFIDFHVFHRKDSRNVFLFKLGGVTASFTASVGSLFLTAIDRYISIHRPLAYKRIVTRPKAVVAFCLMWTIAIVIAVLPLLGWNCEKLQSVCSDIFPHIDETYLMFWIGVTSVLLLFIVYAYMYILWKAHSHAVRMIQRGTQKSIIIHTSEDGKVQVTRPDQARMDIRLAKTLVLILVVLIICWGPLLAIMVYDVFGKMNKLIKTVFAFCSMLCLLNSTVNPIIYALRSKDLRHAFRSMFPSCEGTAQPLDNSMGDSDCLHKHANNAASVHRAAESCIKSTVKIAKVTMSVSTDTSAEAL

SEQ ID NO: 12064 - DNA, 1374 bp, Rattus norvegicus; identical to SEQ ID NO: 9632
  ref <308>: DATABASE ACCESSION NUMBER: EMBL / X56596
  ref <309>: DATABASE ENTRY DATE: 1991-09-05

SEQ ID NO: 12065 - protein, 263 aa, Rattus norvegicus; identical to SEQ ID NO: 9633
  ref <308>: DATABASE ACCESSION NUMBER: SWISS-Prot / P29826
  ref <309>: DATABASE ENTRY DATE: 1999-07-15

SEQ ID NO: 12066 - DNA, 428 bp, Homo sapiens; identical to SEQ ID NO: 9634
  ref <308>: DATABASE ACCESSION NUMBER: EMBL / BM727355
  ref <309>: DATABASE ENTRY DATE: 2002-03-07

SEQ ID NO: 12067 - protein, 268 aa, Homo sapiens; identical to SEQ ID NO: 9635
  ref <308>: DATABASE ACCESSION NUMBER: SWISS-Prot / P05538
  ref <309>: DATABASE ENTRY DATE: 2001-10-16

SEQ ID NO: 12068 - DNA, 1892 bp, Rattus norvegicus
  ref <308>: DATABASE ACCESSION NUMBER: EMBL / X57764
  ref <309>: DATABASE ENTRY DATE: 1991-02-20
cgggtggcgtgcgcccaagttccccattggcgcgcaaacttaacttactgttgtggcgcgggtagagacaacccggctagggtgagtgttttcagaggcgtggctgggtagctgactaaagtaccctctcttcattcccctgttgttctccagactgaaaacggcggagcggctacgggactctcacaggagcaagctgcaacatgcaatcgtccgcaagccggtgcggacgcgccttggtggcgctgctgctggcctgtggcttgttgggggtatggggagagaaaagaggattcccacctgcccaggccacaccatctcttctcgggactaaagaagttatgacgccacccactaagacctcctggactagaggttccaactccagtctgatgcgtttccgcactgcggaggtgaccaaaggagggagggtggctggagtcccgccaagatccttccctcctccgtgccaacgaaaaattgagatcaacaagacttttaaatacatcaacacgattgtatcatgcctcgtgttcgtgctaggcatcatcgggaactccacactgctaagaatcatctacaagaacaagtgcatgagaaatggtcccaatatcttgatcgccagcctggctctgggagatctgctacacatcatcatcgacattcccattaatgcctacaagctgctggcaggggactggccatttggagctgagatgtgcaagctggtgcccttcatacagaaggcttctgtggggatcacagtgttgagtctatgtgctctaagtattgacagatatcgagctgttgcttcttggagtcgaattaaaggaattggggttccaaaatggacagcagtagaaattgttttaatttgggtggtctctgtggttctggctgtccctgaagccataggttttgatgtgattacgtcggactacaaaggaaagcccctaagggtctgcatgcttaatccctttcagaaaacagccttcatgcagttttacaagacagccaaagactggtggctgttcagtttctacttctgcttgccgctagccatcactgcgatcttttacaccctaatgacctgtgagatgctcagaaagaaaagtggtatgcagattgccttgaatgaccacttaaagcagagacgagaagtggccaagacagtattctgcctggtcctcgtgtttgccctctgttggcttccccttcacctcagcaggattctgaagctcaccctttatgaccagagcaatcctcagaggtgtgaacttctgagttttttgctggttttggactacattggtatcaacatggcttctttgaattcctgcattaatccaatcgctctgtatttggtgagcaagagattcaaaaactgctttaagtcgtgtttgtgctgctggtgccaaacgtttgaggaaaaacagtccttagaggagaagcaatcctgcttgaagttcaaagctaacgatcacggatacgacaacttccgctccagcaataaatacagctcatcttgaaggaaggaacactcactgaatctcattgtcctcatcgtggacagatagcattaaaacaaaatgaaacctttgccaaacccaaacggaaaaccgtgcttgcggaaaggtgtgcacgcatgggagagggattgttttttaaccgttctaactttccacacctgatatttcacgggctgtttacaacctaagaaagccatgggaatgaatgaagcctcgggaaagcacttagattcttagtcaagcacttcagcacggctcttaaaagccctcactgcactcacagcccacttacatttaaaaacaagaactcaaactctattcaggaattgctcgatttgagacaaaaaacaaaacaaaaaaaaa

SEQ ID NO: 12069 - protein, 442 aa, Rattus norvegicus; identical to SEQ ID NO: 7653
  ref <308>: DATABASE ACCESSION NUMBER: SWISS-Prot / P21451
  ref <309>: DATABASE ENTRY DATE: 1998-07-15

SEQ ID NO: 12070 - DNA, 1578 bp, Homo sapiens
  ref <308>: DATABASE ACCESSION NUMBER: EMBL / X99250
  ref <309>: DATABASE ENTRY DATE: 1997-07-28
gggctgcaggtttcgacccgcgctggcgagtcatgagcgccaagtttcccactggcgcgcaaacttgagttacttttgagcgtggatactggcgaagaggctgcgggcggtattagcgtttgcagcgacttggctcgggcagctgaccccaaagtgtctgtcttccttcctctgcttgtctctaggctctgaaactgcggcggccaccggacgcttctggagcaggtagcagcatgcagccgcctccaagtctgtgcggacgcgccctggttgcgctggttcttgcctgcggcctgtcgcggatctggggagaggagagaggcttcccgcccgacagggccactccgcttttgcaaaccgcagagataatgacgccacccactaagaccttatggcccaagggttccaacgccagtctggcgcggtcgttggcacctgcggaggtgcctaaaggagacaggacggcaggatctccgccacgcaccatctcccctcccccgtgccaaggacccatcgagatcaaggagactttcaaatacatcaacacggttgtgtcctgccttgtgttcgtgctggggatcatcgggaactccacacttctgagaattatctacaagaacaagtgcatgcgaaacggtcccaatatcttgatcgccagcttggctctgggagacctgctgcacatcgtcattgacatccctatcaatgtctacaagctgctggcagaggactggccatttggagctgagatgtgtaagctggtgcctttcatacagaaagcctccgtgggaatcactgtgctgagtctatgtgctctgagtattgacagatatcgagctgttgcttcttggagtagaattaaaggaattggggttccaaaatggacagcagtagaaattgttttgatttgggtggtctctgtggttctggctgtccctgaagccataggttttgatataattacgatggactacaaaggaagttatctgcgaatctgcttgcttcatcccgttcagaagacagctttcatgcagttttacaagacagcaaaagattggtggctgttcagtttctatttctgcttgccattggccatcactgcatttttttatacactaatgacctgtgaaatgttgagaaagaaaagtggcatgcagattgctttaaatgatcacctaaagcagagacgggaagtggccaaaaccgtcttttgcctggtccttgtctttgccctctgctggcttccccttcacctcagcaggattctgaagctcactctttataatcagaatgatcccaatagatgtgaacttttgagctttctgttggtattggactatattggtatcaacatggcttcactgaattcctgcattaacccaattgctctgtatttggtgagcaaaagattcaaaaactgctttaaggctgggccacatgttggaaataagctagtaatgttgttttctgtcaatattgaatgtgatggtacagtaaaccaaaacccaacaatgtggccagaaagaaagagcaataataattaattcacacaccatatggattctatttataaatcac

SEQ ID NO: 12071 - protein, 442 aa, Homo sapiens; identical to SEQ ID NO: 7655
  ref <308>: DATABASE ACCESSION NUMBER: SWISS-Prot / P24530
  ref <309>: DATABASE ENTRY DATE: 2002-06-15

SEQ ID NO: 12072 - DNA, 2125 bp, Rattus norvegicus; identical to SEQ ID NO: 9680
  ref <308>: DATABASE ACCESSION NUMBER: EMBL / X58631
  ref <309>: DATABASE ENTRY DATE: 1992-02-19

SEQ ID NO: 12073 - protein, 451 aa, Rattus norvegicus
  misc_feature (1)..(451): Xaa=Unknown amino acid
MSAIQASWPSGTECIAKYNFHGTAEQDLPFCKGDVLTIVAVTKDPNWYKAKNKVGREGIIPANYVQKREGVKAGTKLSLMPWFHGKITREQAERLLYPPETGLFLVRESTNYPGDYTLCVSCEGKVEHYRIMYHASKLSIDEEVYFENLMQLVEHYTTDADGLCTRLIKPKVMEGTVAAQDEFYRSGWALNMKELKLLQTIGKGEFGDVMLGDYRGNKVAVKCIKNDATAQAFLAEASVMTQLRHSNLVQLLGVIVEEKGGLYIVTEYMAKGSLVDYLRSRGRSVLGGDCLLKFSLDVCEAMEYLEGNNFVHRDLAARNVLVSEDNVAKVSDFGLTKEASSTQDTGKLPVKWTAPEALREKKFSTKSDVWSFGILLWEIYSFGRVPYPRIPLKDVVPRVEKGYKMDAPDGCPPAVYDVMKNCWHLDAATRPTFLQLREQLEHIRTHELHLX

SEQ ID NO: 12074 - DNA, 3107 bp, Homo sapiens
  ref <308>: DATABASE ACCESSION NUMBER: EMBL / L36645
  ref <309>: DATABASE ENTRY DATE: 2000-03-04
aagcggcaggagcagcgttggcaccggcgaaccatggctgggattttctatttcgccctattttcgtgtctcttcgggatttgcgacgctgtcacaggttccagggtataccccgcgaatgaagttaccttattggattccagatctgttcagggagaacttgggtggatagcaagccctctggaaggagggtgggaggaagtgagtatcatggatgaaaaaaatacaccaatccgaacctaccaagtgtgcaatgtgatggaacccagccagaataactggctacgaactgattggatcacccgagaaggggctcagagggtgtatattgagattaaattcaccttgagggactgcaatagtcttccgggcgtcatggggacttgcaaggagacgtttaacctgtactactatgaatcagacaacgacaaagagcgtttcatcagagagaaccagtttgtcaaaattgacaccattgctgctgatgagagcttcacccaagtggacattggtgacagaatcatgaagctgaacaccgagatccgggatgtagggccattaagcaaaaaggggttttacctggcttttcaggatgtgggggcctgcatcgccctggtatcagtccgtgtgttctataaaaagtgtccactcacagtccgcaatctggcccagtttcctgacaccatcacaggggctgatacgtcttccctggtggaagttcgaggctcctgtgtcaacaactcagaagagaaagatgtgccaaaaatgtactgtggggcagatggtgaatggctggtacccattggcaactgcctatgcaacgctgggcatgaggagcggagcggagaatgccaagcttgcaaaattggatattacaaggctctctccacggatgccacctgtgccaagtgcccaccccacagctactctgtctgggaaggagccacctcgtgcacctgtgaccgaggctttttcagagctgacaacgatgctgcctctatgccctgcacccgtccaccatctgctcccctgaacttgatttcaaatgtcaacgagacatctgtgaacttggaatggagtagccctcagaatacaggtggccgccaggacatttcctataatgtggtatgcaagaaatgtggagctggtgaccccagcaagtgccgaccctgtggaagtggggtccactacaccccacagcagaatggcttgaagaccaccaaagtctccatcactgacctcctagctcataccaattacacctttgaaatctgggctgtgaatggagtgtccaaatataaccctaacccagaccaatcagtttctgtcactgtgaccaccaaccaagcagcaccatcatccattgctttggtccaggctaaagaagtcacaagatacagtgtggcactggcttggctggaaccagatcggcccaatggggtaatcctggaatatgaagtcaagtattatgagaaggatcagaatgagcgaagctatcgtatagttcggacagctgccaggaacacagatatcaaaggcctgaaccctctcacttcctatgttttccacgtgcgagccaggacagcagctggctatggagacttcagtgagcccttggaggttacaaccaacacagtgccttcccggatcattggagatggggctaactccacagtccttctggtctctgtctcgggcagtgtggtgctggtggtaattctcattgcagcttttgtcatcagccggagacggagtaaatacagtaaagccaaacaagaagcggatgaagagaaacatttgaatcaaggtgtaagaacatatgtggacccctttacgtacgaagatcccaaccaagcagtgcgagagtttgccaaagaaattgacgcatcctgcattaagattgaaaaagttataggagttggtgaatttggtgaggtatgcagtgggcgtctcaaagtgcctggcaagagagagatctgtgtggctatcaagactctgaaagctggttatacagacaaacagaggagagacttcctgagtgaggccagcatcatgggacagtttgaccatccgaacatcattcacttggaaggcgtggtcactaaatgtaaaccagtaatgatcataacagagtacatggagaatggctccttggatgcattcctcaggaaaaatgatggcagatttacagtcattcagctggtgggcatgcttcgtggcattgggtctgggatgaagtatttatctgatatgagctatgtgcatcgtgatctggccgcacggaacatcctggtgaacagcaacttggtctgcaaagtgtctgattttggcatgtcccgagtgcttgaggatgatccggaagcagcttacaccaccaggggtggcaagattcctatccggtggactgcgccagaagcaattgcctatcgtaaattcacatcagcaagtgatgtatggagctatggaatcgttatgtgggaagtgatgtcgtacggggagaggccctattgggatatgtccaatcaagatgtgattaaagccattgaggaaggctatcggttaccccctccaatggactgccccattgcgctccaccagctgatgctagactgctggcagaaggagaggagcgacaggcctaaatttgggcagattgtcaacatgttggacaaactcatccgcaaccccaacagcttgaagaggacagggacggagagctccagacctaacactgccttgttggatccaagctcccctgaattctctgctgtggtatcagtgggcgattggctccaggccattaaaatggaccggtataaggataacttcacagctgctggttataccacactagaggctgtggtgcacgtgaaccaggaggacctggcaagaattggtatcacagccatcacgcaccagaataagattttgagcagtgtccaggcaatgcgaacccaaatgcagcagatgcacggcagaatggttcccgtctgagccagtactgaataaactcaaaactcttgaaattagtttacctcatccatgcactttaattgaagaactgcactttttttacttcgtcttcgccctctgaaattaaagaaatg

SEQ ID NO: 12075 - protein, 986 aa, Homo sapiens
  ref <308>: DATABASE ACCESSION NUMBER: SWISS-Prot / P54764
  ref <309>: DATABASE ENTRY DATE: 2002-06-15
MAGIFYFALFSCLFGICDAVTGSRVYPANEVTLLDSRSVQGELGWIASPLEGGWEEVSIMDEKNTPIRTYQVCNVMEPSQNNWLRTDWITREGAQRVYIEIKFTLRDCNSLPGVMGTCKETFNLYYYESDNDKERFIRENQFVKIDTIAADESFTQVDIGDRIMKLNTEIRDVGPLSKKGFYLAFQDVGACIALVSVRVFYKKCPLTVRNLAQFPDTITGADTSSLVEVRGSCVNNSEEKDVPKMYCGADGEWLVPIGNCLCNAGHEERSGECQACKIGYYKALSTDATCAKCPPHSYSVWEGATSCTCDRGFFRADNDAASMPCTRPPSAPLNLISNVNETSVNLEWSSPQNTGGRQDISYNVVCKKCGAGDPSKCRPCGSGVHYTPQQNGLKTTKVSITDLLAHTNYTFEIWAVNGVSKYNPNPDQSVSVTVTTNQAAPSSIALVQAKEVTRYSVALAWLEPDRPNGVILEYEVKYYEKDQNERSYRIVRTAARNTDIKGLNPLTSYVFHVRARTAAGYGDFSEPLEVTTNTVPSRIIGDGANSTVLLVSVSGSVVLVVILIAAFVISRRRSKYSKAKQEADEEKHLNQGVRTYVDPFTYEDPNQAVREFAKEIDASCIKIEKVIGVGEFGEVCSGRLKVPGKREICVAIKTLKAGYTDKQRRDFLSEASIMGQFDHPNIIHLEGVVTKCKPVMIITEYMENGSLDAFLRKNDGRFTVIQLVGMLRGIGSGMKYLSDMSYVHRDLAARNILVNSNLVCKVSDFGMSRVLEDDPEAAYTTRGGKIPIRWTAPEAIAYRKFTSASDVWSYGIVMWEVMSYGERPYWDMSNQDVIKAIEEGYRLPPPMDCPIALHQLMLDCWQKERSDRPKFGQIVNMLDKLIRNPNSLKRTGTESSRPNTALLDPSSPEFSAVVSVGDWLQAIKMDRYKDNFTAAGYTTLEAVVHVNQEDLARIGITAITHQNKILSSVQAMRTQMQQMHGRMVPV

SEQ ID NO: 12076 - DNA, 1241 bp, Rattus norvegicus; identical to SEQ ID NO: 9684
  ref <308>: DATABASE ACCESSION NUMBER: EMBL / X58830
  ref <309>: DATABASE ENTRY DATE: 1995-07-20

SEQ ID NO: 12077 - protein, 207 aa, Rattus norvegicus; identical to SEQ ID NO: 9685
  ref <308>: DATABASE ACCESSION NUMBER: SWISS-Prot / Q04906
  ref <309>: DATABASE ENTRY DATE: 1995-11-01

SEQ ID NO: 12078 - DNA, 509 bp, Homo sapiens; identical to SEQ ID NO: 9686
  ref <308>: DATABASE ACCESSION NUMBER: EMBL / AI367148
  ref <309>: DATABASE ENTRY DATE: 2000-03-03

SEQ ID NO: 12079 - protein, 513 aa, Homo sapiens; identical to SEQ ID NO: 9687
  ref <308>: DATABASE ACCESSION NUMBER: SWISS-Prot / P22004
  ref <309>: DATABASE ENTRY DATE: 2001-10-16

SEQ ID NO: 12080 - DNA, 1796 bp, Rattus norvegicus; identical to SEQ ID NO: 9692
  ref <308>: DATABASE ACCESSION NUMBER: EMBL / X59132
  ref <309>: DATABASE ENTRY DATE: 1991-06-27

SEQ ID NO: 12081 - protein, 449 aa, Rattus norvegicus; identical to SEQ ID NO: 9693
  ref <308>: DATABASE ACCESSION NUMBER: SWISS-Prot / P23811
  ref <309>: DATABASE ENTRY DATE: 2001-10-16

SEQ ID NO: 12082 - DNA, 371 bp, Homo sapiens; identical to SEQ ID NO: 9694
  ref <308>: DATABASE ACCESSION NUMBER: EMBL / AI220044
  ref <309>: DATABASE ENTRY DATE: 1998-12-01

SEQ ID NO: 12083 - protein, 440 aa, Homo sapiens; identical to SEQ ID NO: 9695
  ref <308>: DATABASE ACCESSION NUMBER: SWISS-Prot / P47872
  ref <309>: DATABASE ENTRY DATE: 2001-10-16

SEQ ID NO: 12084 - DNA, 2697 bp, Rattus norvegicus
  ref <308>: DATABASE ACCESSION NUMBER: EMBL / X59267
  ref <309>: DATABASE ENTRY DATE: 1993-05-11
gtcggtccgcccgtgcgtgcgtctgtccgttcggcctccgtccggcccgcagcatggccggcgtcagcttcagcggccaccgcctggagctgctggcggcgtacgaggaggtgatccgggaggagagtgcagccgactgggctctgtacacttacgaagatggctcagatgacctcaagcttgcagcatcaggagaaggaggcttgcaggagctttcaggccacttcgagaaccagaaagtgatgtacggtttctgcagcgtcaaggactcccaggctgccttgccaaaatatgtgctcatcaactgggttggtgaggatgtgcctgatgcccgaaaatgtgcttgtgccagccatgtggccaaggtggctgaattcttccagggcgttgacgtaattgtgaatgccagcagtgtggaggatatcgatgctggcgccattgggcagcggctctccaatggactggctcggctctctagcccagtgctgcaccgcctgcgccttcgggaggatgagaatgctgagccggtgggcaccacctaccagaagacggatgcggccgtggagatgaagcggattaaccgtgagcagttttgggagcaggccaagaaggaggaggagctgcggaaggaggaggagcggaagaaggctttggatgccaggctcaggtttgagcaggagcggatggagcaggagcggcaggagcaggaggaacgggaacggcgctaccgagagcgggagcagcagatcgaggagcacaggaggaaacagcagagtctggaagctgaagaggccaagaggaggttaaaggatcagtctatctttggtgatcagcgagatgaagaggaagagtcccagatgaagaagtcggaatctgaggtggaggaggcagctgccatcattgcccagcggcctgataacccacgggagttcttcagacagcaggaacgagtggcttcagcctctggtggcagctgtgacgcaccctcgcccttcaaccaccgaccaggtcgtccgtactgccctttcataaaggcatcggacagtgggccttcctcctcctcctcttcctcctcttcccctccacggactccctttccctatatcacctgccaccgcaccccaaacctctcttcctccctcccatgcagtcacctggacagccaccggaggatggcgcccactcccattcccacccggagcccatctgattccagcacagcctccacccccatcacggagcagatcgagagggccctggatgaggtcacatcctcgcagcctccacccccacctccaccacccccaccagctcaagaggcccaggagtctgctcccagactggacggtgaagaggtctgcaaggaggccaaagtagcagcagctcctcaggtctgggctggctgtgcagaggagcctcctcgggcacaggaacctcccctgttgcaaagcagccccacggaggacttgatgtgcacagaatctcctgagcaggctgtcctggcggcctctccagagcctgatgcctctgtcacctcagtagctgatgctcatgcagctgacaccatcgagaccaccactgccactactgccaccactattgccgacaacgtcacccctgccgccgccagcctcattgatctgtggcctggtaacggggaagaggcctcaacgcctcaggctgaacccagggtgcccaccccaccctcaggtgctgaggcctccctggcagaggtgcctctgttgaatgaggcagctcaggagccgctgccaccagtgggcgaaggctgtgccaaccttcttaatttcgatgagctgccagaacctccagccaccttctgtgacccagaggaggaagccgaaggagagccgctggctgcctcccaggtcctaactatgccctcagccctagaggaggtagatcaggtgttggagcaggagttggagccagaacctcatctgctgaccaatggagagaccactcagaaggaggggacccagcaggccagcgaaggatacttcagtcagtcacaggaggaagaattcgcccaatcagaagagccatgtgcaaaggctccacctcctgtattctacaacaagcctccagaaatcgacatcacctgctgggatgcagacccagttcctgaagaggaagagggcttcgagggtggtgattagtagtggcgactgccccctggctgccctcgccaaggctgcccacctgcagtgcctctggccagccggcttgcagcgccagcattagcagcagccccgcctggctcccactctggattccggcactggccggggacctgtctgcttctctacccacagggcctgacttttacagcttttctcttttttttaaaagttgatagacttgtacaattgactggttttcctcccgttggtagttgaaacaatgttgcagattccacccccttcctgcccagaccagattgtagcttagtccttcctgctcagctgaccagggtggaggcctcaccctgcttgggacctggtgggggtcgggggttctggtgggaaaatgttcccccccatcacttttcctagttttatgtttcttggaaaaaaaatatcactttgtattctctatccagggcttcagatattttgcacgaaatttaaaacatggcaataaatggctcgtgggctctgaaaaaaaaaaaaaaaaaaa

SEQ ID NO: 12085 - protein, 707 aa, Rattus norvegicus
  ref <308>: DATABASE ACCESSION NUMBER: SWISS-Prot / Q07266
  ref <309>: DATABASE ENTRY DATE: 2002-06-15
MAGVSFSGHRLELLAAYEEVIREESAADWALYTYEDGSDDLKLAASGEGGLQELSGHFENQKVMYGFCSVKDSQAALPKYVLINWVGEDVPDARKCACASHVAKVAEFFQGVDVIVNASSVEDIDAGAIGQRLSNGLARLSSPVLHRLRLREDENAEPVGTTYQKTDAAVEMKRINREQFWEQAKKEEELRKEEERKKALDARLRFEQERMEQERQEQEERERRYREREQQIEEHRRKQQSLEAEEAKRRLKDQSIFGDQRDEEEESQMKKSESEVEEAAAIIAQRPDNPREFFRQQERVASASGGSCDAPSPFNHRPGRPYCPFIKASDSGPSSSSSSSSSPPRTPFPYITCHRTPNLSSSLPCSHLDSHRRMAPTPIPTRSPSDSSTASTPITEQIERALDEVTSSQPPPPPPPPPPAQEAQESAPRLDGEEVCKEAKVAAAPQVWAGCAEEPPRAQEPPLLQSSPTEDLMCTESPEQAVLAASPEPDASVTSVADAHAADTIETTTATTATTIADNVTPAAASLIDLWPGNGEEASTPQAEPRVPTPPSGAEASLAEVPLLNEAAQEPLPPVGEGCANLLNFDELPEPPATFCDPEEEAEGEPLAASQVLTMPSALEEVDQVLEQELEPEPHLLTNGETTQKEGTQQASEGYFSQSQEEEFAQSEEPCAKAPPPVFYNKPPEIDITCWDADPVPEEEEGFEGGD

SEQ ID NO: 12086 - DNA, 2524 bp, Homo sapiens
  ref <308>: DATABASE ACCESSION NUMBER: EMBL / U00802
  ref <309>: DATABASE ENTRY DATE: 2000-03-04
ctttccctccctcctcctccgtccgcccgtccgtccgcgcgtctgtccgttcggcccggtccggcccgaagcatggccggcgtcagcttcagcggccaccgcctggagctgctggcggcttacgaggaggtgatccgagaggagagcgcggccgactgggctctgtacacatatgaagatggctccgatgacctcaagcttgcagcatcaggagaagggggcttgcaggagctttcgggacactttgagaaccagaaggtgatgtacggcttctgcagtgtcaaggactcccaagctgctctgccaaaatacgtgctcatcaactgggtgggcgaagatgtgcctgatgcccgcaagtgcgcttgtgccagccacgtggctaaggtggcagagttcttccagggtgtcgacgtgatcgtgaacgccagcagcgtggaagacatagacgcgggtgccatcgggcagcggctctctaacgggctggcgcgactctccagccctgtgctgcaccgactgcggctgcgagaggatgagaacgcagagcccgtgggcaccacctaccagaagacggatgcagctgtggaaatgaagcggattaaccgagagcagttctgggagcaggccaagaaggaagaagagctgcggaaggaggaggagcggaagaaggccctggatgagaggctcaggttcgagcaggagcggatggagcaggagcggcaggagcaagaggagcgcgagcggcgctaccgggagcgggagcagcagatcgaggagcacaggaggaaacagcagactttagaagcggaagaggccaagaggcggttgaaggagcagtctatctttggtgaccatcgggatgaggaggaagagacccacatgaagaagtcagagtcggaggtggaggaggcagcagctattattgcccagcggcctgacaacccaagggagttcttcaagcagcaggaaagagtcgcatcggcctctgcgggcagctgtgatgtaccctcgcccttcaaccatcgaccaggcagccacctggacagccaccggaggatggcgcccactcccatccccacgcggagcccgtctgactccagcaccgcctccacccctgtcgctgagcagatagagcgggccctggatgaggtcacctcctcgcagcctccaccactgccaccgccacccccaccagcccaagagacccaggagcccagccccatcctagacagtgaggagaccagagcagcagcccctcaggcctgggccggccccatggaggagccccctcaggcacaggcgcctccccgggggccaggcagccctgcagaggacttgatgttcatggagtctgcagagcaggctgtcctggctgctcccgtggagcctgccacagctgacgccacggaggtccacgatgcagctgacaccattgaaactgacactgccactgctgacaccactgttgccaacaacgtaccccccgccgccaccagcctcattgacctatggcctggcaacggggaaggggcctccacactccagggtgagcccagggcccccacgccaccctcgggtactgaggtcaccctggcagaggtgcccctgctggatgaggtggctccggagccactgctgccagcaggcgaaggctgtgccacccttctcaactttgatgagctgcctgagccgccagccaccttctgtgacccagaggaagtggaaggggagcccctggctgccccccagaccccaactctgccctcagcccttgaggagctggagcaagagcaggagccggagccccacctgctaaccaatggcgagaccacccagaaggaggggacccaggccagtgaggggtacttcagtcaatcacaggaggaggagtttgcccaatcggaagagctctgtgccaaggctccgcctcctgtgttctacaacaagcctccagagatcgacatcacatgctgggatgcagacccagttccagaagaggaggagggcttcgagggtggtgattagcggtggcgccagccctaggctacccttgccaaggccgcccacctgcatcagcctctggccagacggcccgccgtgcctgcattcgcagcagctccgcctggcacccactccggattccggccctggctggggacttggccgcttccctacccacagggcctgacttttacagcttttctctttttttaaaaagttgataggagacttgtacagttgactggctttcctctcgttggtagttgagacgctgttgcaaattccacccctccttccctggtccagattgtagctcttagtcctccctgctcagctggccgggttggaggcctcaccctgcttggggcctggcgtggggggagctctggtgggaaaatgtcccccacctcttttcctagttttatgtttcttgggaaaatatcactttgtattctctgtccagggcttcagatattttgcacgaattttaaaacatggcaataaatggctcgtgggctctggctcc

SEQ ID NO: 12087 - protein, 649 aa, Homo sapiens [sequence omitted]

SEQ ID NO: 12088 - DNA, 3996 bp, Rattus norvegicus; identical to SEQ ID NO: 9740
  misc_feature (1)..(3996): n=a, c, g or t
  ref <308>: DATABASE ACCESSION NUMBER: EMBL / X59864
  ref <309>: DATABASE ENTRY DATE: 1996-09-03

SEQ ID NO: 12089 - protein, 158 aa, Rattus norvegicus; identical to SEQ ID NO: 9741
  ref <308>: DATABASE ACCESSION NUMBER: SWISS-Prot / CAA42524
  ref <309>: DATABASE ENTRY DATE: 2001-12-01

SEQ ID NO: 12090 - DNA, 4505 bp, Rattus norvegicus
  ref <308>: DATABASE ACCESSION NUMBER: EMBL / X59993
  ref <309>: DATABASE ENTRY DATE: 1996-07-25
atgggggcggccgaggtcggaggcggcccgaaaagacgaagcgccgacggggaccggtggagtgacacccccgcaggtggccctggctgtccgggaccattcgagctgtttctcacactgacgttaccaagaaagatttgaaggtttgtgtggagtttgatggagagtcttggagaaagagaagatggatagatgtctacagccttctaagaagagcatttttagtagaacataacctggttctggcagaacgaaaatcacctgagattcctgagcaagttattcagtggcctgcaagaatgtacaaatctctactagacaaagctggcttgggatccataacttctgttcgcttccttggagatcagcaaagtgtatttgtttccaaagaccttttgaaacctatacaggatgtaaacagtcttcggctttcccttactgataatcagacggtcagtaaagagtttcaagctttgattgtaaaacatttggatgaaagccatcttttacaaggtgacaagaaccttgttggttcagaagtaagaatttatagcttggatccatctactcagtggttttcagcaactgttgtacatggaaacccctcatccaaaactcttcaagtcaactgtgaggagattccagcgctgaaaattgttgatccagcactgattcacgttgaagttgtacacgataattttgtaacgtgtggtaattctacaagaattggagctgtgaaacgcaagtcttctgagaataatggaagttcagtttctaaacaagcaaaatcttgctctgaggtctctcccagtatgtgtcctgtacagtctgttcccacaacagtgtgtaaggagatcctgcttggctgtactgcagcaaccccatctagcaacagacagcagaacactccccaggcagccaattctccacctaacattggagcaaaacttcctcaaggatgtcacaagcagagtttaccagaagaaatttcttcctgtctaaatacaaaatctgaagtactgagaacaaaaccagatgtttgcaaagcaggattactttcttcaaaatcttctcaggttggagctggagacttgaaaattctgagtgagcccaaaggtagctgtatccagcctaaaacaaacactgatcaggagagcagactggagtctactccacaaccagtcactggccttacaaaggagtgcttggttacaaagacttcctctaaggcagaactggacaatgccactgctcctgaactgcagaagcgtctagagcacacagcttccacacccgatggtctttcagacaagccagaagtggaagcaggtgtcactaggcttaatagctgttcagaaaagaaggttggaccttcagatttaggttcgcagtcacagaatttaaaggaaacttcagtaaaagtcgatcatgacagctgttgtacaagaagcagtaataaaacccagactcccccagcccggaagtcagttttgacagacccagataaactcaagaagctacagcagagtggagaggcctttgttcaggatgactcctgtgttaacatcgtggcacagctgcccaagtgtcgggagtgtcgattagacagcctgcgcaaggataaggaccagcagaaagactcgccagtgttctgtcgcttttttcacttcaggaggttacaattcaacaaacatggtgttctgcgggtagaaggcttcttaacaccaaacaagtacgacagtgaagcgattggcttgtggctgcctttgaccaaaaatgttgtggggaccgatttggacacagcaaagtatatcctggccaatattggagaccacttctgtcaaatggtgatttctgagaaggaggctatgtcaactattgagccacacaggcaggttgcttggaaacgagctgtcaaaggagttagagaaatgtgtgatgtgtgtgacacaaccattttcaacctgcactgggtgtgccctcggtgtgggtttggagtgtgtgtagattgctaccggctgaagaggaagaattgccaacagggggctgcctacaagactttctcttggataaggtgtgtgaagagtcaaatacatgagcctgagaacctgatgcccacgcagattattcctggcaaagccctctacgatgttggagacattgtgcattctgtcagagcaaaatggggtataaaggccaattgtccctgctccaacaggcagttcaagctcttctcgaagccagccttaaaggaagacctgaagcaggcatccttgtctggagaaaaaccaagtctcggcaccatggtacagcaaagctcccctgtgttggagccagcagccgtgtgtggggaagcaccctccaagccagccagcaatgtgaagcccatctgtccagccaacacatcccctttaaactggctggctgacctgaccagtggcaatgtcaacaaggaaaacaaggaaaaacagctgactatgccaattttaaagaacgaaatcaaatgccttccacccttgcctcctctgaacaagtccagcactgtcctccatacttttaacagcacaattttgacacccgtgagcaacaataattctggttttcttcgaaatcttttgaattcatccacaggaaagacagaaaatggactaaaaaacacacccaaaatccttgatgatatctttgcctctttggtacaaaacaagacttcttctgacttatccaagaggcctcaaggactgacgatcaagcctagcattcttggttttgacactcctcactactggctgtgtgacaaccgcctgctgtgcttgcaagaccccaacaataagagcaattggaatgtctttagggaatgctggaaacaggggcagccagtgatggtgtcgggagtgcatcataaattaaacactgaactctggaaacccgagtccttcaggaaagagtttggcgagcaagaagtagacctagtcaattgtaggaccaatgaaatcatcacaggagccacagtgggagacttctgggatggatttgaagatgttccaaaccgtttgaaaaacgaaaaagaaaaagaaccaatggtgttgaaacttaaggactggccgccaggagaagactttagagatatgatgccttccaggtttgatgatctgatggccaacattccactgcctgagtataccaggcgagatggcaaactgaacctggcctctagactgccaaactactttgtacggccagacctgggccccaagatgtacaatgcttatggattgatcactccagaagatcggaaatatgggaccacgaatcttcacttagatgtatctgatgcagccaatgtcatggtttatgtgggaattcccaaaggacagtgtgaacaagaggaagaagtccttagaaccatccaagatggagattcggatgaactcacaatcaagcgatttattgaaggaaaagagaagccaggcgccctttggcacatatatgctgctaaagacacagaaaagataagagaattccttaaaaaggtatctgaagagcagggtcaagaaaaccccgcagaccatgatcctattcatgatcagagctggtatttagaccgatcactgagaaagcgcctttatcaagagtatggagttcaaggctgggctattgtacaatttcttggcgatgtggtgtttatcccggcaggagctccacatcaggttcataacttatacagctgtatcaaagtcgctgaagacttcgtgtctccagagcatgtgaaacactgcttctggctcactcaggaattccgtcacttgtcacagactcataccaaccacgaagataaactgcaggtaaagaatgttatctaccatgcagtaaaagatgcagttgctatgctgaaagcagtgaatccagtttgggcaaatgttaactcctctgcacattggagatgattattggcagctgatcaaactcttcaggcaggattcctgtggactttgagatttcctgttacctcatcttcttttttaaagtacacctgacttaggagggtactgtctctaatgtatatttctagtgtttacagacactaagtgtgtatatgtagtaactatttacagaccatgcatccttatactgtgacttcacctagtacagatcttcaaccaagctgaagacctgctgctctgaaacagtacttgcagttactccccagctgttgtttggacagttcattcgaatggatttttaactattagggatcacttcgaagtttcattggattttattttatgtccttcagagcaccctcccgcacccactaggtcccagaagagcaatggaggaagtgacagctaatggtgcagttctaaatatattgcataggactggcatatagcagaaataactactgtataattcttggggttaaccatctttatttaatggaattttaatttaaatgaagctttgctaattttaagtggtaagcattttgcattaaaatattcata

SEQ ID NO: 12091 - protein, 1214 aa, Rattus norvegicus
  ref <308>: DATABASE ACCESSION NUMBER: SWISS-Prot / Q63679
  ref <309>: DATABASE ENTRY DATE: 1998-07-15
MYKSLLDKAGLGSITSVRFLGDQQSVFVSKDLLKPIQDVNSLRLSLTDNQTVSKEFQALIVKHLDESHLLQGDKNLVGSEVRIYSLDPSTQWFSATVVHGNPSSKTLQVNCEEIPALKIVDPALIHVEVVHDNFVTCGNSTRIGAVKRKSSENNGSSVSKQAKSCSEVSPSMCPVQSVPTTVCKEILLGCTAATPSSNRQQNTPQAANSPPNIGAKLPQGCHKQSLPEEISSCLNTKSEVLRTKPDVCKAGLLSSKSSQVGAGDLKILSEPKGSCIQPKTNTDQESRLESTPQPVTGLTKECLVTKTSSKAELDNATAPELQKRLEHTASTPDGLSDKPEVEAGVTRLNSCSEKKVGPSDLGSQSQNLKETSVKVDHDSCCTRSSNKTQTPPARKSVLTDPDKLKKLQQSGEAFVQDDSCVNIVAQLPKCRECRLDSLRKDKDQQKDSPVFCRFFHFRRLQFNKHGVLRVEGFLTPNKYDSEAIGLWLPLTKNVVGTDLDTAKYILANIGDHFCQMVISEKEAMSTIEPHRQVAWKRAVKGVREMCDVCDTTIFNLHWVCPRCGFGVCVDCYRLKRKNCQQGAAYKTFSWIRCVKSQIHEPENLMPTQIIPGKALYDVGDIVHSVRAKWGIKANCPCSNRQFKLFSKPALKEDLKQASLSGEKPSLGTMVQQSSPVLEPAAVCGEAPSKPASNVKPICPANTSPLNWLADLTSGNVNKENKEKQLTMPILKNEIKCLPPLPPLNKSSTVLHTFNSTILTPVSNNNSGFLRNLLNSSTGKTENGLKNTPKILDDIFASLVQNKTSSDLSKRPQGLTIKPSILGFDTPHYWLCDNRLLCLQDPNNKSNWNVFRECWKQGQPVMVSGVHHKLNTELWKPESFRKEFGEQEVDLVNCRTNEIITGATVGDFWDGFEDVPNRLKNEKEKEPMVLKLKDWPPGEDFRDMMPSRFDDLMANIPLPEYTRRDGKLNLASRLPNYFVRPDLGPKMYNAYGLITPEDRKYGTTNLHLDVSDAANVMVYVGIPKGQCEQEEEVLRTIQDGDSDELTIKRFIEGKEKPGALWHIYAAKDTEKIREFLKKVSEEQGQENPADHDPIHDQSWYLDRSLRKRLYQEYGVQGWAIVQFLGDVVFIPAGAPHQVHNLYSCIKVAEDFVSPEHVKHCFWLTQEFRHLSQTHTNHEDKLQVKNVIYHAVKDAVAMLKAVNPVWANVNSSAHWR

SEQ ID NO: 12092 - DNA, 4525 bp, Homo sapiens
  misc_feature (1)..(4525): n=a, c, g or t
  ref <308>: DATABASE ACCESSION NUMBER: EMBL / AF155648
  ref <309>: DATABASE ENTRY DATE: 2000-05-02
atgggggcggccgaggtcggaggcggcccgaaaagacgaagcgccgacggggaccggtggagtgacacccccgcaggtggccctggctgtccgggaccattcgagctgtttctcacactgacgttaccaagaaagatttgaaggtttgtgtggagtttgatggagagtcttggagaaagagaagatggatagatgtctacagccttctaagaagagcatttttagtagaacataacctggttctggcagaacgaaaatcacctgagattcctgagcaagttattcagtggcctgcaagaatgtacaaatctctactagacaaagctggcttgggatccataacttctgttcgcttccttggagatcagcaaagtgtatttgtttccaaagaccttttgaaacctatacaggatgtaaacagtcttcggctttcccttactgataatcagacggtcagtaaagagtttcaagctttgattgtaaaacatttggatgaaagccatcttttacaaggtgacaagaaccttgttggttcagaagtaagaatttatagcttggatccatctactcagtggttttcagcaactgttgtacatggaaacccctcatccaaaactcttcaagtcaactgtgaggagattccagcgctgaaaattgttgatccagcactgattcacgttgaagttgtacacgataattttgtaacgtgtggtaattctacaagaattggagctgtgaaacgcaagtcttctgagaataatggaagttcagtttctaaacaagcaaaatcttgctctgaggtctctcccagtatgtgtcctgtacagtctgttcccacaacagtgtgtaaggagatcctgcttggctgtactgcagcaaccccatctagcaacagacagcagaacactccccaggcagccaattctccacctaacattggagcaaaacttcctcaaggatgtcacaagcagagtttaccagaagaaatttcttcctgtctaaatacaaaatctgaagtactgagaacaaaaccagatgtttgcaaagcaggattactttcttcaaaatcttctcaggttggagctggagacttgaaaattctgagtgagcccaaaggtagctgtatccagcctaaaacaaacactgatcaggagagcagactggagtctactccacaaccagtcactggccttacaaaggagtgcttggttacaaagacttcctctaaggcagaactggacaatgccactgctcctgaactgcagaagcgtctagagcacacagcttccacacccgatggtctttcagacaagccagaagtggaagcaggtgtcactaggcttaatagctgttcagaaaagaaggttggaccttcagatttaggttcgcagtcacagaatttaaaggaaacttcagtaaaagtcgatcatgacagctgttgtacaagaagcagtaataaaacccagactcccccagcccggaagtcagttttgacagacccagataaactcaagaagctacagcagagtggagaggcctttgttcaggatgactcctgtgttaacatcgtggcacagctgcccaagtgtcgggagtgtcgattagacagcctgcgcaaggataaggaccagcagaaagactcgccagtgttctgtcgcttttttcacttcaggaggttacaattcaacaaacatggtgttctgcgggtagaaggcttcttaacaccaaacaagtacgacagtgaagcgattggcttgtggctgcctttgaccaaaaatgttgtggggaccgatttggacacagcaaagtatatcctggccaatattggagaccacttctgtcaaatggtgatttctgagaaggaggctatgtcaactattgagccacacaggcaggttgcttggaaacgagctgtcaaaggagttagagaaatgtgtgatgtgtgtgacacaaccattttcaacctgcactgggtgtgccctcggtgtgggtttggagtgtgtgtagattgctaccggctgaagaggaagaattgccaacagggggctgcctacaagactttctcttggataaggtgtgtgaagagtcaaatacatgagcctgagaacctgatgcccacgcagattattcctggcaaagccctctacgatgttggagacattgtgcattctgtcagagcaaaatggggtataaaggccaattgtccctgctccaacaggcagttcaagctcttctcgaagccagccttaaaggaagacctgaagcaggcatccttgtctggagaaaaaccaagtctcggcaccatggtacagcaaagctcccctgtgttggagccagcagccgtgtgtggggaagcaccctccaagccagccagcaatgtgaagcccatctgtccagccaacacatcccctttaaactggctggctgacctgaccagtggcaatgtcaacaaggaaaacaaggaaaaacagctgactatgccaattttaaagaacgaaatcaaatgccttccacccttgcctcctctgaacaagtccagcactgtcctccatacttttaacagcacaattttgacacccgtgagcaacaataattctggttttcttcgaaatcttttgaattcatccacaggaaagacagaaaatggactaaaaaacacacccaaaatccttgatgatatctttgcctctttggtgcaaaanaagacgacttctgacttatcnaagaggcctcaaggactaaccatcaagcccagcattctgggttttgacactcctcactattggctttgtgataatcgcttgctgtgcttgcaagaccccaacaataagagcaactggaatgtgtttagggagtgctggaaacaagggcagccagtgatggtgtctggagtgcatcataaattgaactctgaactttggaaacctgaatccttcaggaaagagtttggtgagcaggaagtagacctagttaattgtaggaccaatgaaatcatcacaggagccacagtaggagacttctgggatggatttgaagatgttccaaatcgtttgaaaaatgaaaaagaaccaatggtgttgaaacttaaggactggccaccaggagaagattttagagatatgatgccttccaggtttgatgatctgatggccaacattccactgcccgagtacacaaggcgagatggcaaactgaatttggcctctaggctgccaaactactttgttcggccagatctgggccccaagatgtataatgcttatggattaatcactcctgaagatcggaaatatggaacaacaaatcttcacttagatgtatctgatgcagctaatgtcatggtctatgtgggaattcccaaaggacagtgtgagcaagaagaagaagtccttaagaccatccaagatggagattctgacgaactcacaataaagcgatttattgaaggaaaagagaagccaggagcactgtggcacatatatgctgcaaaggacacggagaagataagggaatttcttaaaaaggtatcagaagagcaaggtcaagaaaacccagcagaccacgatcctattcatgatcaaagctggtatttagaccgatcattaagaaaacgtcttcatcaagagtatggagttcaaggctgggctattgtacagtttcttggggatgtggtgtttatcccggcaggagctccacatcaggttcataacttatatagctgcatcaaagtggctgaagattttgtttctccagagcatgttaaacactgcttctggcttactcaggaattccgatatctgtcacagactcataccaatcacgaagataaattacaggtgaagaatgttatctaccatgcagtgaaagatgcagttgctatgctgaaagcagtgaatccagttttggcaaaccttaatctccctgcacattggaaatgaattacaggcagctgttcaaactcttcaggcaggattcctgtggactttgagattcatgttacctcatcttcttttttaaactgtaccccaacttgtgagggtactctgtctaatgtatatttctagtgtttacagacagtaaatgtgtatatgtagtaactatttacagaacatgcatccttaaactgtgacttctcacctagtgcagaacttttaccaggctgtaaaagcaaaacctcgtatcagctctggaacaatacctgcagttattcttcagctgtttggacaacttagattgggtttataactattaggaatcactgcacagtttatttgggttgtgttttgtgtctgagtcccctccctcatcccttagggtccagaagagcaatggaggaagtgacagctaatgttgcagttcttattgtatggcataggactggcattatatagcagaaatcaactactgtacaatttcttggggttaaccatctttagttaaatggaattttaatttaaatgacgctttgctaattttaagtgttaagcattttgcattaaaatattcatataataaaaaaaaaaaa

SEQ ID NO: 12093 - protein, 1213 aa, Homo sapiens
  misc_feature (1)..(1213): Xaa=Unknown amino acid
MYKSLLDKAGLGSITSVRFLGDQQSVFVSKDLLKPIQDVNSLRLSLTDNQTVSKEFQALIVKHLDESHLLQGDKNLVGSEVRIYSLDPSTQWFSATVVHGNPSSKTLQVNCEEIPALKIVDPALIHVEVVHDNFVTCGNSTRIGAVKRKSSENNGSSVSKQAKSCSEVSPSMCPVQSVPTTVCKEILLGCTAATPSSNRQQNTPQAANSPPNIGAKLPQGCHKQSLPEEISSCLNTKSEVLRTKPDVCKAGLLSSKSSQVGAGDLKILSEPKGSCIQPKTNTDQESRLESTPQPVTGLTKECLVTKTSSKAELDNATAPELQKRLEHTASTPDGLSDKPEVEAGVTRLNSCSEKKVGPSDLGSQSQNLKETSVKVDHDSCCTRSSNKTQTPPARKSVLTDPDKLKKLQQSGEAFVQDDSCVNIVAQLPKCRECRLDSLRKDKDQQKDSPVFCRFFHFRRLQFNKHGVLRVEGFLTPNKYDSEAIGLWLPLTKNVVGTDLDTAKYILANIGDHFCQMVISEKEAMSTIEPHRQVAWKRAVKGVREMCDVCDTTIFNLHWVCPRCGFGVCVDCYRLKRKNCQQGAAYKTFSWIRCVKSQIHEPENLMPTQIIPGKALYDVGDIVHSVRAKWGIKANCPCSNRQFKLFSKPALKEDLKQASLSGEKPSLGTMVQQSSPVLEPAAVCGEAPSKPASNVKPICPANTSPLNWLADLTSGNVNKENKEKQLTMPILKNEIKCLPPLPPLNKSSTVLHTFNSTILTPVSNNNSGFLRNLLNSSTGKTENGLKNTPKILDDIFASLVQNKTTSDLSKRPQGLTIKPSILGFDTPHYWLCDNRLLCLQDPNNKSNWNVFRECWKQGQPVMVSGVHHKLNSELWKPESFRKEFGEQEVDLVNCRTNEIITGATVGDFWDGFEDVPNRLKNEKEPMVLKLKDWPPGEDFRDMMPSRFDDLMANIPLPEYTRRDGKLNLASRLPNYFVRPDLGPKMYNAYGLITPEDRKYGTTNLHLDVSDAANVMVYVGIPKGQCEQEEEVLKTIQDGDSDELTIKRFIEGKEKPGALWHIYAAKDTEKIREFLKKVSEEQGQENPADHDPIHDQSWYLDRSLRKRLHQEYGVQGWAIVQFLGDVVFIPAGAPHQVHNLYSCIKVAEDFVSPEHVKHCFWLTQEFRYLSQTHTNHEDKLQVKNVIYHAVKDAVAMLKAVNPVLANLNLPAHWKX

SEQ ID NO: 12094 - DNA, 498 bp, Rattus norvegicus; identical to SEQ ID NO: 9780
  ref <308>: DATABASE ACCESSION NUMBER: EMBL / X61381
  ref <309>: DATABASE ENTRY DATE: 1992-05-26

SEQ ID NO: 12095 - protein, 137 aa, Rattus norvegicus; identical to SEQ ID NO: 9781
  ref <308>: DATABASE ACCESSION NUMBER: SWISS-Prot / CAA43655
  ref <309>: DATABASE ENTRY DATE: 2002-06-15

SEQ ID NO: 12096 - DNA, 637 bp, Homo sapiens; identical to SEQ ID NO: 9782
  ref <308>: DATABASE ACCESSION NUMBER: EMBL / BC006794
  ref <309>: DATABASE ENTRY DATE: 2001-07-13

SEQ ID NO: 12097 - protein, 133 aa, Homo sapiens; identical to SEQ ID NO: 9783
  ref <308>: DATABASE ACCESSION NUMBER: SWISS-Prot / Q01628
  ref <309>: DATABASE ENTRY DATE: 2002-06-15

SEQ ID NO: 12098 - DNA, 860 bp, Rattus norvegicus; identical to SEQ ID NO: 9784
  ref <308>: DATABASE ACCESSION NUMBER: EMBL / X61654
  ref <309>: DATABASE ENTRY DATE: 1993-07-20

SEQ ID NO: 12099 - protein, 237 aa, Rattus norvegicus; identical to SEQ ID NO: 9785
  ref <308>: DATABASE ACCESSION NUMBER: SWISS-Prot / P28648
  ref <309>: DATABASE ENTRY DATE: 2001-10-16

SEQ ID NO: 12100 - DNA, 826 bp, Homo sapiens; identical to SEQ ID NO: 9786
  ref <308>: DATABASE ACCESSION NUMBER: EMBL / X07982
  ref <309>: DATABASE ENTRY DATE: 1995-03-27

SEQ ID NO: 12101 - protein, 237 aa, Homo sapiens; identical to SEQ ID NO: 9787
  ref <308>: DATABASE ACCESSION NUMBER: SWISS-Prot / P08962
  ref <309>: DATABASE ENTRY DATE: 2002-06-15

SEQ ID NO: 12102 - DNA, 2153 bp, Rattus norvegicus; identical to SEQ ID NO: 9788
  ref <308>: DATABASE ACCESSION NUMBER: EMBL / X62322
  ref <309>: DATABASE ENTRY DATE: 1992-08-26

SEQ ID NO: 12103 - protein, 588 aa, Rattus norvegicus; identical to SEQ ID NO: 9789
  ref <308>: DATABASE ACCESSION NUMBER: SWISS-Prot / P23785
  ref <309>: DATABASE ENTRY DATE: 2001-10-16

SEQ ID NO: 12104 - DNA, 2152 bp, Homo sapiens; identical to SEQ ID NO: 9790
  ref <308>: DATABASE ACCESSION NUMBER: EMBL / X62320
  ref <309>: DATABASE ENTRY DATE: 1992-08-26

SEQ ID NO: 12105 - protein, 593 aa, Homo sapiens; identical to SEQ ID NO: 9791
  ref <308>: DATABASE ACCESSION NUMBER: SWISS-Prot / P28799
  ref <309>: DATABASE ENTRY DATE: 2002-06-15

SEQ ID NO: 12106 - DNA, 1454 bp, Rattus norvegicus
  ref <308>: DATABASE ACCESSION NUMBER: Refseq / NM_013085
  ref <309>: DATABASE ENTRY DATE: 2000-11-01
gggctgtcatcaatccagtccttgcgtgtctgccggcgccccttccgctgcagtcaccgaactgctgtctagagagagcccagcgtcagtaccatgagagtctggcttgcgagcctgttcctctgcgccttggtggcgcactctgaaggtggcagtgaacttggagcttctgatgaatcaaactgtggctgtcagaacggaggagtatgtgtgtcctacaagtacttctccagcattcgaagatgcagctgcccaaagaaattcaaaggggagcactgtgagatagatacatcaaaaacctgctatcatggaaatggtcaatcttaccgaggaaaggccaatactgacaccaaaggccggccctgcctggcctggaattcacccgctgtccttcagcaaacctacaatgctcacagatccgatgctcttagcctaggcctggggaaacacaattactgcaggaaccccgacaaccagaggcgaccctggtgctatgtgcaaattggcctaaagcagtttgtccaagaatgcatggtgcaggactgctctctcagcaaaaagccttcttctactgtagaccaacaagggttccagtgtggccagaaggctctaaggccccgcttcaagatcgttgggggagaattcactgtcgttgagaaccagccctggtttgcagccatctacctgaagaataagggaggaagccctccctcctttaaatgtggtgggagcctcatcagtccttgctgggtggccagcgccacacactgcttcgtgaatcagccaaagaaggaagagtacgttgtctacctgggtcagtcgaagcggaactcctataaccccggagagatgaagtttgaggtggagcagctcatcttgcacgaagacttcagcgacgaaactctggccttccataatgacatagccttgctgaagatacgtaccagcacgggccaatgcgcacagccatccaggaccatacagaccatctgcctgcccccgaggtttggtgatgctccgtttggttcagactgtgagatcactggcttcggacaagagagtgccactgactatttctatccgaagaacctgaaaatgtcagttgtaaagattatttctcacgaacagtgcaagcagcctcactactatggctctgaaattaattataaaatgctgtgtgctgctgacccagagtggaaaacagattcctgctcgggagattcaggaggacctcttatctgtaacatcgatggccgcccaactctgagcgggattgtgagctggggcagtggatgtgcagagaaaaacaagcctggtgtctacacgagggtctcatacttcctgaactggattcagtcccacattggagaagagaatggcctagccttctgatggtccccaggcagctgggggaagaaacggatgggtcgccactcccacgctgaccgacctct

SEQ ID NO: 12107 - protein, 432 aa, Rattus norvegicus
  ref <308>: DATABASE ACCESSION NUMBER: SWISS-Prot / P29598
  ref <309>: DATABASE ENTRY DATE: 2002-06-15
MRVWLASLFLCALVANSEGGSELEASDESNCGCQNGGVCVSYKYFSSIRRCSCPKKFKGEHCEIDTSKTCYHGNGQSYRGKANTDTKGRPCLAWNSPAVLQQTYNAHRSDALSLGLGKHNYCRNPDNQRRPWCYVQIGLKQFVQECMVQDCSLSKKPSSTVDQQGFQCGQKALRPRFKIVGGEFTVVENQPWFAAIYLKNKGGSPPSFKCGGSLISPCWVASATHCFVNQPKKEEYVVYLGQSKRNSYNPGEMKFEVEQLILHEDFSDETLAFHNDIALLKIRTSTGQCAQPSRTIQTICLPPRFGDAPFGSDCEITGFGQESATDYFYPKDLKMSVVKIISHEQCKQPHYYGSEINYKMLCAADPEWKTDSCSGDSGGPLICNIDGRPTLSGIVSWGSGCAEKNKPGVYTRVSYFLNWIQSHIGEENGLAF
